United States Patent Application Publication US 2012/0159672 A1 - sequence listing, part 14

SEQ ID NO: 31167 - protein, 224 aa, Zea mays subsp. mays
  peptide (1)..(224): Ceres Seq. ID no. 13493256
  misc_feature (1)..(47): Pfam Name: Pfam Description:  B-box zinc finger
  misc_feature (1)..(181): NCBI GI NO: 38344979 NR Description: OSJNBa0011L07.9
  misc_feature (1)..(137): NCBI GI NO: 15222289 NR Description: CONSTANS B-box zinc finger family protein
  misc_feature (132)..(153): NCBI GI NO: 15222289 NR Description: CONSTANS B-box zinc finger family protein
  misc_feature (1)..(133): NCBI GI NO: 22329252 NR Description: CONSTANS B-box zinc finger family protein
  misc_feature (1)..(133): NCBI GI NO: 26452767 NR Description: putative zinc finger protein
  misc_feature (127)..(153): NCBI GI NO: 22329252 NR Description: CONSTANS B-box zinc finger family protein
  misc_feature (127)..(153): NCBI GI NO: 26452767 NR Description: putative zinc finger protein
  misc_feature (1)..(133): NCBI GI NO: 7485796 NR Description: hypothetical protein F19H22
  misc_feature (127)..(153): NCBI GI NO: 7485796 NR Description: hypothetical protein F19H22
  misc_feature (1)..(139): NCBI GI NO: 3618312 NR Description: zinc finger protein
  misc_feature (123)..(123): Xaa is any aa, unknown or other
MKVQCDVCAAEAASVFCCADEAALCEACDRRVHRANKLAGKHRRLSLLGPAAPSSSAQQTPPPPLCDICQEKRGLLFCKEDRAILCRDCDVPVHTASELAMRHTRFLLTGVRLSAEPAARPPXSEEDENDSSGSSISEYLTKTLPGWHVEDFLVDETAAAATTIGVSTDVSYQAGGLARTGDGYYSAWMAPEQIFCEGKGSRMPQMAMCSSSKRPRATSSYSYW

SEQ ID NO: 31168 - protein, 124 aa, Zea mays subsp. mays
  peptide (1)..(124): Ceres Seq. ID no. 13493257
  misc_feature (1)..(81): NCBI GI NO: 38344979 NR Description: OSJNBa0011L07.9
  misc_feature (1)..(37): NCBI GI NO: 15222289 NR Description: CONSTANS B-box zinc finger family protein
  misc_feature (32)..(53): NCBI GI NO: 15222289 NR Description: CONSTANS B-box zinc finger family protein
  misc_feature (1)..(33): NCBI GI NO: 22329252 NR Description: CONSTANS B-box zinc finger family protein
  misc_feature (1)..(33): NCBI GI NO: 26452767 NR Description: putative zinc finger protein
  misc_feature (27)..(53): NCBI GI NO: 22329252 NR Description: CONSTANS B-box zinc finger family protein
  misc_feature (27)..(53): NCBI GI NO: 26452767 NR Description: putative zinc finger protein
  misc_feature (1)..(33): NCBI GI NO: 7485796 NR Description: hypothetical protein F19H22
  misc_feature (27)..(53): NCBI GI NO: 7485796 NR Description: hypothetical protein F19H22
  misc_feature (1)..(39): NCBI GI NO: 3618312 NR Description: zinc finger protein
  misc_feature (23)..(23): Xaa is any aa, unknown or other
MRHTRFLLTGVRLSAEPAARPPXSEEDENDSSGSSISEYLTKTLPGWHVEDFLVDETAAAATTIGVSTDVSYQAGGLARTGDGYYSAWMAPEQIFCEGKGSRMPQMAMCSSSKRPRATSSYSYW

SEQ ID NO: 31169 - DNA, 719 bp, Zea mays subsp. mays
  misc_feature (1)..(719): Ceres Seq. ID no. 12347337
  misc_feature (419)..(419): n is a, c, t, g, unknown, or other
ccgaaatttgggtgaacccgaacgcgcagtcctagttcaagctgaaaggagaacataaaagaggagaggctagggttttggcgtccgagaccaaaccaagctctctccggcgacggtgagggctcgatatcggagtccagtaggcggctcctgctgcttcggcggtccctaatccctctctcggcagtgtacagatggcgtccggcggtccggcgctcgagccgctcgtcgaccaggtcatctccgtcatcaccaacgatggccgcaacatcgtgggtacgctcaggggattcgatcaggccaccaacattatactcgacgagtcccatgagagggtctattctagaaaggagggagtccaacaacttgttcttggtctgtacattatcaggggtgacaacataagcgttgtgggcgangttgatgaagagctggattcaagattggatatgtcgaagctaagggcgcacccactgaagcctgttattcactgaggtccgagtatgtctttgggtaatatgtggactggatggatgggtcactgttgaatgcaggatgtagcatcatcatggtgaggggactgagtaatatggacatgtatcttgcgtattgtgcaatgaatgtgttggctgttgggtcgcttgcctacgcattctgtaagattgcagttaccattaggaactgaactcaactcgactgaattaatatcatttggcttt

SEQ ID NO: 31170 - protein, 99 aa, Zea mays subsp. mays
  peptide (1)..(99): Ceres Seq. ID no. 12347338
  misc_feature (8)..(74): Pfam Name: Pfam Description:  LSM domain
  misc_feature (8)..(99): NCBI GI NO: 15218779 NR Description: small nuclear ribonucleoprotein, putative
  misc_feature (14)..(99): NCBI GI NO: 25404943 NR Description: protein F1E22.8 [imported] - Arabidopsis thaliana
  misc_feature (8)..(99): NCBI GI NO: 31240533 NR Description: ENSANGP00000020162 [Anopheles gambiae]
  misc_feature (7)..(99): NCBI GI NO: 7706425 NR Description: U6 snRNA-associated Sm-like protein LSm8
  misc_feature (8)..(99): NCBI GI NO: 24655606 NR Description: CG2021-PA [Drosophila melanogaster]
  misc_feature (8)..(97): NCBI GI NO: 17544148 NR Description: SM protein (10.8 kD) [Caenorhabditis elegans]
  misc_feature (8)..(97): NCBI GI NO: 39584186 NR Description: Hypothetical protein CBG05470
  misc_feature (7)..(99): NCBI GI NO: 19076009 NR Description: splicing factor [Schizosaccharomyces pombe]
  misc_feature (7)..(70): NCBI GI NO: 28279736 NR Description: Similar to U6 snRNA-associated Sm-like protein LSm8
  misc_feature (8)..(97): NCBI GI NO: 23612724 NR Description: u6 snRNA-associated sm-like protein, putative
  misc_feature (75)..(75): Xaa is any aa, unknown or other
MASGGPALEPLVDQVISVITNDGRNIVGTLRGFDQATNIILDESHERVYSRKEGVQQLVLGLYIIRGDNISVVGXVDEELDSRLDMSKLRAHPLKPVIH

SEQ ID NO: 31171 - protein, 51 aa, Zea mays subsp. mays
  peptide (1)..(51): Ceres Seq. ID no. 12347339
MDGSLLNAGCSIIMVRGLSNMDMYLAYCAMNVLAVGSLAYAFCKIAVTIRN

SEQ ID NO: 31172 - DNA, 1031 bp, Zea mays subsp. mays
  misc_feature (1)..(1031): Ceres Seq. ID no. 12355251
agaacgcactagcatttccacgcggcgttccacttccacccgaaaccccaatcaagcgtgcactgcatctgcgtagcccgttcaccacgcactcgcttccctccctaccgtgcgatctatggacggcgacggcgcgacgtgggggcagccgatgctggagaagcggccgagccaccgggagcggcatttcacggcgggggaagtggtgcgggacgtcatcatgggggtgtccgacggcctcaccgtgcccttcgccctcgccgcggggctctccggcgccagcgcgccctcctcgctcgtcctcaccgccggcctcgccgaggccccgccggcgccatctccatgggactcggagggtaccttgcggcccagagcgaggcggaccactacaagcgggagatgagaagggagcaggaggagatcatcgccgtcccagacaccgaggccgctgagattggagagatcatgtcacggtatgggctcgagccgcaggagtacggccctgtcgtcgccggactcaggcgaaaccctcaagcttggctagacttcatgatgaggttcgagctgggactggagagaccggatcccagaagggctctgcagagcgccttcacgatcgcagtgtcctacgtggtcggcgggctggtccctctcctgccctacgtgctcgtctccgcggcgaaggatgccatgctcacatccgtcagagtcacgctggccgcgctgcttttcttcggctacgtcaagggccgcttcacggggaactggccgttcgccagtgccgtccagaccgctgtcattggagcgctcgcttcggcggcggcgtacgggatggcgaaggctgttcaggcgaggtagttgtttgttggtgaggcggcggcgtcaggcgttttgggaaccagagtttcagtaggatgcggtaaaactgaagaaagctgtataattccgatcctttgggggacttctcgtttacagtgttaatcgcgggatctagtgctagtctactcttttgaataaatctaggggaggat

SEQ ID NO: 31173 - protein, 171 aa, Zea mays subsp. mays
  peptide (1)..(171): Ceres Seq. ID no. 12355252
  misc_feature (1)..(171): NCBI GI NO: 38567721 NR Description: B1358B12.19
  misc_feature (1)..(169): NCBI GI NO: 15226346 NR Description: putative membrane protein; protein id: At2g01770.1
  misc_feature (1)..(166): NCBI GI NO: 6323249 NR Description: Functions in the homeostasis of both calcium and manganese ions
  misc_feature (1)..(170): NCBI GI NO: 40741878 NR Description: hypothetical protein AN4990.2
  misc_feature (1)..(168): NCBI GI NO: 40740699 NR Description: hypothetical protein AN3681.2
  misc_feature (1)..(164): NCBI GI NO: 19554141 NR Description: uncharacterized membrane protein
  misc_feature (1)..(164): NCBI GI NO: 33596200 NR Description: putative membrane protein
  misc_feature (1)..(166): NCBI GI NO: 22984482 NR Description: hypothetical protein [Burkholderia fungorum]
  misc_feature (1)..(168): NCBI GI NO: 15599046 NR Description: hypothetical protein [Pseudomonas aeruginosa PA01]
  misc_feature (1)..(164): NCBI GI NO: 25029211 NR Description: putative nodulin 21-related protein
MGLGGYLAAQSEADHYKREMRREQEEIIAVPDTEAAEIGEIMSRYGLEPQEYGPVVAGLRRNPQAWLDFMMRFELGLERPDPRRALQSAFTIAVSYVVGGLVPLLPYVLVSAAKDAMLTSVRVTLAALLFFGYVKGRFTGNWPFASAVQTAVIGALASAAAYGMAKAVQAR

SEQ ID NO: 31174 - protein, 152 aa, Zea mays subsp. mays
  peptide (1)..(152): Ceres Seq. ID no. 12355253
  misc_feature (1)..(152): NCBI GI NO: 38567721 NR Description: B1358B12.19
  misc_feature (1)..(150): NCBI GI NO: 15226346 NR Description: putative membrane protein; protein id: At2g01770.1
  misc_feature (1)..(147): NCBI GI NO: 6323249 NR Description: Functions in the homeostasis of both calcium and manganese ions
  misc_feature (1)..(151): NCBI GI NO: 40741878 NR Description: hypothetical protein AN4990.2
  misc_feature (1)..(149): NCBI GI NO: 40740699 NR Description: hypothetical protein AN3681.2
  misc_feature (1)..(145): NCBI GI NO: 19554141 NR Description: uncharacterized membrane protein
  misc_feature (1)..(145): NCBI GI NO: 33596200 NR Description: putative membrane protein
  misc_feature (1)..(147): NCBI GI NO: 22984482 NR Description: hypothetical protein [Burkholderia fungorum]
  misc_feature (1)..(149): NCBI GI NO: 15599046 NR Description: hypothetical protein [Pseudomonas aeruginosa PA01]
  misc_feature (1)..(145): NCBI GI NO: 25029211 NR Description: putative nodulin 21-related protein
MRREQEEIIAVPDTEAAEIGEIMSRYGLEPQEYGPVVAGLRRNPQAWLDFMMRFELGLERPDPRRALQSAFTIAVSYVVGGLVPLLPYVLVSAAKDAMLTSVRVTLAALLFFGYVKGRFTGNWPFASAVQTAVIGALASAAAYGMAKAVQAR

SEQ ID NO: 31175 - protein, 149 aa, Zea mays subsp. mays
  peptide (1)..(149): Ceres Seq. ID no. 12355254
NALAFPRGVPLPPETPIKRALHLRSPFTTHSLPSLPCDLWTATARRGGSRCWRSGRATGSGISRRGKWCGTSSWGCPTASPCPSPSPRGSPAPARPPRSSSPPASPRPRRRHLHGTRRVPCGPERGGPLQAGDEKGAGGDHRRPRHRGR

SEQ ID NO: 31176 - DNA, 1065 bp, Zea mays subsp. mays
  misc_feature (1)..(1065): Ceres Seq. ID no. 12374811
actccccaagcgtcacaccgaatcactacagtcgagctcgagcaggaacaatccttgagcgcctgcctccccggtcctcagtatctattccacacctcatggcgccggcgctgagcaggaccctgggcccgtcgtcggtggccgcgctgcgcccgagcccgtcgtgccggggtctgctacgggccgcgctcgtgccgcagggcaggggcgcctccgcgaggtgcgcggtaggggtgagatgggaggcagccaggcggaggaggatggccggggtgaggtgcgacgccgccgtcgctgagaagcctgccggcgaggaggagacggccggcgagaagtacgagtaccaggctgaggttacccgcttgatggacttaattgtacacagtttatacagccacaaggaagtatttttacgtgagcttgtaagtaacgcgagtgatgcactggataagctgagattcctcagcgtaactgattcttctgtgttggctgatggtggtgagttggagataaggattaaacccgacctagaggcggggacaatcactatcacagatactggcattggaatgactaaagatgagctcaaagactgtcttggaaccattgcacaaagtggcacctcaaaatttttgaaggctctaaaggagaacaaagaccttggtgcagataatggactcattggtcaattcggtgtcgggttctattccgctttccttgttgcagagagggttgtggtgtctactaaaagtccaaaggcagataagcagtatgtttgggaagcagaggctgacagcagctcgtatgttatcaaggaagaaactgatcctgagaaaatgctttcacgtggaacagagattactctttatttgagagatgatgacaaatatgagtttgctgaccctaccaggattcaaggcttagttaagaactactcgcagtttgtctcattccccatatatacatggcaggaaaaatcaaaaacagttgaggttgaagaggaggaagaatcaaagggtgaagaggctactgaagaatcaaaaagtgaagaggctactgagggtg

SEQ ID NO: 31177 - protein, 354 aa, Zea mays subsp. mays
  peptide (1)..(354): Ceres Seq. ID no. 12374812
  misc_feature (132)..(293): Pfam Name: Pfam Description:  Histidine kinase-
  misc_feature (33)..(350): NCBI GI NO: 1076758 NR Description: heat-shock protein, 82K, precursor - rye
  misc_feature (33)..(353): NCBI GI NO: 15228059 NR Description: putative heat shock protein; protein id:At2g04030
  misc_feature (33)..(353): NCBI GI NO: 30678090 NR Description: heat shock protein, putative
  misc_feature (33)..(353): NCBI GI NO: 20453106 NR Description: At2g04030/F3C11.14 [Arabidopsis thaliana]
  misc_feature (85)..(353): NCBI GI NO: 1906830 NR Description: heat shock protein [Arabidopsis thaliana]
  misc_feature (95)..(353): NCBI GI NO: 15231505 NR Description: putative heat-shock protein; protein id:At3g07770
  misc_feature (90)..(353): NCBI GI NO: 23477636 NR Description: Grp94 [Xerophyta viscosa]
  misc_feature (108)..(353): NCBI GI NO: 544242 NR Description: ENDOPLASMIN HOMOLOG PRECURSOR (GRP94 HOMOLOG)
  misc_feature (90)..(353): NCBI GI NO: 18855040 NR Description: heat shock protein 90 [Oryza sativa]
  misc_feature (90)..(353): NCBI GI NO: 6863054 NR Description: heat shock protein 90 [Oryza sativa]
SPSVTPNHYSRARAGTILERLPPRSSVSIPHLMAPALSRTLGPSSVAALRPSPSCRGLLRAALVPQGRGASARCAVGVRWEAARRRRMAGVRCDAAVAEKPAGEEETAGEKYEYQAEVTRLMDLIVHSLYSHKEVFLRELVSNASDALDKLRFLSVTDSSVLADGGELEIRIKPDLEAGTITITDTGIGMTKDELKDCLGTIAQSGTSKFLKALKENKDLGADNGLIGQFGVGFYSAFLVAERVVVSTKSPKADKQYVWEAEADSSSYVIKEETDPEKMLSRGTEITLYLRDDDKYEFADPTRIQGLVKNYSQFVSFPIYTWQEKSKTVEVEEEEESKGEEATEESKSEEATEG

SEQ ID NO: 31178 - protein, 322 aa, Zea mays subsp. mays
  peptide (1)..(322): Ceres Seq. ID no. 12374813
  misc_feature (100)..(261): Pfam Name: Pfam Description:  Histidine kinase-
  misc_feature (1)..(318): NCBI GI NO: 1076758 NR Description: heat-shock protein, 82K, precursor - rye
  misc_feature (1)..(321): NCBI GI NO: 15228059 NR Description: putative heat shock protein; protein id:At2g04030
  misc_feature (1)..(321): NCBI GI NO: 30678090 NR Description: heat shock protein, putative
  misc_feature (1)..(321): NCBI GI NO: 20453106 NR Description: At2g04030/F3C11.14 [Arabidopsis thaliana]
  misc_feature (53)..(321): NCBI GI NO: 1906830 NR Description: heat shock protein [Arabidopsis thaliana]
  misc_feature (63)..(321): NCBI GI NO: 15231505 NR Description: putative heat-shock protein; protein id:At3g07770
  misc_feature (58)..(321): NCBI GI NO: 23477636 NR Description: Grp94 [Xerophyta viscosa]
  misc_feature (76)..(321): NCBI GI NO: 544242 NR Description: ENDOPLASMIN HOMOLOG PRECURSOR (GRP94 HOMOLOG)
  misc_feature (58)..(321): NCBI GI NO: 18855040 NR Description: heat shock protein 90 [Oryza sativa]
  misc_feature (58)..(321): NCBI GI NO: 6863054 NR Description: heat shock protein 90 [Oryza sativa]
MAPALSRTLGPSSVAALRPSPSCRGLLRAALVPQGRGASARCAVGVRWEAARRRRMAGVRCDAAVAEKPAGEEETAGEKYEYQAEVTRLMDLIVHSLYSHKEVFLRELVSNASDALDKLRFLSVTDSSVLADGGELEIRIKPDLEAGTITITDTGIGMTKDELKDCLGTIAQSGTSKFLKALKENKDLGADNGLIGQFGVGFYSAFLVAERVVVSTKSPKADKQYVWEAEADSSSYVIKEETDPEKMLSRGTEITLYLRDDDKYEFADPTRIQGLVKNYSQFVSFPIYTWQEKSKTVEVEEEEESKGEEATEESKSEEATEG

SEQ ID NO: 31179 - protein, 267 aa, Zea mays subsp. mays
  peptide (1)..(267): Ceres Seq. ID no. 12374814
  misc_feature (45)..(206): Pfam Name: Pfam Description:  Histidine kinase-
  misc_feature (1)..(263): NCBI GI NO: 1076758 NR Description: heat-shock protein, 82K, precursor - rye
  misc_feature (1)..(266): NCBI GI NO: 15228059 NR Description: putative heat shock protein; protein id:At2g04030
  misc_feature (1)..(266): NCBI GI NO: 30678090 NR Description: heat shock protein, putative
  misc_feature (1)..(266): NCBI GI NO: 20453106 NR Description: At2g04030/F3C11.14 [Arabidopsis thaliana]
  misc_feature (1)..(266): NCBI GI NO: 1906830 NR Description: heat shock protein [Arabidopsis thaliana]
  misc_feature (8)..(266): NCBI GI NO: 15231505 NR Description: putative heat-shock protein; protein id:At3g07770
  misc_feature (3)..(266): NCBI GI NO: 23477636 NR Description: Grp94 [Xerophyta viscosa]
  misc_feature (21)..(266): NCBI GI NO: 544242 NR Description: ENDOPLASMIN HOMOLOG PRECURSOR (GRP94 HOMOLOG)
  misc_feature (3)..(266): NCBI GI NO: 18855040 NR Description: heat shock protein 90 [Oryza sativa]
  misc_feature (3)..(266): NCBI GI NO: 6863054 NR Description: heat shock protein 90 [Oryza sativa]
MAGVRCDAAVAEKPAGEEETAGEKYEYQAEVTRLMDLIVHSLYSHKEVFLRELVSNASDALDKLRFLSVTDSSVLADGGELEIRIKPDLEAGTITITDTGIGMTKDELKDCLGTIAQSGTSKFLKALKENKDLGADNGLIGQFGVGFYSAFLVAERVVVSTKSPKADKQYVWEAEADSSSYVIKEETDPEKMLSRGTEITLYLRDDDKYEFADPTRIQGLVKNYSQFVSFPIYTWQEKSKTVEVEEEEESKGEEATEESKSEEATEG

SEQ ID NO: 31180 - DNA, 751 bp, Zea mays subsp. mays
  misc_feature (1)..(751): Ceres Seq. ID no. 12356736
ggagaaagtaccaagtgctcagggagttcagtctgacaatgatcctaacaatacaaccatttttgttggtggtcttgaccccaatgtcactgaagatatgttgaaacaagttttcaccccttatggggacgtagtccatgttaagattcctgttggcaaaagatgtggttttgttcaatatgctaacagatcttcggcagaggaggcattggtaattctgcaaggcaccttggttggagggcagaatgtgaggctttcatggggtcgcagcccttcaaacaaacaagttcagcctcaacaggactccaaccagtgggccggggctaatgctggatattatggctacggtcaaggctatgaggcctatgggtacccccagtctcaggaccctaatatgtataattatggagctggagcttatgctggctatccaaattaccaacaacaaccagtagcacagcaaccgccgcagcaacagtgagaggtccagtgacgctactgtcatttgggtgattgacgtggaaatatttatgagttgtaagatgagcttcggatgcaagctggattaggtatacagacatgattttcgtagtactcagattctgagttgccctcgtatcagagcttgtggtcccaatagcctgcagctgcagctaaaacgatctattttggtagcggaatgttttatctgcttattttgtaccgtgtcttccgctactgcggagccttgataacttgctatgttggattt

SEQ ID NO: 31181 - protein, 159 aa, Zea mays subsp. mays
  peptide (1)..(159): Ceres Seq. ID no. 12356737
  misc_feature (20)..(85): Pfam Name: a.k.a. RRM, RBD, or RNP domain Pfam Description: RNA recognition motif.
  misc_feature (1)..(159): NCBI GI NO: 40253807 NR Description: putative RNA Binding Protein 45
  misc_feature (1)..(158): NCBI GI NO: 39545835 NR Description: OSJNBb0060E08.6
  misc_feature (5)..(158): NCBI GI NO: 34896988 NR Description: putative RNA binding protein [Oryza sativa]
  misc_feature (5)..(159): NCBI GI NO: 34395214 NR Description: putative RNA Binding Protein
  misc_feature (5)..(159): NCBI GI NO: 34901884 NR Description: putative RNA Binding Protein 45
  misc_feature (7)..(159): NCBI GI NO: 30524689 NR Description: salt tolerance protein 6 [Beta vulgaris]
  misc_feature (7)..(148): NCBI GI NO: 9663767 NR Description: RNA Binding Protein 45 [Nicotiana plumbaginifolia]
  misc_feature (5)..(158): NCBI GI NO: 7485342 NR Description: hypothetical protein F10M23
  misc_feature (5)..(158): NCBI GI NO: 18416906 NR Description: RNA binding protein 45
  misc_feature (5)..(158): NCBI GI NO: 15221071 NR Description: RNA binding protein 45
EKVPSAQGVQSDNDPNNTTIFVGGLDPNVTEDMLKQVFTPYGDVVHVKIPVGKRCGFVQYANRSSAEEALVILQGTLVGGQNVRLSWGRSPSNKQVQPQQDSNQWAGANAGYYGYGQGYEAYGYPQSQDPNMYNYGAGAYAGYPNYQQQPVAQQPPQQQ

SEQ ID NO: 31182 - protein, 127 aa, Zea mays subsp. mays
  peptide (1)..(127): Ceres Seq. ID no. 12356738
  misc_feature (1)..(53): Pfam Name: a.k.a. RRM, RBD, or RNP domain Pfam Description: RNA recognition motif.
  misc_feature (1)..(127): NCBI GI NO: 40253807 NR Description: putative RNA Binding Protein 45
  misc_feature (1)..(126): NCBI GI NO: 39545835 NR Description: OSJNBb0060E08.6
  misc_feature (1)..(126): NCBI GI NO: 34896988 NR Description: putative RNA binding protein [Oryza sativa]
  misc_feature (1)..(127): NCBI GI NO: 34395214 NR Description: putative RNA Binding Protein
  misc_feature (1)..(127): NCBI GI NO: 34901884 NR Description: putative RNA Binding Protein 45
  misc_feature (1)..(127): NCBI GI NO: 30524689 NR Description: salt tolerance protein 6 [Beta vulgaris]
  misc_feature (1)..(116): NCBI GI NO: 9663767 NR Description: RNA Binding Protein 45 [Nicotiana plumbaginifolia]
  misc_feature (1)..(126): NCBI GI NO: 7485342 NR Description: hypothetical protein F10M23
  misc_feature (1)..(126): NCBI GI NO: 18416906 NR Description: RNA binding protein 45
  misc_feature (1)..(126): NCBI GI NO: 15221071 NR Description: RNA binding protein 45
MLKQVFTPYGDVVHVKIPVGKRCGFVQYANRSSAEEALVILQGTLVGGQNVRLSWGRSPSNKQVQPQQDSNQWAGANAGYYGYGQGYEAYGYPQSQDPNMYNYGAGAYAGYPNYQQQPVAQQPPQQQ

SEQ ID NO: 31183 - DNA, 771 bp, Zea mays subsp. mays
  misc_feature (1)..(771): Ceres Seq. ID no. 12415488
atcgatcgaacttgctaaaccagcggaaacctaaccagctaggcagcattagcttttcaacaagcctcgctcgcgcgccgtgaccgataggatggccatcacccacgacgactacgtctccctgtgcctcatggcgctcgcagccgcgggaggaggaggagggcacgctgcggctgccagtgccaggacgacgacgatgacgacgcaagagtgcgagctccgcttccggtgctccgtctgcggcaaggccttcgcgtcgcaccaggcgctgggcgggcacaaggccagccaccggaagccgccgccgacgctcgtacaggcggcgtcgtcgtcgtcgtcggtgacgacgaatacctcgtcggcgggcggcagcggcgccgggcaggggaggcacaggtgctcggtgtgccaccggggcttcgccacggggcaggcgctcggcgggcacaagaggtgccattactgggacgggctctcggtgtcgctcaccgcgtcggcggcgtcggggtccgcgtccagcttgaggggcttcgatctgaatttggtgccggccgccggcgcggcaaggtggcgagaggaggaagaggtgcagagccccttgccggtcaagaagcggcggctgtcctccggtccttccaccgaacttagtttaacgatttagagttccttttggtgagctgaggcatgtagagtgttttcgtagcttcattcttttaaccgtattttggtttttgtgtttgcgcggtgaataaacgtgtatttaattttgtc

SEQ ID NO: 31184 - protein, 189 aa, Zea mays subsp. mays
  peptide (1)..(189): Ceres Seq. ID no. 12415489
  misc_feature (101)..(123): Pfam Name: Pfam Description:  Zinc finger, C2H2 type
  misc_feature (3)..(187): NCBI GI NO: 40737005 NR Description: putative zinc finger protein
  misc_feature (2)..(179): NCBI GI NO: 40737008 NR Description: C2H2-type zinc finger protein ZFP36
  misc_feature (1)..(176): NCBI GI NO: 15237692 NR Description: putative c2h2 zinc finger transcription factor
  misc_feature (1)..(176): NCBI GI NO: 26452746 NR Description: putative C2H2 zinc finger transcription factor
  misc_feature (1)..(177): NCBI GI NO: 28849865 NR Description: zinc finger transcription factor ZFP2
  misc_feature (1)..(185): NCBI GI NO: 33331578 NR Description: zinc finger protein [Capsicum annuum]
  misc_feature (1)..(175): NCBI GI NO: 7228329 NR Description: putative TFIIIA
  misc_feature (1)..(185): NCBI GI NO: 439493 NR Description: zinc-finger protein [Petunia x hybrida]
  misc_feature (1)..(185): NCBI GI NO: 7488707 NR Description: probable zinc finger protein SCOF-1
  misc_feature (1)..(176): NCBI GI NO: 6693033 NR Description: T22C5.18 [Arabidopsis thaliana]
MAITHDDYVSLCLMALAAAGGGGGHAAAASARTTTMTTQECELRFRCSVCGKAFASHQALGGHKASHRKPPPTLVQAASSSSSVTTNTSSAGGSGAGQGRHRCSVCHRGFATGQALGGHKRCHYWDGLSVSLTASAASGSASSLRGFDLNLVPAAGAARWREEEEVQSPLPVKKRRLSSGPSTELSLTI

SEQ ID NO: 31185 - protein, 176 aa, Zea mays subsp. mays
  peptide (1)..(176): Ceres Seq. ID no. 12415490
  misc_feature (88)..(110): Pfam Name: Pfam Description:  Zinc finger, C2H2 type
  misc_feature (1)..(174): NCBI GI NO: 40737005 NR Description: putative zinc finger protein
  misc_feature (1)..(166): NCBI GI NO: 40737008 NR Description: C2H2-type zinc finger protein ZFP36
  misc_feature (1)..(163): NCBI GI NO: 15237692 NR Description: putative c2h2 zinc finger transcription factor
  misc_feature (1)..(163): NCBI GI NO: 26452746 NR Description: putative C2H2 zinc finger transcription factor
  misc_feature (1)..(164): NCBI GI NO: 28849865 NR Description: zinc finger transcription factor ZFP2
  misc_feature (1)..(172): NCBI GI NO: 33331578 NR Description: zinc finger protein [Capsicum annuum]
  misc_feature (1)..(162): NCBI GI NO: 7228329 NR Description: putative TFIIIA
  misc_feature (1)..(172): NCBI GI NO: 439493 NR Description: zinc-finger protein [Petunia x hybrida]
  misc_feature (1)..(172): NCBI GI NO: 7488707 NR Description: probable zinc finger protein SCOF-1
  misc_feature (1)..(163): NCBI GI NO: 6693033 NR Description: T22C5.18 [Arabidopsis thaliana]
MALAAAGGGGGHAAAASARTTTMTTQECELRFRCSVCGKAFASHQALGGHKASHRKPPPTLVQAASSSSSVTTNTSSAGGSGAGQGRHRCSVCHRGFATGQALGGHKRCHYWDGLSVSLTASAASGSASSLRGFDLNLVPAAGAARWREEEEVQSPLPVKKRRLSSGPSTELSLTI

SEQ ID NO: 31186 - protein, 154 aa, Zea mays subsp. mays
  peptide (1)..(154): Ceres Seq. ID no. 12415491
  misc_feature (66)..(88): Pfam Name: Pfam Description:  Zinc finger, C2H2 type
  misc_feature (1)..(152): NCBI GI NO: 40737005 NR Description: putative zinc finger protein
  misc_feature (1)..(144): NCBI GI NO: 40737008 NR Description: C2H2-type zinc finger protein ZFP36
  misc_feature (1)..(141): NCBI GI NO: 15237692 NR Description: putative c2h2 zinc finger transcription factor
  misc_feature (1)..(141): NCBI GI NO: 26452746 NR Description: putative C2H2 zinc finger transcription factor
  misc_feature (1)..(142): NCBI GI NO: 28849865 NR Description: zinc finger transcription factor ZFP2
  misc_feature (1)..(150): NCBI GI NO: 33331578 NR Description: zinc finger protein [Capsicum annuum]
  misc_feature (1)..(140): NCBI GI NO: 7228329 NR Description: putative TFIIIA
  misc_feature (1)..(150): NCBI GI NO: 439493 NR Description: zinc-finger protein [Petunia x hybrida]
  misc_feature (1)..(150): NCBI GI NO: 7488707 NR Description: probable zinc finger protein SCOF-1
  misc_feature (1)..(141): NCBI GI NO: 6693033 NR Description: T22C5.18 [Arabidopsis thaliana]
MTTQECELRFRCSVCGKAFASHQALGGHKASHRKPPPTLVQAASSSSSVTTNTSSAGGSGAGQGRHRCSVCHRGFATGQALGGHKRCHYWDGLSVSLTASAASGSASSLRGFDLNLVPAAGAARWREEEEVQSPLPVKKRRLSSGPSTELSLTI

SEQ ID NO: 31187 - DNA, 975 bp, Zea mays subsp. mays
  misc_feature (1)..(975): Ceres Seq. ID no. 12367671
gcataacgccgctgccggaggtctccaaggccagcgacgtcgccggcggcgcggtgaagagatggccgcagcggctcacggccgtgccgcccagggtctcccgcggcaccgtcaggggcgtcacggccaggtcgttcgcgcaggacacggagctgtggcggaggagggtccggcactacaagtcggtggccagccagctcgagcagaaggggcggtaccgcaacgtgctggacatgaacgcgcgcctgggcgggttcgccgcggcgctggcgctggcgggcgacccgctgtgggtcatgaacatggtcccgaccgtggcgaacgcgaccacgctcggggccatctacgagcgcgggctcatcggaagctaccaggactggtgcgagggcatgtctacctacccgaggacctacgacctcatccatgcggattcggtgttcaccctgtacaaggacaggtgtgagatggaccgcatcctcctggagatggacaggatcctgaggcccaggggcacggtgatcgtcagggaagacgtggacatgctggtgaaggtcaagagcctggcggacgggatgaggtgggagagccagatcgtcgaccacgaatacggcccgctcgtcagggagaagatcctcctggttgtcaagacgtactggactgcccaggaccaagaccagtagcaggaccggacttgtcaagcgaagttcagcaatgttgataagcatttttcttgcttcgaattgcattggatcgccatttctagctccttgagctagtagtgttctctgtttgtttgctgttccttttggactgtacttgctcagataggaaatttgtatcctaaggtgtaacagggggaaatggaagggcttaggtaaaacccctggcccctgcaaagttttttttttttgttttccttcaattgcgaaattgtggcaagtggtaaatagaaagtcactgttgcgagtcatcccg

SEQ ID NO: 31188 - protein, 225 aa, Zea mays subsp. mays
  peptide (1)..(225): Ceres Seq. ID no. 12367672
  misc_feature (1)..(215): Pfam Name: Pfam Description:  Putative methyltransferase
  misc_feature (1)..(225): NCBI GI NO: 38567915 NR Description: OSJNBa0088I22.11
  misc_feature (1)..(220): NCBI GI NO: 34898042 NR Description: OSJNBa0038F22.19
  misc_feature (1)..(225): NCBI GI NO: 15236921 NR Description: hypothetical protein; protein id: At4g00750.1
  misc_feature (1)..(225): NCBI GI NO: 15225560 NR Description: hypothetical protein; protein id: At2g45750.1
  misc_feature (1)..(225): NCBI GI NO: 37535962 NR Description: unknown protein
  misc_feature (1)..(221): NCBI GI NO: 24413975 NR Description: hypothetical protein~similar to Oryza sativachromosome 10
  misc_feature (1)..(225): NCBI GI NO: 15235080 NR Description: putative protein; protein id: At4g10440.1
  misc_feature (1)..(218): NCBI GI NO: 18396075 NR Description: expressed protein; protein id: At1g26850
  misc_feature (1)..(223): NCBI GI NO: 18071395 NR Description: hypothetical protein [Oryza sativa]
  misc_feature (1)..(219): NCBI GI NO: 9665165 NR Description: Unknown Protein [Arabidopsis thaliana]
ITPLPEVSKASDVAGGAVKRWPQRLTAVPPRVSRGTVRGVTARSFAQDTELWRRRVRHYKSVASQLEQKGRYRNVLDMNARLGGFAAALALAGDPLWVMNMVPTVANATTLGAIYERGLIGSYQDWCEGMSTYPRTYDLIHADSVFTLYKDRCEMDRILLEMDRILRPRGTVIVREDVDMLVKVKSLADGMRWESQIVDHEYGPLVREKILLVVKTYWTAQDQDQ

SEQ ID NO: 31189 - protein, 153 aa, Zea mays subsp. mays
  peptide (1)..(153): Ceres Seq. ID no. 12367673
HNAAAGGLQGQRRRRRRGEEMAAAAHGRAAQGLPRHRQGRHGQVVRAGHGAVAEEGPALQVGGQPARAEGAVPQRAGHERAPGRVRRGAGAGGRPAVGHEHGPDRGERDHARGHLRARAHRKLPGLVRGHVYLPEDLRPHPCGFGVHPVQGQV

SEQ ID NO: 31190 - protein, 148 aa, Zea mays subsp. mays
  peptide (1)..(148): Ceres Seq. ID no. 12367674
  misc_feature (1)..(138): Pfam Name: Pfam Description:  Putative methyltransferase
  misc_feature (1)..(148): NCBI GI NO: 38567915 NR Description: OSJNBa0088I22.11
  misc_feature (1)..(143): NCBI GI NO: 34898042 NR Description: OSJNBa0038F22.19
  misc_feature (1)..(148): NCBI GI NO: 15236921 NR Description: hypothetical protein; protein id: At4g00750.1
  misc_feature (1)..(148): NCBI GI NO: 15225560 NR Description: hypothetical protein; protein id: At2g45750.1
  misc_feature (1)..(148): NCBI GI NO: 37535962 NR Description: unknown protein
  misc_feature (1)..(144): NCBI GI NO: 24413975 NR Description: hypothetical protein~similar to Oryza sativachromosome 10
  misc_feature (1)..(148): NCBI GI NO: 15235080 NR Description: putative protein; protein id: At4g10440.1
  misc_feature (1)..(141): NCBI GI NO: 18396075 NR Description: expressed protein; protein id: At1g26850
  misc_feature (1)..(146): NCBI GI NO: 18071395 NR Description: hypothetical protein [Oryza sativa]
  misc_feature (1)..(142): NCBI GI NO: 9665165 NR Description: Unknown Protein [Arabidopsis thaliana]
MNARLGGFAAALALAGDPLWVMNMVPTVANATTLGAIYERGLIGSYQDWCEGMSTYPRTYDLIHADSVFTLYKDRCEMDRILLEMDRILRPRGTVIVREDVDMLVKVKSLADGMRWESQIVDHEYGPLVREKILLVVKTYWTAQDQDQ

SEQ ID NO: 31191 - DNA, 1203 bp, Zea mays subsp. mays
  misc_feature (1)..(1203): Ceres Seq. ID no. 12374808
atcaatggtagaattgcaggaagtgcacaaggtagtgcaagcagctcactcatctcatggcagaaaccaattgaacttgtacctgggaagaacaaaatagatcttctaagtgcaacagttgggctgtcgaattatggtgcattctttgacctggtaggtgctggaattactggcccagtaaaactgagtggactaaacggtgcgctatctgtcttctgcagaatggacatatcagattggactcagaggagaagatttgcacctatatgatccttcagaagcttcaccagaatgggtctcagccaatgcttatccaatcaatcatccactgatttggtacaagaccaagttcacacctcctgcaggtgatgatcctgtcgcgattgacttcacgggaatggggaaaggtgaagcatgggtgaatggacagagcattggtcgatactggccaacaaatctggctccacagagcggttgcgtcaactcttgcaactatagaggagcctacagttcaagcaaatgcctcaagaagtgtggccagccatcacagactttgtaccatgttccccgttcgtttctccaaccaggcagcaatgatctagtccttttcgagcattttggtggtgacccaagcaagatatcctttgtgatgaggcagacaggaagtgtgtgcgcacaagtatcagaggcacatccagcccaaattgatagttggagttctcaacagccgatgcagagatttggacctgcacttcgcctggaatgcccaaaagaaggccaggtcatcagcagcgtcaagtttgcaagctttgggacaccgagtggcacatgtggaagctacagccatggcgaatgcagcagcactcaggctctctcagttgttcaggaggcttgcatcggagtgagcagctgcagcgtgccagtgtcgtcgaattattttggaaatccatgtacaggggtcacaaaaagccttgcagttgaagctgcatgctcgtgacatgtctgattaatattgattcataggaagcaaatcacctaggacaaggtgaaaccttctctgtaggcaagcaggcaaaaaggaataaatgttcccatcctaatcaaaaggaataaaaatattctgaaaattgccacatccaagctattagatggtatgcttatgaagtagtgttatcgttaagatataaatccatccatcatgac

SEQ ID NO: 31192 - protein, 199 aa, Zea mays subsp. mays
  peptide (1)..(199): Ceres Seq. ID no. 12374809
  misc_feature (1)..(87): Pfam Name: Pfam Description:  Glycosyl hydrolases family 35
  misc_feature (1)..(199): NCBI GI NO: 7939623 NR Description: putative beta-galactosidase
  misc_feature (1)..(198): NCBI GI NO: 14970841 NR Description: beta-galactosidase [Fragaria x ananassa]
  misc_feature (1)..(199): NCBI GI NO: 25326167 NR Description: probable beta-galactosidase
  misc_feature (1)..(199): NCBI GI NO: 30683905 NR Description: glycosyl hydrolase family 35 (beta-galactosidase)
  misc_feature (1)..(199): NCBI GI NO: 6686888 NR Description: putative beta-galactosidase [Arabidopsis thaliana]
  misc_feature (1)..(199): NCBI GI NO: 7939617 NR Description: beta-galactosidase [Lycopersicon esculentum]
  misc_feature (1)..(199): NCBI GI NO: 4138137 NR Description: ss-galactosidase [Lycopersicon esculentum]
  misc_feature (1)..(199): NCBI GI NO: 18419821 NR Description: glycosyl hydrolase family 35
  misc_feature (1)..(199): NCBI GI NO: 25326166 NR Description: beta-galactosidase like protein
  misc_feature (1)..(199): NCBI GI NO: 15231354 NR Description: glycosyl hydrolase family 35
MGKGEAWVNGQSIGRYWPTNLAPQSGCVNSCNYRGAYSSSKCLKKCGQPSQTLYHVPRSFLQPGSNDLVLFEHFGGDPSKISFVMRQTGSVCAQVSEAHPAQIDSWSSQQPMQRFGPALRLECPKEGQVISSVKFASFGTPSGTCGSYSHGECSSTQALSVVQEACIGVSSCSVPVSSNYFGNPCTGVTKSLAVEAACS

SEQ ID NO: 31193 - protein, 115 aa, Zea mays subsp. mays
  peptide (1)..(115): Ceres Seq. ID no. 12374810
  misc_feature (37)..(114): Pfam Name: Pfam Description:  Galactose binding lectin domain
  misc_feature (1)..(115): NCBI GI NO: 7939623 NR Description: putative beta-galactosidase
  misc_feature (1)..(114): NCBI GI NO: 14970841 NR Description: beta-galactosidase [Fragaria x ananassa]
  misc_feature (1)..(115): NCBI GI NO: 25326167 NR Description: probable beta-galactosidase
  misc_feature (1)..(115): NCBI GI NO: 30683905 NR Description: glycosyl hydrolase family 35 (beta-galactosidase)
  misc_feature (1)..(115): NCBI GI NO: 6686888 NR Description: putative beta-galactosidase [Arabidopsis thaliana]
  misc_feature (1)..(115): NCBI GI NO: 7939617 NR Description: beta-galactosidase [Lycopersicon esculentum]
  misc_feature (1)..(115): NCBI GI NO: 4138137 NR Description: ss-galactosidase [Lycopersicon esculentum]
  misc_feature (1)..(115): NCBI GI NO: 18419821 NR Description: glycosyl hydrolase family 35
  misc_feature (1)..(115): NCBI GI NO: 25326166 NR Description: beta-galactosidase like protein
  misc_feature (1)..(115): NCBI GI NO: 15231354 NR Description: glycosyl hydrolase family 35
MRQTGSVCAQVSEAHPAQIDSWSSQQPMQRFGPALRLECPKEGQVISSVKFASFGTPSGTCGSYSHGECSSTQALSVVQEACIGVSSCSVPVSSNYFGNPCTGVTKSLAVEAACS

SEQ ID NO: 31194 - DNA, 974 bp, Zea mays subsp. mays
  misc_feature (1)..(974): Ceres Seq. ID no. 12356906
acacacgcgcaccaaagccaagcgcccaagcccagcactcgacaccaccacagcgcgcagccacgctcacgcacaccgagctgcgggagtggagtagtggaccgatggggagcagcgggggcagcagcgagcacttcctgcggcagctgagttcgagcgacggcggcagcgcgccgcaccatctgctgcagcgagagtgggagtgcggcggcgtcaccggcagcggcagcaggcgcgggtcgcggaagaagaccagggcgcggggacaccgccgccgcggcggcgggttctgcagggcggaggaggctgcgccggggcggaagcgggtaatgtggtggtggaccagagctccggcgccaagcacgccatgttgtgggcgctcacccacgtggccaacaagggcgacttcctcaccctgctccacgtcctgccgccggagagcggccacagcagccgcggtgctgcggaggacgcctccgcgctcgccaactccctcggcgcgctttgcaaggcctgcaagcctgaggtcgaggtggaggcgcctgtgatccaggggcccaagctgccgaccatcctcagccaggtgaagaagctggaggcgtccgtgctggtgctgagccaacgcagcccctcgcctttctgctgcttcccgcggagcagcagcgaggagctcgtggaggagtgcatcgaccgggcggagtgcctgacgctggcagtgcggcggcaaagcaagggcgtcggcggctacctcgtcagcacccggtggcagaagaacttctggctcctcgcgtgatccacaaccatattcccccccttctttggaaggcgtttggtttgagtctgaaagcatgggatggaacggaacgggctgggaaatggcgtttggttcagggacaagagggttgggaattgggatcgcctacaggtcggagggacgggatagtcctctatatatgaaagtcgtttcttccgcc

SEQ ID NO: 31195 - protein, 181 aa, Zea mays subsp. mays
  peptide (1)..(181): Ceres Seq. ID no. 12356907
TRAPKPSAQAQHSTPPQRAATLTHTELREWSSGPMGSSGGSSEHFLRQLSSSDGGSAPHHLLQREWECGGVTGSGSRRGSRKKTRARGHRRRGGGFCRAEEAAPGRKRVMWWWTRAPAPSTPCCGRSPTWPTRATSSPCSTSCRRRAATAAAVLRRTPPRSPTPSARFARPASLRSRWRRL

SEQ ID NO: 31196 - protein, 147 aa, Zea mays subsp. mays
  peptide (1)..(147): Ceres Seq. ID no. 12356908
MGSSGGSSEHFLRQLSSSDGGSAPHHLLQREWECGGVTGSGSRRGSRKKTRARGHRRRGGGFCRAEEAAPGRKRVMWWWTRAPAPSTPCCGRSPTWPTRATSSPCSTSCRRRAATAAAVLRRTPPRSPTPSARFARPASLRSRWRRL

SEQ ID NO: 31197 - protein, 141 aa, Zea mays subsp. mays
  peptide (1)..(141): Ceres Seq. ID no. 12356909
  misc_feature (1)..(118): Pfam Name: Pfam Description:  Universal stress protein family
  misc_feature (1)..(141): NCBI GI NO: 34907308 NR Description: hypothetical protein~similar to Arabidopsisthaliana chromosome 1
  misc_feature (1)..(141): NCBI GI NO: 15219439 NR Description: hypothetical protein; protein id: At1g44760
  misc_feature (1)..(141): NCBI GI NO: 15237955 NR Description: putative protein; protein id: At5g17390.1
  misc_feature (1)..(141): NCBI GI NO: 15227695 NR Description: unknown protein; protein id: At2g03720.1
  misc_feature (1)..(141): NCBI GI NO: 15228516 NR Description: hypothetical protein; protein id: At3g03290.1
  misc_feature (36)..(141): NCBI GI NO: 18409190 NR Description: expressed protein; protein id: At1g69080
  misc_feature (36)..(141): NCBI GI NO: 21592322 NR Description: unknown [Arabidopsis thaliana]
  misc_feature (1)..(86): NCBI GI NO: 18409190 NR Description: expressed protein; protein id: At1g69080
  misc_feature (1)..(86): NCBI GI NO: 21592322 NR Description: unknown [Arabidopsis thaliana]
MLWALTHVANKGDFLTLLHVLPPESGHSSRGAAEDASALANSLGALCKACKPEVEVEAPVIQGPKLPTILSQVKKLEASVLVLSQRSPSPFCCFPRSSSEELVEECIDRAECLTLAVRRQSKGVGGYLVSTRWQKNFWLLA

SEQ ID NO: 31198 - DNA, 1230 bp, Zea mays subsp. mays
  misc_feature (1)..(1230): Ceres Seq. ID no. 12369252
acgaacaagcaatggcgcgcaccatggcagccatcgcgatcttgctcgccgccttcttcgtcctcgctccggatctggccaccgcagcggcagcggcagcggcgcagagcgccatcccggccgtgttcgcgttcggggactccacgctggacccgggcaacaacaacggcctgggccacgctggtgcgcgccgaccacgcgccctacggccgcggcttcccgggcggcgcggccacgggccgcttctcggacggcaagctcatcaccgactacatcgtcgagtcgctcggcatcaaggacctcctgccggcgtaccgcggcagcggcctcaccgtggcggaggcgtccacgggggtcagcttcgcgtcgggcgggtccggcctcgacgacctgaccgcgcagaccgccatggtgtccacgttcggctcgcagatcaccgacttccaggccctgctcggcaggatcggcatgcccaaggtcgccgggatcgccaacaggtcgctctacgtggtctccgccggcaccaacgacgtcaccatgaactacttcgtcctgccggtccggaccatcagcttccccaccgtcgaccagtacagtgcctacctcatcggcaggctccagggatacatccagagcttgtacaagctgggagcccggaacttcatggtgtccggcctgccgccggtggggtgcctgccgatcacgaagagcctccacagtctcgggtcgggaggttgcgtcgccgaccagaacgcggccgcggagcggtacaacgcggcgctgcggcagatgctgaccagggctggaggccgcgtcccccggcgccgcgctcgcgtacgtcgacgtgtacaccccgttgatggacatggtcgcgcagccccagaaatacggtttcaccgagacgagccgaggctgctgcgggaacggtctgccggcgatgggggcgctctgcaccagcgcgctgccgcagtgccggtcgccggcgcagttcatgttcttcgactcggtgcacccgacgcaggccacctacaaggcgctcgccgaccacatcgtccagtcacaaaaacctaagacttagattagcattagattagcattagctgcaggaggaacggcattgcacatgaagctggctacctcggtgctttttgtagatccatttatttgcacatgcagagatggatgtttacatagcgaagtttttaatatacagagagtcgtttattttgc

SEQ ID NO: 31199 - protein, 356 aa, Zea mays subsp. mays
  peptide (1)..(356): Ceres Seq. ID no. 12369253
  misc_feature (60)..(277): Pfam Name: Pfam Description:  GDSL-like Lipase/Acylhydrolase
  misc_feature (60)..(277): NCBI GI NO: 34907984 NR Description: P0446G04.24
  misc_feature (60)..(273): NCBI GI NO: 21537117 NR Description: putative GDSL-motif lipase/hydrolase
  misc_feature (60)..(273): NCBI GI NO: 15225096 NR Description: putative GDSL-motif lipase/hydrolase
  misc_feature (63)..(273): NCBI GI NO: 15227723 NR Description: putative GDSL-motif lipase hydrolase
  misc_feature (150)..(273): NCBI GI NO: 25336273 NR Description: probable GDSL-motif lipase/hydrolase
  misc_feature (60)..(125): NCBI GI NO: 25336273 NR Description: probable GDSL-motif lipase/hydrolase
  misc_feature (60)..(265): NCBI GI NO: 4587999 NR Description: hypothetical APG protein [Arabidopsis thaliana]
  misc_feature (60)..(265): NCBI GI NO: 15225668 NR Description: putative GDSL-motif lipase hydrolase
  misc_feature (60)..(273): NCBI GI NO: 15227734 NR Description: putative GDSL-motif lipase/hydrolase
  misc_feature (60)..(265): NCBI GI NO: 21592974 NR Description: proline-rich protein, putative
TNKQWRAPWQPSRSCSPPSSSSLRIWPPQRQRQRRRAPSRPCSRSGTPRWTRATTTAWATLVRADHAPYGRGFPGGAATGRFSDGKLITDYIVESLGIKDLLPAYRGSGLTVAEASTGVSFASGGSGLDDLTAQTAMVSTFGSQITDFQALLGRIGMPKVAGIANRSLYVVSAGTNDVTMNYFVLPVRTISFPTVDQYSAYLIGRLQGYIQSLYKLGARNFMVSGLPPVGCLPITKSLHSLGSGGCVADQNAAAERYNAALRQMLTRAGGRVPRRRARVRRRVHPVDGHGRAAPEIRFHRDEPRLLRERSAGDGGALHQRAAAVPVAGAVHVLRLGAPDAGHLQGARRPHRPVTKT

SEQ ID NO: 31200 - protein, 285 aa, Zea mays subsp. mays
  peptide (1)..(285): Ceres Seq. ID no. 12369254
  misc_feature (3)..(57): NCBI GI NO: 34907984 NR Description: P0446G04.24
  misc_feature (4)..(55): NCBI GI NO: 21537117 NR Description: putative GDSL-motif lipase/hydrolase
  misc_feature (4)..(55): NCBI GI NO: 15225096 NR Description: putative GDSL-motif lipase/hydrolase
  misc_feature (14)..(79): NCBI GI NO: 15227723 NR Description: putative GDSL-motif lipase hydrolase
  misc_feature (7)..(55): NCBI GI NO: 25336273 NR Description: probable GDSL-motif lipase/hydrolase
  misc_feature (32)..(55): NCBI GI NO: 4587999 NR Description: hypothetical APG protein [Arabidopsis thaliana]
  misc_feature (32)..(55): NCBI GI NO: 15225668 NR Description: putative GDSL-motif lipase hydrolase
  misc_feature (29)..(55): NCBI GI NO: 15227734 NR Description: putative GDSL-motif lipase/hydrolase
  misc_feature (18)..(55): NCBI GI NO: 21592974 NR Description: proline-rich protein, putative
  misc_feature (28)..(55): NCBI GI NO: 15217963 NR Description: proline-rich protein, putative
EQAMARTMAAIAILLAAFFVLAPDLATAAAAAAAQSAIPAVFAFGDSTLDPGNNNGLGHAGARRPRALRPRLPGRRGHGPLLGRQAHHRLHRRVARHQGPPAGVPRQRPHRGGGVHGGQLRVGRVRPRRPDRADRHGVHVRLADHRLPGPARQDRHAQGRRDRQQVALRGLRRHQRRHHELLRPAGPDHQLPHRRPVQCLPHRQAPGIHPELVQAGSPELHGVRPAAGGVPADHEEPPQSRVGRLRRRPERGRGAVQRGAAADADQGWRPRPPAPRSRTSTCTPR

SEQ ID NO: 31201 - protein, 282 aa, Zea mays subsp. mays
  peptide (1)..(282): Ceres Seq. ID no. 12369255
  misc_feature (1)..(54): NCBI GI NO: 34907984 NR Description: P0446G04.24
  misc_feature (1)..(52): NCBI GI NO: 21537117 NR Description: putative GDSL-motif lipase/hydrolase
  misc_feature (1)..(52): NCBI GI NO: 15225096 NR Description: putative GDSL-motif lipase/hydrolase
  misc_feature (11)..(76): NCBI GI NO: 15227723 NR Description: putative GDSL-motif lipase hydrolase
  misc_feature (4)..(52): NCBI GI NO: 25336273 NR Description: probable GDSL-motif lipase/hydrolase
  misc_feature (29)..(52): NCBI GI NO: 4587999 NR Description: hypothetical APG protein [Arabidopsis thaliana]
  misc_feature (29)..(52): NCBI GI NO: 15225668 NR Description: putative GDSL-motif lipase hydrolase
  misc_feature (26)..(52): NCBI GI NO: 15227734 NR Description: putative GDSL-motif lipase/hydrolase
  misc_feature (15)..(52): NCBI GI NO: 21592974 NR Description: proline-rich protein, putative
  misc_feature (25)..(52): NCBI GI NO: 15217963 NR Description: proline-rich protein, putative
MARTMAAIAILLAAFFVLAPDLATAAAAAAAQSAIPAVFAFGDSTLDPGNNNGLGHAGARRPRALRPRLPGRRGHGPLLGRQAHHRLHRRVARHQGPPAGVPRQRPHRGGGVHGGQLRVGRVRPRRPDRADRHGVHVRLADHRLPGPARQDRHAQGRRDRQQVALRGLRRHQRRHHELLRPAGPDHQLPHRRPVQCLPHRQAPGIHPELVQAGSPELHGVRPAAGGVPADHEEPPQSRVGRLRRRPERGRGAVQRGAAADADQGWRPRPPAPRSRTSTCTPR

SEQ ID NO: 31202 - DNA, 2064 bp, Zea mays subsp. mays
  misc_feature (1)..(2064): Ceres Seq. ID no. 13622175
acggcaccagtgacgcgaaagcaaaacgccaaacaggctcctctgaaactcccagagccggtagaggcacgccactccgcagtgtcagtcactgcccccccatcacgccgcccgccctttctcggccgttgccgcgagctcgcttcgacccaccgccgatggcgacggcgatgggcgcgatggccgccacctgcatggcctcgatcccggccgccgctacgttccccggtgatctcggcgtcggacgacgccgagcggttgtaccagggtggcgcgccggtgggagacggctgcgtgcgacgccgcctgcccggaggccgttcctgttctcgccgaagggcgtttcggactcgcggagctcgcaaacgtgccttgatccggacgccagcacgagtgttcttgggatcatccttggagggggtgctgggacaaggctgtatccactgacgaagaagagggcgaaaccagcagtgccgttgggcgccaactacaggctcatagatatccctgtcagcaactgtctcaacagtaacgtctccaagatatatgtgctaacacagttcaactctgcttcgctcaaccgccacctctcgagggcctatggaaacaacattgccgggtacaagaatgagggattcgttgaggtccttgcagcacaacagagtccagagaatcccaactggtttcagggtactgcagatgccgtgcgtcaatatatgtggctatttgaggagcataatatcatggagttccttattctggctggagatcatctgtaccgtatggattaccaaaagttcattcaagctcatagagaaacagatgctgatataacagttgcagccctgccaatggatgaacaacgtgcaactgcatttggtcttatgaaaattgatgatgaagggaggatagttgagtttgcagaaaaaccaaaaggagagaagctgagatcaatgatggtagacaccactatattgggccttgatcctgaaagggccaaagaactgccttatattgccagtatgggaatctatgtttttagcaaagatgtgatgcttcgtcttctcagagaaaattttcctgcagcaaatgactttggaagtgaggttattcctggcgcaacagaaattggattaagggtgcaagcttacttatatgatggttactgggaagatattggtactattgaagcattttataatgcaaacttgggaataaccaagaagcctgtaccggattttagcttctatgatcgttctgctccaatttatacgcaacctagatatttgcctccttcgaaggttcttgatgctgatgtgacagacagtgttattggagaagggtgtgttattaaacattgcacaatcaatcattccgtagttggactccgttcctgcatttctgaaggtgcagttatagaggactctttgctaatgggtgcagactattacgagactgagaatgataagaatgtcctttctgagactggtggcattcccattggtattgggaaaaattcacatatcagaaaagcaataattgacaaaaatgctcgcattggagaaaatgtgaagataatcaattttgataatgtccaagaagcagtaagggagacagaaggatattttatcaaaagtggaattgtcacggtgattaaagatgctttaattcctagtggaacaatcatataaagtcagccaacaccatgtatataaggttgggttgcatcatatggtgatcgccaatgcgcatcaagttctctcatcccttgcgagaccatgcttatttccattgcaaaatcatcaagctctgcatcaacttgttgtggataataatgaaataataaatggtgccattccatggcaacatttttctgtcactagtatgaggcactgttctaaatgtactgttgagtggaatttgaatatgtatgcttttgcaatcgcacacctaaataccttgtgcttatactccttgttacctaaatatgctcactgcattgcccaaggaatcagattaaaaatgtcatgcataacatgatttttgttagattgttgtaaagct

SEQ ID NO: 31203 - protein, 562 aa, Zea mays subsp. mays
  peptide (1)..(562): Ceres Seq. ID no. 13622176
  misc_feature (133)..(408): Pfam Name: Pfam Description:  Nucleotidyl transferase
  misc_feature (53)..(562): NCBI GI NO: 13892040 NR Description: ADP-glucose pyrophosphorylase small subunit
  misc_feature (56)..(562): NCBI GI NO: 13508485 NR Description: ADP-glucose pyrophosphorylase small subunit
  misc_feature (53)..(562): NCBI GI NO: 27464770 NR Description: ADP-glucose pyrophosphorylase small subunit
  misc_feature (56)..(562): NCBI GI NO: 14582768 NR Description: ADP-glucose pyrophosphorylase small subunit
  misc_feature (53)..(562): NCBI GI NO: 38423972 NR Description: putative glucose-1-phosphate adenylyltransferase
  misc_feature (56)..(562): NCBI GI NO: 1707940 NR Description: Glucose-1-phosphate adenylyltransferase small subunit
  misc_feature (104)..(562): NCBI GI NO: 21666502 NR Description: ADP-glucose pyrophosphorylase small subunit
  misc_feature (96)..(562): NCBI GI NO: 15238933 NR Description: glucose-1-phosphate adenylyltransferase
  misc_feature (51)..(562): NCBI GI NO: 1237080 NR Description: ADP-glucose pyrophosphorylase [Pisum sativum]
  misc_feature (104)..(562): NCBI GI NO: 17865468 NR Description: Glucose-1-phosphate adenylyltransferase small subunit
GTSDAKAKRQTGSSETPRAGRGTPLRSVSHCPPITPPALSRPLPRARFDPPPMATAMGAMAATCMASIPAAATFPGDLGVGRRRAVVPGWRAGGRRLRATPPARRPFLFSPKGVSDSRSSQTCLDPDASTSVLGIILGGGAGTRLYPLTKKRAKPAVPLGANYRLIDIPVSNCLNSNVSKIYVLTQFNSASLNRHLSRAYGNNIAGYKNEGFVEVLAAQQSPENPNWFQGTADAVRQYMWLFEEHNIMEFLILAGDHLYRMDYQKFIQAHRETDADITVAALPMDEQRATAFGLMKIDDEGRIVEFAEKPKGEKLRSMMVDTTILGLDPERAKELPYIASMGIYVFSKDVMLRLLRENFPAANDFGSEVIPGATEIGLRVQAYLYDGYWEDIGTIEAFYNANLGITKKPVPDFSFYDRSAPIYTQPRYLPPSKVLDADVTDSVIGEGCVIKHCTINHSVVGLRSCISEGAVIEDSLLMGADYYETENDKNVLSETGGIPIGIGKNSHIRKAIIDKNARIGENVKIINFDNVQEAVRETEGYFIKSGIVTVIKDALIPSGTII

SEQ ID NO: 31204 - protein, 510 aa, Zea mays subsp. mays
  peptide (1)..(510): Ceres Seq. ID no. 13622177
  misc_feature (81)..(356): Pfam Name: Pfam Description:  Nucleotidyl transferase
  misc_feature (1)..(510): NCBI GI NO: 13892040 NR Description: ADP-glucose pyrophosphorylase small subunit
  misc_feature (4)..(510): NCBI GI NO: 13508485 NR Description: ADP-glucose pyrophosphorylase small subunit
  misc_feature (1)..(510): NCBI GI NO: 27464770 NR Description: ADP-glucose pyrophosphorylase small subunit
  misc_feature (4)..(510): NCBI GI NO: 14582768 NR Description: ADP-glucose pyrophosphorylase small subunit
  misc_feature (1)..(510): NCBI GI NO: 38423972 NR Description: putative glucose-1-phosphate adenylyltransferase
  misc_feature (4)..(510): NCBI GI NO: 1707940 NR Description: Glucose-1-phosphate adenylyltransferase small subunit
  misc_feature (52)..(510): NCBI GI NO: 21666502 NR Description: ADP-glucose pyrophosphorylase small subunit
  misc_feature (44)..(510): NCBI GI NO: 15238933 NR Description: glucose-1-phosphate adenylyltransferase
  misc_feature (1)..(510): NCBI GI NO: 1237080 NR Description: ADP-glucose pyrophosphorylase [Pisum sativum]
  misc_feature (52)..(510): NCBI GI NO: 17865468 NR Description: Glucose-1-phosphate adenylyltransferase small subunit
MATAMGAMAATCMASIPAAATFPGDLGVGRRRAVVPGWRAGGRRLRATPPARRPFLFSPKGVSDSRSSQTCLDPDASTSVLGIILGGGAGTRLYPLTKKRAKPAVPLGANYRLIDIPVSNCLNSNVSKIYVLTQFNSASLNRHLSRAYGNNIAGYKNEGFVEVLAAQQSPENPNWFQGTADAVRQYMWLFEEHNIMEFLILAGDHLYRMDYQKFIQAHRETDADITVAALPMDEQRATAFGLMKIDDEGRIVEFAEKPKGEKLRSMMVDTTILGLDPERAKELPYIASMGIYVFSKDVMLRLLRENFPAANDFGSEVIPGATEIGLRVQAYLYDGYWEDIGTIEAFYNANLGITKKPVPDFSFYDRSAPIYTQPRYLPPSKVLDADVTDSVIGEGCVIKHCTINHSVVGLRSCISEGAVIEDSLLMGADYYETENDKNVLSETGGIPIGIGKNSHIRKAIIDKNARIGENVKIINFDNVQEAVRETEGYFIKSGIVTVIKDALIPSGTII

SEQ ID NO: 31205 - protein, 506 aa, Zea mays subsp. mays
  peptide (1)..(506): Ceres Seq. ID no. 13622178
  misc_feature (77)..(352): Pfam Name: Pfam Description:  Nucleotidyl transferase
  misc_feature (1)..(506): NCBI GI NO: 13892040 NR Description: ADP-glucose pyrophosphorylase small subunit
  misc_feature (1)..(506): NCBI GI NO: 13508485 NR Description: ADP-glucose pyrophosphorylase small subunit
  misc_feature (1)..(506): NCBI GI NO: 27464770 NR Description: ADP-glucose pyrophosphorylase small subunit
  misc_feature (1)..(506): NCBI GI NO: 14582768 NR Description: ADP-glucose pyrophosphorylase small subunit
  misc_feature (1)..(506): NCBI GI NO: 38423972 NR Description: putative glucose-1-phosphate adenylyltransferase
  misc_feature (1)..(506): NCBI GI NO: 1707940 NR Description: Glucose-1-phosphate adenylyltransferase small subunit
  misc_feature (48)..(506): NCBI GI NO: 21666502 NR Description: ADP-glucose pyrophosphorylase small subunit
  misc_feature (40)..(506): NCBI GI NO: 15238933 NR Description: glucose-1-phosphate adenylyltransferase
  misc_feature (1)..(506): NCBI GI NO: 1237080 NR Description: ADP-glucose pyrophosphorylase [Pisum sativum]
  misc_feature (48)..(506): NCBI GI NO: 17865468 NR Description: Glucose-1-phosphate adenylyltransferase small subunit
MGAMAATCMASIPAAATFPGDLGVGRRRAVVPGWRAGGRRLRATPPARRPFLFSPKGVSDSRSSQTCLDPDASTSVLGIILGGGAGTRLYPLTKKRAKPAVPLGANYRLIDIPVSNCLNSNVSKIYVLTQFNSASLNRHLSRAYGNNIAGYKNEGFVEVLAAQQSPENPNWFQGTADAVRQYMWLFEEHNIMEFLILAGDHLYRMDYQKFIQAHRETDADITVAALPMDEQRATAFGLMKIDDEGRIVEFAEKPKGEKLRSMMVDTTILGLDPERAKELPYIASMGIYVFSKDVMLRLLRENFPAANDFGSEVIPGATEIGLRVQAYLYDGYWEDIGTIEAFYNANLGITKKPVPDFSFYDRSAPIYTQPRYLPPSKVLDADVTDSVIGEGCVIKHCTINHSVVGLRSCISEGAVIEDSLLMGADYYETENDKNVLSETGGIPIGIGKNSHIRKAIIDKNARIGENVKIINFDNVQEAVRETEGYFIKSGIVTVIKDALIPSGTII

SEQ ID NO: 31206 - DNA, 1794 bp, Zea mays subsp. mays
  misc_feature (1)..(1794): Ceres Seq. ID no. 12365974
aaaaaacttttttaaaaaaaaaaaatcactcccacgtcgcctcgcccgctgcgacagcgcatacgccaccctcccgttgcgtacaccgtatgtatctacggtgactcggggggcacgcagacgcagtgggggagagcgagagcgagagcgaccgaccgaccgagcaagggtttcttctccggcggctgcagcggcggcggcggaggcggatctgggagggatggggaaccggataggcgggaggcggaagtcgggtgtggaggagcggttcacgcggccgcacgggctctacgagcacaaggatatcgaccagaagaagctgcgcaagctgatcctcgaggccaagctcgcgccctgctacccgggcgccgacgacgccgcggccggtggaggggacctcgaccttgaggagtgccccatctgcttcctgtactacccaagcctcaaccgttcaaagtgttgctcaaaggggatatgtacagagtgttttcttcaaatgaaaccgactcatactgctcggcctacacagtgcccattctgcaaaacgcccaattatgctgtggagtatcgtggcgtcaaaacaaaggaggaaaggagcatagagcagtttgaagaacagaaagtcatagaagcacaattgaggatgcgccaaaaagaactccaagatgaagaggctaaaatgaaaagaaaacagagcaggtgttcttctagcagaacagtaaccccaacaacagaagttgagtatcgagatatttgcagcacatccttttcagtgccatcatatcaatgtactgaacaaggaaatgaatgctgttcatctgaaccctcatgctctagccaggctaacatgcggcctttccattctaggcacaaccgtgatgataatgttgacatgaatctggaggatatgatggttatggaagcaatttggcgttccattcaggaacaagggcatctagtaaatcctgtctgtggcagctactttcctgtaatcgagccaccatcacgtgagaggcaggcatttgttccggctgctcctctagaaatgcctcatccaggtggatattcgtgtgcagttgcggctttggctgagcaccaggcaccaagcatggatttctcttacatgagtggcagtagcacatacccagtctttgacatgatccgacggccatgcaacatgtccagtggaagcctgtgcggcgccgagaacagttcactggacacctggagcgggatagcgccaagttgcagcagggaagtggtaagagacgagggagagtgctcggccgaccactggtcggagggcgcggaggcaggaacaagcctacgccggatcggacatcatggcggatgcaggggccatgcagccgctgcctttcgccgagaactttgccatgggtccaagccacttccgcccggagagcgtcgaggagcagatgatgttttccatggccgtgtcactggcagaagctcatcacggtaggacgcaggcgcaagggctggcatggttgtaagttgtaacactaattttgacgcttcggtgcccccctgcccccttcctgttgcgctgccgttccacttgccccgccccgcttctctgttttttttttttttttttggtgccaccttgtttggcattttgctcttttctttctttctctctttttttttgcatgtgttgcttcatggcttgatatagatcttgctatagccctccattgccattgcttatatgtatgtaaaatggaatatgtggaaataggaaagaaaatgggtcagagttcttttgccggc

SEQ ID NO: 31207 - protein, 493 aa, Zea mays subsp. mays
  peptide (1)..(493): Ceres Seq. ID no. 12365975
  misc_feature (74)..(366): NCBI GI NO: 18411948 NR Description: expressed protein; protein id: At1g78420
  misc_feature (74)..(317): NCBI GI NO: 18394446 NR Description: Expressed protein; protein id: At1g17145
  misc_feature (74)..(366): NCBI GI NO: 8052547 NR Description: F3F9.7 [Arabidopsis thaliana]
  misc_feature (74)..(366): NCBI GI NO: 25373045 NR Description: F20D23.17 protein - Arabidopsis thaliana
KNFFKKKKSLPRRLARCDSAYATLPLRTPYVSTVTRGARRRSGGERERERPTDRARVSSPAAAAAAAEADLGGMGNRIGGRRKSGVEERFTRPHGLYEHKDIDQKKLRKLILEAKLAPCYPGADDAAAGGGDLDLEECPICFLYYPSLNRSKCCSKGICTECFLQMKPTHTARPTQCPFCKTPNYAVEYRGVKTKEERSIEQFEEQKVIEAQLRMRQKELQDEEAKMKRKQSRCSSSRTVTPTTEVEYRDICSTSFSVPSYQCTEQGNECCSSEPSCSSQANMRPFHSRHNRDDNVDMNLEDMMVMEAIWRSIQEQGHLVNPVCGSYFPVIEPPSRERQAFVPAAPLEMPHPGGYSCAVAALAEHQAPSMDFSYMSGSSTYPVFDMIRRPCNMSSGSLCGAENSSLDTWSGIAPSCSREVVRDEGECSADHWSEGAEAGTSLRRIGHHGGCRGHAAAAFRRELCHGSKPLPPGERRGADDVFHGRVTGRSSSR

SEQ ID NO: 31208 - protein, 420 aa, Zea mays subsp. mays
  peptide (1)..(420): Ceres Seq. ID no. 12365976
  misc_feature (1)..(293): NCBI GI NO: 18411948 NR Description: expressed protein; protein id: At1g78420
  misc_feature (1)..(244): NCBI GI NO: 18394446 NR Description: Expressed protein; protein id: At1g17145
  misc_feature (1)..(293): NCBI GI NO: 8052547 NR Description: F3F9.7 [Arabidopsis thaliana]
  misc_feature (1)..(293): NCBI GI NO: 25373045 NR Description: F20D23.17 protein - Arabidopsis thaliana
MGNRIGGRRKSGVEERFTRPHGLYEHKDIDQKKLRKLILEAKLAPCYPGADDAAAGGGDLDLEECPICFLYYPSLNRSKCCSKGICTECFLQMKPTHTARPTQCPFCKTPNYAVEYRGVKTKEERSIEQFEEQKVIEAQLRMRQKELQDEEAKMKRKQSRCSSSRTVTPTTEVEYRDICSTSFSVPSYQCTEQGNECCSSEPSCSSQANMRPFHSRHNRDDNVDMNLEDMMVMEAIWRSIQEQGHLVNPVCGSYFPVIEPPSRERQAFVPAAPLEMPHPGGYSCAVAALAEHQAPSMDFSYMSGSSTYPVFDMIRRPCNMSSGSLCGAENSSLDTWSGIAPSCSREVVRDEGECSADHWSEGAEAGTSLRRIGHHGGCRGHAAAAFRRELCHGSKPLPPGERRGADDVFHGRVTGRSSSR

SEQ ID NO: 31209 - protein, 328 aa, Zea mays subsp. mays
  peptide (1)..(328): Ceres Seq. ID no. 12365977
  misc_feature (1)..(201): NCBI GI NO: 18411948 NR Description: expressed protein; protein id: At1g78420
  misc_feature (1)..(152): NCBI GI NO: 18394446 NR Description: Expressed protein; protein id: At1g17145
  misc_feature (1)..(201): NCBI GI NO: 8052547 NR Description: F3F9.7 [Arabidopsis thaliana]
  misc_feature (1)..(201): NCBI GI NO: 25373045 NR Description: F20D23.17 protein - Arabidopsis thaliana
MKPTHTARPTQCPFCKTPNYAVEYRGVKTKEERSIEQFEEQKVIEAQLRMRQKELQDEEAKMKRKQSRCSSSRTVTPTTEVEYRDICSTSFSVPSYQCTEQGNECCSSEPSCSSQANMRPFHSRHNRDDNVDMNLEDMMVMEAIWRSIQEQGHLVNPVCGSYFPVIEPPSRERQAFVPAAPLEMPHPGGYSCAVAALAEHQAPSMDFSYMSGSSTYPVFDMIRRPCNMSSGSLCGAENSSLDTWSGIAPSCSREVVRDEGECSADHWSEGAEAGTSLRRIGHHGGCRGHAAAAFRRELCHGSKPLPPGERRGADDVFHGRVTGRSSSR

SEQ ID NO: 31210 - DNA, 1402 bp, Zea mays subsp. mays
  misc_feature (1)..(1402): Ceres Seq. ID no. 13493652
aaaaaattctagggaacccccactacgcctgcacgcgcccactagctagccaccttagatcggtcgatacagctagctatacccgctagctgcacctctcgctgccgccgcccggccgggccgcgcgagaccgctcaaaattcgcgcgcaccgccacgcggcgcggacatgctgcgggcggcggggagcagctagcaggtagccgagcacggcagggcgacccggcgcgcgatccgccgctgcccgcgtgggcggccgcctatggatctggccgcatggcgggcttccctctaggcggaggaggccacggccgcggcgaccaccaccaccctcacgtgaacccttcctccggctccggctccgactccgcggccgccgcctacctctacacggccgccgccgcgccgcgcggcggcttccagctatggccgcctcacccggcgcaggagcaccaccaccacttctacgcccccaacatcatccgcttcgccgatgaccccgccgcgggctcctcgcgcggcggcaggggctccgccagcggcgccggcgcgggcaccatcagctgccaggactgcggcaaccaggccaagaaggactgcgtccacatgcgctgccgcacctgctgcaagagccggggcttcgactgccccacccatgtcaagtccacctgggtgcccgccgccaagcgccgggagcgccagcagcagcaggccaccggcgccgccgagccctccaagcgccaccgtgacgccgctaccggtgcccagccctcctctaccaccgccacaaccacttcctcgggtgagcagcagcagatggcggtggtggcggagcggttcccgcgggaagtgagctcggaggcgctgttccgctgcgtccgcctgggcccggtcgacgagcccgacgccgaggtggcgtaccagaccagcgtcagcatcgccggccacgtcttcaagggcatcctgcacgacgtcggcccggagccgtcgacggtcgctgcgggcggcggcttccgccacgccaccgaggggtcctcccctagcacggccgcggcgggcgaaggcagcgtcgtggggcccgtctcgtcatcggctgtggtcatggacccgtacccgacgcccggcccgtacggcgccgctcatttcttccacggccatccgaggtgatgatcaaacggccaccatgattgacacggctagctagcctagctgaatctgatgggtttcgttccctttggacatgccatgcatctttccatccactgcttcaatatttgctttactagagggattatcgatcgtcacaaaattgttactagtagcttttatttgtctccgtcctccatccctgttctcgacgatcgatgcataaactgatgagcaccattcatcactgtttcttt

SEQ ID NO: 31211 - protein, 296 aa, Zea mays subsp. mays
  peptide (1)..(296): Ceres Seq. ID no. 13493653
  misc_feature (88)..(235): Pfam Name: DUF702 Pfam Description: Domain of unknown function
  misc_feature (88)..(291): NCBI GI NO: 15239350 NR Description: zinc finger protein SHI-related
  misc_feature (1)..(268): NCBI GI NO: 15234365 NR Description: expressed protein [Arabidopsis thaliana]
  misc_feature (16)..(267): NCBI GI NO: 34906658 NR Description: putative LRP(lateral root primordia) 1
  misc_feature (31)..(235): NCBI GI NO: 15223669 NR Description: hypothetical protein [Arabidopsis thaliana]
  misc_feature (94)..(236): NCBI GI NO: 15224110 NR Description: expressed protein [Arabidopsis thaliana]
  misc_feature (97)..(290): NCBI GI NO: 33945875 NR Description: hypothetical protein
  misc_feature (172)..(234): NCBI GI NO: 15226540 NR Description: expressed protein [Arabidopsis thaliana]
  misc_feature (97)..(152): NCBI GI NO: 15226540 NR Description: expressed protein [Arabidopsis thaliana]
  misc_feature (84)..(201): NCBI GI NO: 15230389 NR Description: expressed protein [Arabidopsis thaliana]
  misc_feature (172)..(234): NCBI GI NO: 26984075 NR Description: hypothetical protein [Arabidopsis thaliana]
MAGFPLGGGGHGRGDHHHPHVNPSSGSGSDSAAAAYLYTAAAAPRGGFQLWPPHPAQEHHHHFYAPNIIRFADDPAAGSSRGGRGSASGAGAGTISCQDCGNQAKKDCVHMRCRTCCKSRGFDCPTHVKSTWVPAAKRRERQQQQATGAAEPSKRHRDAATGAQPSSTTATTTSSGEQQQMAVVAERFPREVSSEALFRCVRLGPVDEPDAEVAYQTSVSIAGHVFKGILHDVGPEPSTVAAGGGFRHATEGSSPSTAAAGEGSVVGPVSSSAVVMDPYPTPGPYGAAHFFHGHPR

SEQ ID NO: 31212 - protein, 186 aa, Zea mays subsp. mays
  peptide (1)..(186): Ceres Seq. ID no. 13493654
  misc_feature (1)..(125): Pfam Name: DUF702 Pfam Description: Domain of unknown function
  misc_feature (1)..(181): NCBI GI NO: 15239350 NR Description: zinc finger protein SHI-related
  misc_feature (1)..(158): NCBI GI NO: 15234365 NR Description: expressed protein [Arabidopsis thaliana]
  misc_feature (1)..(157): NCBI GI NO: 34906658 NR Description: putative LRP(lateral root primordia) 1
  misc_feature (1)..(125): NCBI GI NO: 15223669 NR Description: hypothetical protein [Arabidopsis thaliana]
  misc_feature (1)..(126): NCBI GI NO: 15224110 NR Description: expressed protein [Arabidopsis thaliana]
  misc_feature (1)..(180): NCBI GI NO: 33945875 NR Description: hypothetical protein
  misc_feature (62)..(124): NCBI GI NO: 15226540 NR Description: expressed protein [Arabidopsis thaliana]
  misc_feature (1)..(42): NCBI GI NO: 15226540 NR Description: expressed protein [Arabidopsis thaliana]
  misc_feature (1)..(91): NCBI GI NO: 15230389 NR Description: expressed protein [Arabidopsis thaliana]
  misc_feature (62)..(124): NCBI GI NO: 26984075 NR Description: hypothetical protein [Arabidopsis thaliana]
MRCRTCCKSRGFDCPTHVKSTWVPAAKRRERQQQQATGAAEPSKRHRDAATGAQPSSTTATTTSSGEQQQMAVVAERFPREVSSEALFRCVRLGPVDEPDAEVAYQTSVSIAGHVFKGILHDVGPEPSTVAAGGGFRHATEGSSPSTAAAGEGSVVGPVSSSAVVMDPYPTPGPYGAAHFFHGHPR

SEQ ID NO: 31213 - DNA, 1097 bp, Zea mays subsp. mays
  misc_feature (1)..(1097): Ceres Seq. ID no. 13496171
gacctcacttgatccgctcccttcgccgcgacgacgttcctacgcagctgcggtcgacgcgcgcacggcagctcgctcgctagctgatcacgacagctcgctcggctcgaccgaatggcgccgcggctgctggcgtgcttcgggcgcggcgtcgcggcggcgccggacgacgcgactggcgagggccagctggaggcgccccccgctggcccggtgctggtggagctgttcgggtcgcaggggtgcggggcgtcgcccgaggcggacgccgtggcggcgcggctggcgcaggactccgggtccggggacggcgccgtcgtggtgctggcgttccacgtcgactactgggactaccgcgggtggaaggaccccttcgcgtccagcgcctggaccgtgcgccagaaggcctacgtggaggcgctccgcctcgacacgctcttcacgccgcaggtcgtcctgcagggccgcgcgcactgcgtcggcaccgaccaggacgcgctcgcgctggccgtccgcgacgccccgcgctaccccgcgcccgccatcaaggtcacgttccagcggccgagccccgcaacactgcaggcgtcgttcacgggcaccctgcgcagccgcgtggagggcccaggcggcgcgagcgtgctggtggcgctgtacgagagcgggctggtgaccgactgcgggcgcggcgagaacaagggcaagtcgctgctcaacgaccacgtggtgcgccgtctcgagaaggtggccgccgtgcgggagggcgcctcgccgaagaagaccgtgtcgggcaccgtccagttcccgctctgggacggctttcgcgccaccaagtgcggcctcgtgctcttcgtccagaacgccgcgctgcaggtgctcgacgtccagcacttcgacctgcctgacaacgtctgagctcgtgacgcggtggggcgcgcgcgcgttccgcgttggctgcctccctgcggcgggcgtcacattctttgtatcactgtatgtagtacatcactggatggtatttagatggaaaacctgagtattctttatctccacgtatgttcttgttctgcattatggcaatggatcttctgttttgc

SEQ ID NO: 31214 - protein, 266 aa, Zea mays subsp. mays
  peptide (1)..(266): Ceres Seq. ID no. 13496172
  misc_feature (1)..(266): NCBI GI NO: 34394018 NR Description: membrane lipo protein lipid attachment site-containing protein -like
  misc_feature (1)..(266): NCBI GI NO: 15234089 NR Description: membrane lipo protein lipid attachment site-containing expressed protein
  misc_feature (1)..(266): NCBI GI NO: 21593063 NR Description: unknown [Arabidopsis thaliana]
  misc_feature (1)..(266): NCBI GI NO: 13265463 NR Description: AT4g27350 [Arabidopsis thaliana]
  misc_feature (32)..(266): NCBI GI NO: 15239579 NR Description: expressed protein [Arabidopsis thaliana]
  misc_feature (14)..(248): NCBI GI NO: 17546308 NR Description: HYPOTHETICAL PROTEIN [Ralstonia solanacearum]
  misc_feature (33)..(207): NCBI GI NO: 23014426 NR Description: hypothetical protein
  misc_feature (15)..(245): NCBI GI NO: 15966981 NR Description: HYPOTHETICAL PROTEIN [Sinorhizobium meliloti]
  misc_feature (35)..(251): NCBI GI NO: 22962198 NR Description: hypothetical protein [Rhodopseudomonas palustris]
  misc_feature (33)..(211): NCBI GI NO: 16127896 NR Description: conserved hypothetical protein
MAPRLLACFGRGVAAAPDDATGEGQLEAPPAGPVLVELFGSQGCGASPEADAVAARLAQDSGSGDGAVVVLAFHVDYWDYRGWKDPFASSAWTVRQKAYVEALRLDTLFTPQVVLQGRAHCVGTDQDALALAVRDAPRYPAPAIKVTFQRPSPATLQASFTGTLRSRVEGPGGASVLVALYESGLVTDCGRGENKGKSLLNDHVVRRLEKVAAVREGASPKKTVSGTVQFPLWDGFRATKCGLVLFVQNAALQVLDVQHFDLPDNV

SEQ ID NO: 31215 - protein, 223 aa, Zea mays subsp. mays
  peptide (1)..(223): Ceres Seq. ID no. 13496173
  misc_feature (46)..(223): NCBI GI NO: 5821145 NR Description: RNA binding protein [Homo sapiens]
  misc_feature (46)..(223): NCBI GI NO: 5821143 NR Description: RNA binding protein [Homo sapiens]
  misc_feature (46)..(223): NCBI GI NO: 6649242 NR Description: splicing coactivator subunit SRm300 [Homo sapiens]
  misc_feature (46)..(223): NCBI GI NO: 19923466 NR Description: splicing coactivator subunit SRm300
  misc_feature (46)..(223): NCBI GI NO: 30424862 NR Description: RIKEN cDNA 5033413A03 [Mus musculus]
  misc_feature (8)..(223): NCBI GI NO: 5821151 NR Description: RNA binding protein [Homo sapiens]
  misc_feature (8)..(223): NCBI GI NO: 6634015 NR Description: KIAA0324 protein [Homo sapiens]
  misc_feature (8)..(223): NCBI GI NO: 7512967 NR Description: hypothetical protein KIAA0324 - human (fragment)
  misc_feature (8)..(223): NCBI GI NO: 19923466 NR Description: splicing coactivator subunit SRm300
  misc_feature (47)..(223): NCBI GI NO: 5821151 NR Description: RNA binding protein [Homo sapiens]
TSLDPLPSPRRRSYAAAVDARTAARSLADHDSSLGSTEWRRGCWRASGAASRRRRTTRLARASWRRPPLARCWWSCSGRRGAGRRPRRTPWRRGWRRTPGPGTAPSWCWRSTSTTGTTAGGRTPSRPAPGPCARRPTWRRSASTRSSRRRSSCRAARTASAPTRTRSRWPSATPRATPRPPSRSRSSGRAPQHCRRRSRAPCAAAWRAQAARACWWRCTRAGW

SEQ ID NO: 31216 - DNA, 1017 bp, Zea mays subsp. mays
  misc_feature (1)..(1017): Ceres Seq. ID no. 12357240
actctcgctgtttcctgcgtgatctgcttgtgtagctactagctagctagcggagcggaacccatgggctgcgaggaggaagagaggctgctgttcccgtccttcgtctttcccgagagcttcgcggaggccgccacccccggctccggtggtgagcagaagaaggctcggcagcgtcggaggcgcaagccgcggccggcggagggcggcgagggcgcggacgagcaggccaggaagcggcggctgagcgacgaccaggcgcggttcctggagctcagcttcaggaaggagcgcaagctggagacgccccgcaaggtgcagctggccgccgatctgggcctcgacgccaagcaggtggccgtctggttccagaaccgccgcgcccgccacaagagcaagctcatggaggaggagttctccaagctccgcgccgcgcacgacgccgtcgtcctccacaactgccacctcgagaccgagctgctgaagatgaaggacaggctggcggaggtggaggaggagaagacgaagctcgtcgcggcggcggcggcggcggccggcggcgcagcgggcgcagggagcagcagcccgagctcgtcgtcgttctcgacggtgacgcaccacccggccgcggcgctgcaggtggggcagttcggggtggagccggaggaggccgccgacctcgcctacatgaccgagtacgcctacaacagctacatgaacatgatggacctcgcgcccggctacttcggcggagtcgtctacgactacgaccacttcaactgatccacgagcatgcaggaggaggaggagggaagctacaagacgaaggaaggattgactggcctatcagctaggtactattttcgtgttaatggatggatggaccgatttgcagggcgcgcgtagcagtagtagcaatcaaggtcactagtatagtctgtcagtacgacgacgtcgatcagtcaatgtctcccctgacgataattattaagtcgatctattcagtagtaacttgtt

SEQ ID NO: 31217 - protein, 239 aa, Zea mays subsp. mays
  peptide (1)..(239): Ceres Seq. ID no. 12357241
  misc_feature (57)..(111): Pfam Name: Pfam Description:  Homeobox domain
  misc_feature (2)..(223): NCBI GI NO: 33146844 NR Description: homeodomain protein-like
  misc_feature (5)..(212): NCBI GI NO: 15224190 NR Description: homeodomain protein; protein id: At2g18550.1
  misc_feature (5)..(181): NCBI GI NO: 15234508 NR Description: homeodomain protein; protein id: At4g36740.1
  misc_feature (29)..(156): NCBI GI NO: 15240052 NR Description: homeodomain transcription factor-like
  misc_feature (12)..(207): NCBI GI NO: 5006853 NR Description: homeodomain leucine zipper protein [Oryza sativa]
  misc_feature (16)..(169): NCBI GI NO: 5006857 NR Description: homeodomain leucine zipper protein [Oryza sativa]
  misc_feature (42)..(214): NCBI GI NO: 18034443 NR Description: homeodomain leucine zipper protein CPHB-6
  misc_feature (47)..(222): NCBI GI NO: 7446244 NR Description: homeotic protein - carrot
  misc_feature (47)..(157): NCBI GI NO: 6018089 NR Description: homeodomain-leucine zipper protein 57
  misc_feature (53)..(183): NCBI GI NO: 5006855 NR Description: homeodomain leucine zipper protein [Oryza sativa]
MGCEEEERLLFPSFVFPESFAEAATPGSGGEQKKARQRRRRKPRPAEGGEGADEQARKRRLSDDQARFLELSFRKERKLETPRKVQLAADLGLDAKQVAVWFQNRRARHKSKLMEEEFSKLRAAHDAVVLHNCHLETELLKMKDRLAEVEEEKTKLVAAAAAAAGGAAGAGSSSPSSSSFSTVTHHPAAALQVGQFGVEPEEAADLAYMTEYAYNSYMNMMDLAPGYFGGVVYDYDHFN

SEQ ID NO: 31218 - protein, 126 aa, Zea mays subsp. mays
  peptide (1)..(126): Ceres Seq. ID no. 12357242
  misc_feature (1)..(110): NCBI GI NO: 33146844 NR Description: homeodomain protein-like
  misc_feature (1)..(99): NCBI GI NO: 15224190 NR Description: homeodomain protein; protein id: At2g18550.1
  misc_feature (1)..(68): NCBI GI NO: 15234508 NR Description: homeodomain protein; protein id: At4g36740.1
  misc_feature (1)..(43): NCBI GI NO: 15240052 NR Description: homeodomain transcription factor-like
  misc_feature (1)..(94): NCBI GI NO: 5006853 NR Description: homeodomain leucine zipper protein [Oryza sativa]
  misc_feature (1)..(56): NCBI GI NO: 5006857 NR Description: homeodomain leucine zipper protein [Oryza sativa]
  misc_feature (1)..(101): NCBI GI NO: 18034443 NR Description: homeodomain leucine zipper protein CPHB-6
  misc_feature (1)..(109): NCBI GI NO: 7446244 NR Description: homeotic protein - carrot
  misc_feature (1)..(44): NCBI GI NO: 6018089 NR Description: homeodomain-leucine zipper protein 57
  misc_feature (1)..(70): NCBI GI NO: 5006855 NR Description: homeodomain leucine zipper protein [Oryza sativa]
MEEEFSKLRAAHDAVVLHNCHLETELLKMKDRLAEVEEEKTKLVAAAAAAAGGAAGAGSSSPSSSSFSTVTHHPAAALQVGQFGVEPEEAADLAYMTEYAYNSYMNMMDLAPGYFGGVVYDYDHFN

SEQ ID NO: 31219 - DNA, 1695 bp, Zea mays subsp. mays
  misc_feature (1)..(1695): Ceres Seq. ID no. 12374922
catccggatgagggggaaggaagacgataccagacgctactcctacaactcaccaccactacactatcccctccgctctctctccgcactactgcgtattaggtagcctctcgcattgacaagccagccggtggtttggttcgctttgctttgcttacgtgctgcgctgcgcgctccgaccaggcccgccccgaccggcgatgcagcggtggctcccggcgctcctccgccgcgcggcgcccggcggcggcgcggcgcggctcctcgccacgtcctccctcctcttcgacgacacgcaggagcagttcaaggagagcgtgcgcaagttcgcgcaggaggccatcgcgccgcgcgccgcggccatcgacgcctccaaccacttcccgcgggacgtggacctgtggaggctcatgggggacttcaacctccacggcctcaccgcgcccgaggagtacggcgggatggggctcgggtacatgtaccactgcatcgccatggaggagatcaccagggcatccggcgccgtcggcctctcctacggcgcgcactccaacctctgcatcaaccagctcgtccggcacggaaacccggagcagaagctcaagtatctgcccaagctgatcagtggggagcatatcggggcactggcgatgagtgaacccaactctggctctgatgtcgtcagcatgaagtgcaaagctgagaaagtggacggtggctatgtccttaatgggaataagatgtggtgcaccaatggcccgtctgctcagacactggttgtttacgcaaaaacagatctagctgcagggtcaaaaggaataactgcattcataatcgagaaagggatgcccgggttcagtactgctcagaagttggacaaacttggcatgagaggaagcgacacgtgtgagcttgtttttgagaactgctttgtgccatgcgaaaatgtcctcggtgaagaaggcaaaggtgtttatgtcatgatgtcagggcttgatctggaaaggcttgtattagctgcgggccctattggccttatgcaggcatgccttgatgttgtacttccatatgttcgccagagggagcaattcggccgtccaattggtgaatttcagttcatacaggggaaaatggctgatatgtacacttcgttgcagtcgtcaagatcatttgtatactcagttgctagggactgcgataatggcaaagttgatcgcaaggattgtgcaggagtaattctctttgctgctgaaaatgcaacccaagttgcacttcaggcaatccagtgtcttggtggaaatgggtacataaatgagtacccaactggtcgtctcctgagagatgcaaaattgtttgagattggtgccggtactagtgaggtaagaagaatgataattggccgtgagctcttcaaagaggactgaaacttctattttgcaagccagatatcagagcatattgttagctggaggaggtgagggcgatttagatatttagcaaatcacccctgtggttcaatgcttttgtataaccgcagacatacatcaaataaagttcacttgtacttgctgcttgcagtggctctatttttctgtcaataaagttttttatgtctctgacttatgcaatgttgttcagttgcattttactatattagtgtagacaagacagtaatataaatgtttcaatgagtgc

SEQ ID NO: 31220 - protein, 407 aa, Zea mays subsp. mays
  peptide (1)..(407): Ceres Seq. ID no. 12374923
  misc_feature (255)..(404): Pfam Name: Pfam Description:  Acyl-CoA dehydrogenase, C-terminal domain
  misc_feature (24)..(407): NCBI GI NO: 25090618 NR Description: Isovaleryl-CoA dehydrogenase
  misc_feature (24)..(407): NCBI GI NO: 15230664 NR Description: isovaleryl-CoA-dehydrogenase precursor
  misc_feature (24)..(407): NCBI GI NO: 17064982 NR Description: isovaleryl-CoA-dehydrogenase precursor (IVD)
  misc_feature (24)..(406): NCBI GI NO: 5869965 NR Description: Isovaleryl-CoA Dehydrogenase
  misc_feature (24)..(406): NCBI GI NO: 5869967 NR Description: auxin binding protein
  misc_feature (24)..(406): NCBI GI NO: 25453061 NR Description: Isovaleryl-CoA dehydrogenase 2
  misc_feature (24)..(405): NCBI GI NO: 25453062 NR Description: Isovaleryl-CoA dehydrogenase 1
  misc_feature (34)..(406): NCBI GI NO: 23500935 NR Description: isovaleryl-CoA dehydrogenase [Brucella suis 1330]
  misc_feature (23)..(404): NCBI GI NO: 22963587 NR Description: hypothetical protein [Rhodopseudomonas palustris]
  misc_feature (34)..(406): NCBI GI NO: 17988206 NR Description: ISOVALERYL-COA DEHYDROGENASE [Brucella melitensis]
MQRWLPALLRRAAPGGGAARLLATSSLLFDDTQEQFKESVRKFAQEAIAPRAAAIDASNHFPRDVDLWRLMGDFNLHGLTAPEEYGGMGLGYMYHCIAMEEITRASGAVGLSYGAHSNLCINQLVRHGNPEQKLKYLPKLISGEHIGALAMSEPNSGSDVVSMKCKAEKVDGGYVLNGNKMWCTNGPSAQTLVVYAKTDLAAGSKGITAFIIEKGMPGFSTAQKLDKLGMRGSDTCELVFENCFVPCENVLGEEGKGVYVMMSGLDLERLVLAAGPIGLMQACLDVVLPYVRQREQFGRPIGEFQFIQGKMADMYTSLQSSRSFVYSVARDCDNGKVDRKDCAGVILFAAENATQVALQAIQCLGGNGYINEYPTGRLLRDAKLFEIGAGTSEVRRMIIGRELFKED

SEQ ID NO: 31221 - protein, 337 aa, Zea mays subsp. mays
  peptide (1)..(337): Ceres Seq. ID no. 12374924
  misc_feature (185)..(334): Pfam Name: Pfam Description:  Acyl-CoA dehydrogenase, C-terminal domain
  misc_feature (1)..(337): NCBI GI NO: 25090618 NR Description: Isovaleryl-CoA dehydrogenase
  misc_feature (1)..(337): NCBI GI NO: 15230664 NR Description: isovaleryl-CoA-dehydrogenase precursor
  misc_feature (1)..(337): NCBI GI NO: 17064982 NR Description: isovaleryl-CoA-dehydrogenase precursor (IVD)
  misc_feature (1)..(336): NCBI GI NO: 5869965 NR Description: Isovaleryl-CoA Dehydrogenase
  misc_feature (1)..(336): NCBI GI NO: 5869967 NR Description: auxin binding protein
  misc_feature (1)..(336): NCBI GI NO: 25453061 NR Description: Isovaleryl-CoA dehydrogenase 2
  misc_feature (1)..(335): NCBI GI NO: 25453062 NR Description: Isovaleryl-CoA dehydrogenase 1
  misc_feature (1)..(336): NCBI GI NO: 23500935 NR Description: isovaleryl-CoA dehydrogenase [Brucella suis 1330]
  misc_feature (1)..(334): NCBI GI NO: 22963587 NR Description: hypothetical protein [Rhodopseudomonas palustris]
  misc_feature (1)..(336): NCBI GI NO: 17988206 NR Description: ISOVALERYL-COA DEHYDROGENASE [Brucella melitensis]
MGDFNLHGLTAPEEYGGMGLGYMYHCIAMEEITRASGAVGLSYGAHSNLCINQLVRHGNPEQKLKYLPKLISGEHIGALAMSEPNSGSDVVSMKCKAEKVDGGYVLNGNKMWCTNGPSAQTLVVYAKTDLAAGSKGITAFIIEKGMPGFSTAQKLDKLGMRGSDTCELVFENCFVPCENVLGEEGKGVYVMMSGLDLERLVLAAGPIGLMQACLDVVLPYVRQREQFGRPIGEFQFIQGKMADMYTSLQSSRSFVYSVARDCDNGKVDRKDCAGVILFAAENATQVALQAIQCLGGNGYINEYPTGRLLRDAKLFEIGAGTSEVRRMIIGRELFKED

SEQ ID NO: 31222 - protein, 320 aa, Zea mays subsp. mays
  peptide (1)..(320): Ceres Seq. ID no. 12374925
  misc_feature (168)..(317): Pfam Name: Pfam Description:  Acyl-CoA dehydrogenase, C-terminal domain
  misc_feature (1)..(320): NCBI GI NO: 25090618 NR Description: Isovaleryl-CoA dehydrogenase
  misc_feature (1)..(320): NCBI GI NO: 15230664 NR Description: isovaleryl-CoA-dehydrogenase precursor
  misc_feature (1)..(320): NCBI GI NO: 17064982 NR Description: isovaleryl-CoA-dehydrogenase precursor (IVD)
  misc_feature (1)..(319): NCBI GI NO: 5869965 NR Description: Isovaleryl-CoA Dehydrogenase
  misc_feature (1)..(319): NCBI GI NO: 5869967 NR Description: auxin binding protein
  misc_feature (1)..(319): NCBI GI NO: 25453061 NR Description: Isovaleryl-CoA dehydrogenase 2
  misc_feature (1)..(318): NCBI GI NO: 25453062 NR Description: Isovaleryl-CoA dehydrogenase 1
  misc_feature (1)..(319): NCBI GI NO: 23500935 NR Description: isovaleryl-CoA dehydrogenase [Brucella suis 1330]
  misc_feature (1)..(317): NCBI GI NO: 22963587 NR Description: hypothetical protein [Rhodopseudomonas palustris]
  misc_feature (1)..(319): NCBI GI NO: 17988206 NR Description: ISOVALERYL-COA DEHYDROGENASE [Brucella melitensis]
MGLGYMYHCIAMEEITRASGAVGLSYGAHSNLCINQLVRHGNPEQKLKYLPKLISGEHIGALAMSEPNSGSDVVSMKCKAEKVDGGYVLNGNKMWCTNGPSAQTLVVYAKTDLAAGSKGITAFIIEKGMPGFSTAQKLDKLGMRGSDTCELVFENCFVPCENVLGEEGKGVYVMMSGLDLERLVLAAGPIGLMQACLDVVLPYVRQREQFGRPIGEFQFIQGKMADMYTSLQSSRSFVYSVARDCDNGKVDRKDCAGVILFAAENATQVALQAIQCLGGNGYINEYPTGRLLRDAKLFEIGAGTSEVRRMIIGRELFKED

SEQ ID NO: 31223 - DNA, 1058 bp, Zea mays subsp. mays
  misc_feature (1)..(1058): Ceres Seq. ID no. 12381373
acacccttctactagagcagctgagctgagagtgacagcagcggagcggcaatggcgcagatgctcctcctcctcctcctccttgccgcacccacagtgccagcggaggcagcagccaccgcctccactccgacgctcgtgttcctcctggccgggcagtccaacatgggcggccgcggcggcgccaccaacggcacctgggacggcgtggtgccgcccgcgtgcgcgccttccccgcgcatcctccgcctctccccgtccctgcgctgggaggaggccagggagccgctgcacgccggcattgacctgcacaacgtgctcggcgtgggccccgggatgcccttcgcgcacgcgctcctccgctcctggcgccgctccggccgccgccccgccgtggtggggctggtcccctgcgcgcagggcgccacgcccatcgccagctggtcccgcggcacgccgctgtacgaccgcatgctcgcgcgcgcaagggccgccgtcgcccgcgggcccgccaccaggctggccgcgctgctctggtaccagggcgaggccgacaccatcaggcgccaggacgccgacgcctacacgccccgcatggaggccttggtccgcgacgtccgccgggacctgggcatgccggacctgctggtcatccaggtggggctggccacggggcagggcaggttcgtggacatcgtcagggaggcgcagaggagggtcagcctccgcaacgtcaggtacgtggacgccaagggcctgcccgtcgccaacgactacacgcatctgacaacgccggcgcaggtcaagctcggcaacatgctcgccgccgcctacatggcagcgacacacacgcactgactgagccatctactacctcgattcttaatcaattctacttgactactcagtaattgagccagcaagcagcaagcaacgctacgccgttctactttaattttgttctgcacatgtccttactatgcataacatcctttgctttgacgatgatgatttagcatcctttgatgatggtactcaaatagaatattcttcttttt

SEQ ID NO: 31224 - protein, 268 aa, Zea mays subsp. mays
  peptide (1)..(268): Ceres Seq. ID no. 12381374
  misc_feature (3)..(263): NCBI GI NO: 30102977 NR Description: hypothetical protein
  misc_feature (1)..(262): NCBI GI NO: 30102980 NR Description: unknown protein
  misc_feature (1)..(262): NCBI GI NO: 38345580 NR Description: OSJNBa0027H06.16
  misc_feature (30)..(263): NCBI GI NO: 38347110 NR Description: OSJNBa0009K15.7
  misc_feature (27)..(263): NCBI GI NO: 21594009 NR Description: unknown [Arabidopsis thaliana]
  misc_feature (27)..(263): NCBI GI NO: 18418402 NR Description: Expressed protein; protein id: At4g34215
  misc_feature (7)..(203): NCBI GI NO: 30693749 NR Description: expressed protein [Arabidopsis thaliana]
  misc_feature (27)..(206): NCBI GI NO: 7488258 NR Description: protein kinase homolog F28A23
  misc_feature (39)..(203): NCBI GI NO: 11357879 NR Description: hypothetical protein F8J2
MAQMLLLLLLLAAPTVPAEAAATASTPTLVFLLAGQSNMGGRGGATNGTWDGVVPPACAPSPRILRLSPSLRWEEAREPLHAGIDLHNVLGVGPGMPFAHALLRSWRRSGRRPAVVGLVPCAQGATPIASWSRGTPLYDRMLARARAAVARGPATRLAALLWYQGEADTIRRQDADAYTPRMEALVRDVRRDLGMPDLLVIQVGLATGQGRFVDIVREAQRRVSLRNVRYVDAKGLPVANDYTHLTTPAQVKLGNMLAAAYMAATHTH

SEQ ID NO: 31225 - protein, 265 aa, Zea mays subsp. mays
  peptide (1)..(265): Ceres Seq. ID no. 12381375
  misc_feature (1)..(260): NCBI GI NO: 30102977 NR Description: hypothetical protein
  misc_feature (1)..(259): NCBI GI NO: 30102980 NR Description: unknown protein
  misc_feature (1)..(259): NCBI GI NO: 38345580 NR Description: OSJNBa0027H06.16
  misc_feature (27)..(260): NCBI GI NO: 38347110 NR Description: OSJNBa0009K15.7
  misc_feature (24)..(260): NCBI GI NO: 21594009 NR Description: unknown [Arabidopsis thaliana]
  misc_feature (24)..(260): NCBI GI NO: 18418402 NR Description: Expressed protein; protein id: At4g34215
  misc_feature (4)..(200): NCBI GI NO: 30693749 NR Description: expressed protein [Arabidopsis thaliana]
  misc_feature (24)..(203): NCBI GI NO: 7488258 NR Description: protein kinase homolog F28A23
  misc_feature (36)..(200): NCBI GI NO: 11357879 NR Description: hypothetical protein F8J2
MLLLLLLLAAPTVPAEAAATASTPTLVFLLAGQSNMGGRGGATNGTWDGVVPPACAPSPRILRLSPSLRWEEAREPLHAGIDLHNVLGVGPGMPFAHALLRSWRRSGRRPAVVGLVPCAQGATPIASWSRGTPLYDRMLARARAAVARGPATRLAALLWYQGEADTIRRQDADAYTPRMEALVRDVRRDLGMPDLLVIQVGLATGQGRFVDIVREAQRRVSLRNVRYVDAKGLPVANDYTHLTTPAQVKLGNMLAAAYMAATHTH

SEQ ID NO: 31226 - protein, 261 aa, Zea mays subsp. mays
  peptide (1)..(261): Ceres Seq. ID no. 12381376
  misc_feature (45)..(261): NCBI GI NO: 7248459 NR Description: arabinogalactan protein [Zea mays]
  misc_feature (22)..(210): NCBI GI NO: 29828765 NR Description: putative protoporphyrinogen oxidase
  misc_feature (31)..(259): NCBI GI NO: 27375632 NR Description: blr0521 [Bradyrhizobium japonicum]
  misc_feature (39)..(256): NCBI GI NO: 27375632 NR Description: blr0521 [Bradyrhizobium japonicum]
  misc_feature (1)..(201): NCBI GI NO: 3044086 NR Description: unknown [Myxococcus xanthus]
  misc_feature (31)..(254): NCBI GI NO: 27375632 NR Description: blr0521 [Bradyrhizobium japonicum]
  misc_feature (107)..(220): NCBI GI NO: 12862550 NR Description: alpha-amylase [Drosophila melanogaster]
  misc_feature (22)..(206): NCBI GI NO: 23017082 NR Description: hypothetical protein [Thermobifida fusca]
  misc_feature (51)..(256): NCBI GI NO: 19553189 NR Description: translation initiation factor 2
  misc_feature (39)..(201): NCBI GI NO: 9629749 NR Description: 24 [Equine herpesvirus 4]
HPSTRAAELRVTAAERQWRRCSSSSSSLPHPQCQRRQQPPPPLRRSCSSWPGSPTWAAAAAPPTAPGTAWCRPRARLPRASSASPRPCAGRRPGSRCTPALTCTTCSAWAPGCPSRTRSSAPGAAPAAAPPWWGWSPARRAPRPSPAGPAARRCTTACSRAQGPPSPAGPPPGWPRCSGTRARPTPSGARTPTPTRPAWRPWSATSAGTWACRTCWSSRWGWPRGRAGSWTSSGRRRGGSASATSGTWTPRACPSPTTTRI

SEQ ID NO: 31227 - DNA, 1784 bp, Zea mays subsp. mays
  misc_feature (1)..(1784): Ceres Seq. ID no. 12414416
gcacgagaccattacctagaacatcctaatcaaaaaaccacactctcgtctccctcctccccgttccttattcgccagaccggagggaggggtacgagcttcaccgctttcatcccgcccgcgctcctccccagatctcgtctccattaaagccgaccttgcccagattcgcgccctcctcgctcatatctgaaagcggctctgattttccaatccgaccgcaggagcggtgcaccgggccgcgtgattccggcggcttgatttggaatttgtgatctttcggggcattcgtcggtttgtctgtcggtgccggtggtgctgcgttttcgagggcagcgaagatgggtgtcggcggagagaagttccagctggggacggtgggggcgctgagcctatccgtggtctcctccgtctccattgtcatctgcaacaaggccctcatgagctccctcggctttaacttcgccactaccttgacaagctggcatctgctggttacattctgctcccttcatgtggcattatggatgaaattctttgagcataagccttttgattcaagaactgtcatgggatttggagtacttaatggaatctccattgggctcctcaacttgagtcttggcttcaactctgttgggttttaccagatgactaagctggcgatcatcccgtgcactgtcatcttagagacacttttcttcaggaagaagttcagtcggagtatccagatgtccctttctgtgctccttcttggtgttggtgttgcaactgtcactgatctgcaactcaatgctgtgggatccatactctccttgctggcaattatcacgacttgcattgctcaaattatgacaaacactatccagaagaagttcaaggtctcatcgacccaactgctctaccagtcttgcccttatcaatcactgaccctgtttctcattggccccttccttgatggctttttgactaaccaaaacgtctttgcttttaattatacatcacaagttgtgtttttcattgtgttgtcatgcctgatatcggtctcagtgaacttcagcacttttcttgtgattggaaagacgtctcctgttacttaccaagtcctgggccatcttaaaacatgccttgttcttacctttggttatgttttgcttcatgacccatttagctggagaaacatacttgggatcctaattgcagtagttggaatggtcttatattcatacttctgcacagtggagacccagcataagaacactgaagtctccccacagcaggtgaaagaaagtgaggcagcccctttgatctcagactctttgagcaaagttgaaaatgggggcggtgttgttgatgacgagcctttgaaggtacccatgtggagctcaaagtattcgcgggagtgaaattttctcccgctagacggtggcatcatacaggattcagtttagtaggcagatagtagggttggaagccaacccagagtgtaatgaacatttgagttacattttttggccttttttagcgtcacgatctactactggtaaaagggtctgtttcttgggaggatcttaccttcaggattgccagatatacattgaaactagacggcagatattgtatgatttgtatctggacatgttccacatcgtctaactgtaacttccaactggtacatggcatgcctatatccaaagatagatttcatttttttttgtatcagaaagatccggacaagacttgtgcaaaatttgtagtactattggttcgagtttgttgctttc

SEQ ID NO: 31228 - protein, 354 aa, Zea mays subsp. mays
  peptide (1)..(354): Ceres Seq. ID no. 12414417
  misc_feature (1)..(353): NCBI GI NO: 13699188 NR Description: putative glucose-6-phosphate/phosphate-tranlocat or
  misc_feature (1)..(353): NCBI GI NO: 34896140 NR Description: P0701D05.25
  misc_feature (5)..(349): NCBI GI NO: 22329373 NR Description: unknown protein; protein id: At1g06890
  misc_feature (6)..(349): NCBI GI NO: 27311731 NR Description: putative integral membrane protein
  misc_feature (6)..(323): NCBI GI NO: 30683853 NR Description: transporter-related [Arabidopsis thaliana]
  misc_feature (5)..(335): NCBI GI NO: 13384378 NR Description: putative phosphate translocator
  misc_feature (104)..(349): NCBI GI NO: 25406945 NR Description: hypothetical protein
  misc_feature (104)..(335): NCBI GI NO: 37535412 NR Description: putative glucose-6-phosphate/phosphate-translocator
  misc_feature (5)..(82): NCBI GI NO: 37535412 NR Description: putative glucose-6-phosphate/phosphate-translocator
  misc_feature (6)..(331): NCBI GI NO: 18411172 NR Description: expressed protein; protein id: At1g76670
MGVGGEKFQLGTVGALSLSVVSSVSIVICNKALMSSLGFNFATTLTSWHLLVTFCSLHVALWMKFFEHKPFDSRTVMGFGVLNGISIGLLNLSLGFNSVGFYQMTKLAIIPCTVILETLFFRKKFSRSIQMSLSVLLLGVGVATVTDLQLNAVGSILSLLAIITTCIAQIMTNTIQKKFKVSSTQLLYQSCPYQSLTLFLIGPFLDGFLTNQNVFAFNYTSQVVFFIVLSCLISVSVNFSTFLVIGKTSPVTYQVLGHLKTCLVLTFGYVLLHDPFSWRNILGILIAVVGMVLYSYFCTVETQHKNTEVSPQQVKESEAAPLISDSLSKVENGGGVVDDEPLKVPMWSSKYSRE

SEQ ID NO: 31229 - protein, 321 aa, Zea mays subsp. mays
  peptide (1)..(321): Ceres Seq. ID no. 12414418
  misc_feature (1)..(320): NCBI GI NO: 13699188 NR Description: putative glucose-6-phosphate/phosphate-tranlocat or
  misc_feature (1)..(320): NCBI GI NO: 34896140 NR Description: P0701D05.25
  misc_feature (1)..(316): NCBI GI NO: 22329373 NR Description: unknown protein; protein id: At1g06890
  misc_feature (1)..(316): NCBI GI NO: 27311731 NR Description: putative integral membrane protein
  misc_feature (1)..(290): NCBI GI NO: 30683853 NR Description: transporter-related [Arabidopsis thaliana]
  misc_feature (1)..(302): NCBI GI NO: 13384378 NR Description: putative phosphate translocator
  misc_feature (71)..(316): NCBI GI NO: 25406945 NR Description: hypothetical protein
  misc_feature (71)..(302): NCBI GI NO: 37535412 NR Description: putative glucose-6-phosphate/phosphate-translocator
  misc_feature (1)..(49): NCBI GI NO: 37535412 NR Description: putative glucose-6-phosphate/phosphate-translocator
  misc_feature (1)..(298): NCBI GI NO: 18411172 NR Description: expressed protein; protein id: At1g76670
MSSLGFNFATTLTSWHLLVTFCSLHVALWMKFFEHKPFDSRTVMGFGVLNGISIGLLNLSLGFNSVGFYQMTKLAIIPCTVILETLFFRKKFSRSIQMSLSVLLLGVGVATVTDLQLNAVGSILSLLAIITTCIAQIMTNTIQKKFKVSSTQLLYQSCPYQSLTLFLIGPFLDGFLTNQNVFAFNYTSQVVFFIVLSCLISVSVNFSTFLVIGKTSPVTYQVLGHLKTCLVLTFGYVLLHDPFSWRNILGILIAVVGMVLYSYFCTVETQHKNTEVSPQQVKESEAAPLISDSLSKVENGGGVVDDEPLKVPMWSSKYSRE

SEQ ID NO: 31230 - protein, 292 aa, Zea mays subsp. mays
  peptide (1)..(292): Ceres Seq. ID no. 12414419
  misc_feature (1)..(291): NCBI GI NO: 13699188 NR Description: putative glucose-6-phosphate/phosphate-tranlocat or
  misc_feature (1)..(291): NCBI GI NO: 34896140 NR Description: P0701D05.25
  misc_feature (1)..(287): NCBI GI NO: 22329373 NR Description: unknown protein; protein id: At1g06890
  misc_feature (1)..(287): NCBI GI NO: 27311731 NR Description: putative integral membrane protein
  misc_feature (1)..(261): NCBI GI NO: 30683853 NR Description: transporter-related [Arabidopsis thaliana]
  misc_feature (1)..(273): NCBI GI NO: 13384378 NR Description: putative phosphate translocator
  misc_feature (42)..(287): NCBI GI NO: 25406945 NR Description: hypothetical protein
  misc_feature (42)..(273): NCBI GI NO: 37535412 NR Description: putative glucose-6-phosphate/phosphate-translocator
  misc_feature (1)..(20): NCBI GI NO: 37535412 NR Description: putative glucose-6-phosphate/phosphate-translocator
  misc_feature (1)..(269): NCBI GI NO: 18411172 NR Description: expressed protein; protein id: At1g76670
MKFFEHKPFDSRTVMGFGVLNGISIGLLNLSLGFNSVGFYQMTKLAIIPCTVILETLFFRKKFSRSIQMSLSVLLLGVGVATVTDLQLNAVGSILSLLAIITTCIAQIMTNTIQKKFKVSSTQLLYQSCPYQSLTLFLIGPFLDGFLTNQNVFAFNYTSQVVFFIVLSCLISVSVNFSTFLVIGKTSPVTYQVLGHLKTCLVLTFGYVLLHDPFSWRNILGILIAVVGMVLYSYFCTVETQHKNTEVSPQQVKESEAAPLISDSLSKVENGGGVVDDEPLKVPMWSSKYSRE

SEQ ID NO: 31231 - DNA, 878 bp, Zea mays subsp. mays
  misc_feature (1)..(878): Ceres Seq. ID no. 12435195
acaaccatcaggacgcggacgcggacgcggctcacatcaaacacccccttcagctgtgctcagtgctcactgccgcaaaaccacagccacacaggcaacaagcgcccagcgccctttcacatcaccacatccaccgtccacgctcctccgttccatggccatgtcgagcagcgccagcaagaagcaagcccaggcccagaaggccgggcggaggcccccggcggtgtcgtcggccgcggccgcggacgcggagatgcagagggtgttctcgcgcatcgacgcggacggcgacgggcggatctcgccgtcggagctggcggcggtgtcgcgcgccatctccccgccggcgagctcctcgcacgggcggcgcgaggtggcggccatgatggaggagctggacacggaccgcgacggcttcgtggacctgggcgagttcagggcgttccacgcgcgcggcgttggcggcggcggggacgacgacgacgacgcggagctccgcgccgccttcgccgtgtacgacgccgacggcgacgggcgcatcacggcggccgagctgggcagcgtgctcgcccgcatcggcgaggggtgcagcgccgaggagtgccgccggatgatcgccggcgtcgacgccgacggcgacggctgcgtcgggttcgaggagttcaagatcatgatgcgcggcccccagccccagccccagccccaggccggcgccggactgactgccgtgccggacaaggccaagaaggagtgacgggtgtaggtgtaggtgtactcatcagggcatcagtcgggggggaaagggatcgggttcctctgcctcttctgttgctttcacctagtctggactggaggaatggaaatactcaacttcctgc

SEQ ID NO: 31232 - protein, 292 aa, Zea mays subsp. mays
  peptide (1)..(292): Ceres Seq. ID no. 12435196
  misc_feature (150)..(215): Pfam Name: Pfam Description:  TT viral orf 1
TTIRTRTRTRLTSNTPFSCAQCSLPQNHSHTGNKRPAPFHITTSTVHAPPFHGHVEQRQQEASPGPEGRAEAPGGVVGRGRGRGDAEGVLAHRRGRRRADLAVGAGGGVARHLPAGELLARAARGGGHDGGAGHGPRRLRGPGRVQGVPRARRWRRRGRRRRRGAPRRLRRVRRRRRRAHHGGRAGQRARPHRRGVQRRGVPPDDRRRRRRRRRLRRVRGVQDHDARPPAPAPAPGRRRTDCRAGQGQEGVTGVGVGVLIRASVGGERDRVPLPLLLLSPSLDWRNGNTQLP

SEQ ID NO: 31233 - protein, 250 aa, Zea mays subsp. mays
  peptide (1)..(250): Ceres Seq. ID no. 12435197
  misc_feature (124)..(152): Pfam Name: Pfam Description:  EF hand
  misc_feature (48)..(225): NCBI GI NO: 34895640 NR Description: OSJNBa0083M16.33
  misc_feature (75)..(225): NCBI GI NO: 15240340 NR Description: CALMODULIN-RELATED PROTEIN 2, TOUCH-INDUCED
  misc_feature (48)..(227): NCBI GI NO: 19386815 NR Description: B1147A04.10
  misc_feature (52)..(225): NCBI GI NO: 14589311 NR Description: calcium binding protein [Sesbania rostrata]
  misc_feature (84)..(234): NCBI GI NO: 6901654 NR Description: calcium-binding protein [Olea europaea]
  misc_feature (84)..(225): NCBI GI NO: 21618074 NR Description: calmodulin-related protein [Arabidopsis thaliana]
  misc_feature (84)..(234): NCBI GI NO: 14423648 NR Description: Calcium-binding allergen Ole e 8 (PCA18/PCA23)
  misc_feature (84)..(225): NCBI GI NO: 18408502 NR Description: calmodulin-related protein; protein id:At1g66400
  misc_feature (38)..(227): NCBI GI NO: 21740787 NR Description: OSJNBb0091E11.1
  misc_feature (63)..(225): NCBI GI NO: 15221030 NR Description: calcium-binding protein, putative
QPSGRGRGRGSHQTPPSAVLSAHCRKTTATQATSAQRPFTSPHPPSTLLRSMAMSSSASKKQAQAQKAGRRPPAVSSAAAADAEMQRVFSRIDADGDGRISPSELAAVSRAISPPASSSHGRREVAAMMEELDTDRDGFVDLGEFRAFHARGVGGGGDDDDDAELRAAFAVYDADGDGRITAAELGSVLARIGEGCSAEECRRMIAGVDADGDGCVGFEEFKIMMRGPQPQPQPQAGAGLTAVPDKAKKE

SEQ ID NO: 31234 - protein, 199 aa, Zea mays subsp. mays
  peptide (1)..(199): Ceres Seq. ID no. 12435198
  misc_feature (73)..(101): Pfam Name: Pfam Description:  EF hand
  misc_feature (1)..(174): NCBI GI NO: 34895640 NR Description: OSJNBa0083M16.33
  misc_feature (24)..(174): NCBI GI NO: 15240340 NR Description: CALMODULIN-RELATED PROTEIN 2, TOUCH-INDUCED
  misc_feature (1)..(176): NCBI GI NO: 19386815 NR Description: B1147A04.10
  misc_feature (1)..(174): NCBI GI NO: 14589311 NR Description: calcium binding protein [Sesbania rostrata]
  misc_feature (33)..(183): NCBI GI NO: 6901654 NR Description: calcium-binding protein [Olea europaea]
  misc_feature (33)..(174): NCBI GI NO: 21618074 NR Description: calmodulin-related protein [Arabidopsis thaliana]
  misc_feature (33)..(183): NCBI GI NO: 14423648 NR Description: Calcium-binding allergen Ole e 8 (PCA18/PCA23)
  misc_feature (33)..(174): NCBI GI NO: 18408502 NR Description: calmodulin-related protein; protein id:At1g66400
  misc_feature (1)..(176): NCBI GI NO: 21740787 NR Description: OSJNBb0091E11.1
  misc_feature (12)..(174): NCBI GI NO: 15221030 NR Description: calcium-binding protein, putative
MAMSSSASKKQAQAQKAGRRPPAVSSAAAADAEMQRVFSRIDADGDGRISPSELAAVSRAISPPASSSHGRREVAAMMEELDTDRDGFVDLGEFRAFHARGVGGGGDDDDDAELRAAFAVYDADGDGRITAAELGSVLARIGEGCSAEECRRMIAGVDADGDGCVGFEEFKIMMRGPQPQPQPQAGAGLTAVPDKAKKE

SEQ ID NO: 31235 - DNA, 807 bp, Zea mays subsp. mays
  misc_feature (1)..(807): Ceres Seq. ID no. 13496185
acacaggcaacaagcgcccagcgccccttcacatcaccacatccacgttcctccgtttcacggccatgtcgagcagcgccagcaagaagcaggcccaggcccagaaggccgggcggaggcccccggcggtgtcgtcggccgcggccgcggccgcggacgcggagatgcagagggtgttctcgcgcatcgacgcggacggcgacgggcggatctcgccgtcggagctggcggcggtgtcgcgcgccatctccccgccggcgagctcctcgcacgggcggcgcgaggtggcggccatgatggaggagctggacacggaccgcgacggcttcgtggacctgggcgagttcagggcgttccacgcgcgcggcggcggcgtcgtcgccgccgctgtcatcgccgccgccgccccggtttccttcgtaagcccgtcgtcctccgtccgcgactctgcgcgagaagcgagagtatggacacccaagtgaagcttgctgttgtggtgaaggtgatgggaaggaccggctccaggggtcaggttacccaggtcagagtgaagttcttggatgaccagaaccgtctcatcatgaggaacgtcaagggaccggttcgcgagggagacatcctcacactgctcgagtctgagagggaggctaggaggctgcgttgaggcggaatagtgtcttggtagttttcgtatggagttggatgtcatctaattgtgctatgtttgtcaaactttggtatgaccttcaaaacacctgccttgtatgattatttgtgagcctggtgataagattgcagtttggtttt

SEQ ID NO: 31236 - protein, 220 aa, Zea mays subsp. mays
  peptide (1)..(220): Ceres Seq. ID no. 13496186
  misc_feature (156)..(220): Pfam Name: Pfam Description:  Ribosomal protein S28e
  misc_feature (156)..(220): NCBI GI NO: 2739219 NR Description: rpS28 [Hordeum vulgare subsp. vulgare]
  misc_feature (156)..(220): NCBI GI NO: 1173237 NR Description: 40S RIBOSOMAL PROTEIN S28
  misc_feature (156)..(220): NCBI GI NO: 3947719 NR Description: ribosomal protein S28 [Prunus persica]
  misc_feature (156)..(220): NCBI GI NO: 21902507 NR Description: ribosomal protein small subunit 28 kDa
  misc_feature (156)..(220): NCBI GI NO: 3947725 NR Description: ribosomal protein S28 [Prunus persica]
  misc_feature (156)..(220): NCBI GI NO: 40287500 NR Description: 28 kDa small subunit ribosomal protein
  misc_feature (156)..(220): NCBI GI NO: 15232831 NR Description: 40S ribosomal protein S28 (RPS28A)
  misc_feature (156)..(220): NCBI GI NO: 15237617 NR Description: 40S ribosomal protein S28 (RPS28C)
  misc_feature (160)..(220): NCBI GI NO: 22001967 NR Description: 40S ribosomal protein S28
  misc_feature (161)..(220): NCBI GI NO: 30267871 NR Description: ribosomal protein S28
HRQQAPSAPSHHHIHVPPFHGHVEQRQQEAGPGPEGRAEAPGGVVGRGRGRGRGDAEGVLAHRRGRRRADLAVGAGGGVARHLPAGELLARAARGGGHDGGAGHGPRRLRGPGRVQGVPRARRRRRRRRCHRRRRPGFLRKPVVLRPRLCARSESMDTQVKLAVVVKVMGRTGSRGQVTQVRVKFLDDQNRLIMRNVKGPVREGDILTLLESEREARRLR

SEQ ID NO: 31237 - protein, 159 aa, Zea mays subsp. mays
  peptide (1)..(159): Ceres Seq. ID no. 13496187
  misc_feature (94)..(122): Pfam Name: Pfam Description:  EF hand
  misc_feature (4)..(124): NCBI GI NO: 34895640 NR Description: OSJNBa0083M16.33
  misc_feature (19)..(128): NCBI GI NO: 19386815 NR Description: B1147A04.10
  misc_feature (54)..(118): NCBI GI NO: 6901654 NR Description: calcium-binding protein [Olea europaea]
  misc_feature (54)..(118): NCBI GI NO: 14423648 NR Description: Calcium-binding allergen Ole e 8 (PCA18/PCA23)
  misc_feature (54)..(125): NCBI GI NO: 14423843 NR Description: Polcalcin Jun o 2
  misc_feature (54)..(118): NCBI GI NO: 14589311 NR Description: calcium binding protein [Sesbania rostrata]
  misc_feature (54)..(124): NCBI GI NO: 15240340 NR Description: calmodulin-related protein 2, touch-induced (TCH2)
  misc_feature (57)..(124): NCBI GI NO: 13397927 NR Description: putative calmodulin-related protein
  misc_feature (54)..(115): NCBI GI NO: 15221030 NR Description: calcium-binding protein, putative
  misc_feature (54)..(117): NCBI GI NO: 18408502 NR Description: calmodulin-related protein, putative
TGNKRPAPLHITTSTFLRFTAMSSSASKKQAQAQKAGRRPPAVSSAAAAAADAEMQRVFSRIDADGDGRISPSELAAVSRAISPPASSSHGRREVAAMMEELDTDRDGFVDLGEFRAFHARGGGVVAAAVIAAAAPVSFVSPSSSVRDSAREARVWTPK

SEQ ID NO: 31238 - protein, 138 aa, Zea mays subsp. mays
  peptide (1)..(138): Ceres Seq. ID no. 13496188
  misc_feature (73)..(101): Pfam Name: Pfam Description:  EF hand
  misc_feature (1)..(103): NCBI GI NO: 34895640 NR Description: OSJNBa0083M16.33
  misc_feature (1)..(107): NCBI GI NO: 19386815 NR Description: B1147A04.10
  misc_feature (33)..(97): NCBI GI NO: 6901654 NR Description: calcium-binding protein [Olea europaea]
  misc_feature (33)..(97): NCBI GI NO: 14423648 NR Description: Calcium-binding allergen Ole e 8 (PCA18/PCA23)
  misc_feature (33)..(104): NCBI GI NO: 14423843 NR Description: Polcalcin Jun o 2
  misc_feature (33)..(97): NCBI GI NO: 14589311 NR Description: calcium binding protein [Sesbania rostrata]
  misc_feature (33)..(103): NCBI GI NO: 15240340 NR Description: calmodulin-related protein 2, touch-induced (TCH2)
  misc_feature (36)..(103): NCBI GI NO: 13397927 NR Description: putative calmodulin-related protein
  misc_feature (33)..(94): NCBI GI NO: 15221030 NR Description: calcium-binding protein, putative
  misc_feature (33)..(96): NCBI GI NO: 18408502 NR Description: calmodulin-related protein, putative
MSSSASKKQAQAQKAGRRPPAVSSAAAAAADAEMQRVFSRIDADGDGRISPSELAAVSRAISPPASSSHGRREVAAMMEELDTDRDGFVDLGEFRAFHARGGGVVAAAVIAAAAPVSFVSPSSSVRDSAREARVWTPK

SEQ ID NO: 31239 - DNA, 1768 bp, Zea mays subsp. mays
  misc_feature (1)..(1768): Ceres Seq. ID no. 12416821
ctttagagaaggtgtacccccaatattccattaccggcccactgacgagagagagagagagagattttggcgtgactatccagagtccccaatcttacacctaaaaactcttctcagctaccggtgcggcatatcgcccctatcggcggcgaacatttgagttctcgcgacgtgtcctcgaggattctgtggtggaagatcggatcttttgctgcgggttccagttgccaaccagagatgtcggctctcctcgatctactgatggggatctttcgccagcagaccctcggcggcgccgccctggagctcgccgcgctggcggcgccgctctcgctcgccgccctcgtcggccttctcatcgggtgggcatggcgcccgaggtgggcgggggtcgtcgtcttcgacaacgcccaacagatggcgcagctccccgcggcggcggcgcctccggaccgcgccaccgccaccaccaccgcggtggtatctcgcaacgaggcggccgccgtcgtaccgagaactgtggtggctcatgcggcggccgaggacgagcagcagcagctggcggtcaacaccggtgacttgattcacctctggcggctcgtcgacgagaaggacggtggcccgtcgtggattcacatgatggaccgcaccttaccaaccatgaggtaccaagcctggcggagagacccaccgagtggtccaccacagtaccgcagcagcacaatcttggaagatgcgtcaccagaggttgtgagagatttcttctgggacgacgagttccggatgaacaacagctgggacgacatgcttcttcagcacgagacgctggaggagtgcaccgagactggaaccatggttgtccggtgggtcaggaagttcccgttcttctgcagcgacagggagtacatcataggccgcaggatatgggcgtctgggaagacattttactgtgtgaccaagggtgttcctcgtccctccgttccaagacaaaacaaacctcgccgtgtggacttgtactactctagctggtgcatccgtccagttgagtcgagaaaaggcgacggtgcaatgagtgcatgcgaggtgctcttgttccaccacgaggacatggggattccatgggagatcgcgaagcttggcgtccggcaggggatgtggggctgcgtcaagaggatagagcctggccttcgggcgtaccaggttgggaggaccgccggagaggctgtttccaagtgtgctgccatggcacaggtcaccaccaggttcagtgccgacgagctcgtcatcgcagggccgggcaacacggaggccagttcttcttcgtccggcgacggcgcagaggttgacaaggcgacgaagcactgggcgaacagcatacccaaggttctcatggtcggtggcgctgtggccctggcctgctgcaccttcgacggtgggttgttgaccaaggccgtcatcttcggcactgccaggaggtttgcaggagggccaggaaggcggtaggtacggtgtaacggtggacggaaagatccagcggcacaacacaaaacaagtgttgctgcactgcagcccgctgcgggttaataggttagaaatatagcatttgttacgaggaaacatagaagtattatgcaagaaaaccgctgttagataagaaatacactgctgtgtattagtagttaataacaagagttcttggtttttgtatgtaaccatattgtggatcggatccattgttcttccccatggacactactactaccagtct

SEQ ID NO: 31240 - protein, 421 aa, Zea mays subsp. mays
  peptide (1)..(421): Ceres Seq. ID no. 12416822
  misc_feature (158)..(239): Pfam Name: Pfam Description:  START domain
  misc_feature (1)..(421): NCBI GI NO: 38344869 NR Description: OSJNBa0020P07.12
  misc_feature (110)..(415): NCBI GI NO: 15217736 NR Description: membrane related protein CP5, putative
  misc_feature (23)..(50): NCBI GI NO: 15217736 NR Description: membrane related protein CP5, putative
  misc_feature (110)..(415): NCBI GI NO: 22135902 NR Description: membrane related protein CP5, putative
  misc_feature (23)..(50): NCBI GI NO: 22135902 NR Description: membrane related protein CP5, putative
  misc_feature (110)..(415): NCBI GI NO: 4741929 NR Description: membrane related protein CP5
  misc_feature (23)..(50): NCBI GI NO: 4741929 NR Description: membrane related protein CP5
  misc_feature (100)..(421): NCBI GI NO: 18033654 NR Description: putative nodule membrane protein [Medicago sativa]
  misc_feature (95)..(421): NCBI GI NO: 18423599 NR Description: membrane related protein-like
  misc_feature (33)..(66): NCBI GI NO: 18423599 NR Description: membrane related protein-like
MSALLDLLMGIFRQQTLGGAALELAALAAPLSLAALVGLLIGWAWRPRWAGVVVFDNAQQMAQLPAAAAPPDRATATTTAVVSRNEAAAVVPRTVVAHAAAEDEQQQLAVNTGDLIHLWRLVDEKDGGPSWIHMMDRTLPTMRYQAWRRDPPSGPPQYRSSTILEDASPEVVRDFFWDDEFRMNNSWDDMLLQHETLEECTETGTMVVRWVRKFPFFCSDREYIIGRRIWASGKTFYCVTKGVPRPSVPRQNKPRRVDLYYSSWCIRPVESRKGDGAMSACEVLLFHHEDMGIPWEIAKLGVRQGMWGCVKRIEPGLRAYQVGRTAGEAVSKCAAMAQVTTRFSADELVIAGPGNTEASSSSSGDGAEVDKATKHWANSIPKVLMVGGAVALACCTFDGGLLTKAVIFGTARRFAGGPGRR

SEQ ID NO: 31241 - protein, 413 aa, Zea mays subsp. mays
  peptide (1)..(413): Ceres Seq. ID no. 12416823
  misc_feature (150)..(231): Pfam Name: Pfam Description:  START domain
  misc_feature (1)..(413): NCBI GI NO: 38344869 NR Description: OSJNBa0020P07.12
  misc_feature (102)..(407): NCBI GI NO: 15217736 NR Description: membrane related protein CP5, putative
  misc_feature (15)..(42): NCBI GI NO: 15217736 NR Description: membrane related protein CP5, putative
  misc_feature (102)..(407): NCBI GI NO: 22135902 NR Description: membrane related protein CP5, putative
  misc_feature (15)..(42): NCBI GI NO: 22135902 NR Description: membrane related protein CP5, putative
  misc_feature (102)..(407): NCBI GI NO: 4741929 NR Description: membrane related protein CP5
  misc_feature (15)..(42): NCBI GI NO: 4741929 NR Description: membrane related protein CP5
  misc_feature (92)..(413): NCBI GI NO: 18033654 NR Description: putative nodule membrane protein [Medicago sativa]
  misc_feature (87)..(413): NCBI GI NO: 18423599 NR Description: membrane related protein-like
  misc_feature (25)..(58): NCBI GI NO: 18423599 NR Description: membrane related protein-like
MGIFRQQTLGGAALELAALAAPLSLAALVGLLIGWAWRPRWAGVVVFDNAQQMAQLPAAAAPPDRATATTTAVVSRNEAAAVVPRTVVAHAAAEDEQQQLAVNTGDLIHLWRLVDEKDGGPSWIHMMDRTLPTMRYQAWRRDPPSGPPQYRSSTILEDASPEVVRDFFWDDEFRMNNSWDDMLLQHETLEECTETGTMVVRWVRKFPFFCSDREYIIGRRIWASGKTFYCVTKGVPRPSVPRQNKPRRVDLYYSSWCIRPVESRKGDGAMSACEVLLFHHEDMGIPWEIAKLGVRQGMWGCVKRIEPGLRAYQVGRTAGEAVSKCAAMAQVTTRFSADELVIAGPGNTEASSSSSGDGAEVDKATKHWANSIPKVLMVGGAVALACCTFDGGLLTKAVIFGTARRFAGGPGRR

SEQ ID NO: 31242 - protein, 361 aa, Zea mays subsp. mays
  peptide (1)..(361): Ceres Seq. ID no. 12416824
  misc_feature (98)..(179): Pfam Name: Pfam Description:  START domain
  misc_feature (1)..(361): NCBI GI NO: 38344869 NR Description: OSJNBa0020P07.12
  misc_feature (50)..(355): NCBI GI NO: 15217736 NR Description: membrane related protein CP5, putative
  misc_feature (50)..(355): NCBI GI NO: 22135902 NR Description: membrane related protein CP5, putative
  misc_feature (50)..(355): NCBI GI NO: 4741929 NR Description: membrane related protein CP5
  misc_feature (40)..(361): NCBI GI NO: 18033654 NR Description: putative nodule membrane protein [Medicago sativa]
  misc_feature (35)..(361): NCBI GI NO: 18423599 NR Description: membrane related protein-like
  misc_feature (35)..(361): NCBI GI NO: 21593272 NR Description: membrane related protein-like
  misc_feature (1)..(361): NCBI GI NO: 10178166 NR Description: membrane related protein-like
  misc_feature (15)..(355): NCBI GI NO: 18414239 NR Description: expressed protein; protein id: At4g14500
  misc_feature (1)..(11): NCBI GI NO: 18414239 NR Description: expressed protein; protein id: At4g14500
MAQLPAAAAPPDRATATTTAVVSRNEAAAVVPRTVVAHAAAEDEQQQLAVNTGDLIHLWRLVDEKDGGPSWIHMMDRTLPTMRYQAWRRDPPSGPPQYRSSTILEDASPEVVRDFFWDDEFRMNNSWDDMLLQHETLEECTETGTMVVRWVRKFPFFCSDREYIIGRRIWASGKTFYCVTKGVPRPSVPRQNKPRRVDLYYSSWCIRPVESRKGDGAMSACEVLLFHHEDMGIPWEIAKLGVRQGMWGCVKRIEPGLRAYQVGRTAGEAVSKCAAMAQVTTRFSADELVIAGPGNTEASSSSSGDGAEVDKATKHWANSIPKVLMVGGAVALACCTFDGGLLTKAVIFGTARRFAGGPGRR

SEQ ID NO: 31243 - DNA, 533 bp, Zea mays subsp. mays
  misc_feature (1)..(533): Ceres Seq. ID no. 12348236
ctagctgatgaattgagagcaacggtcgcagatgaatttgtcaagaggcggaaagagaccgaatggttcgttgagggggattttgatacatatgtatcccatattagggagccacatgtgtggggaggcgagccagaattgttcatggcgtcccatgttcttcagatgccaataacggtttacatgcgcgacgaggatgctggcggtctgatagcaatcgcagagtatggccagcagtatggtaaagaagacccaatccaagtcctgtatcatggttttggccattacgacgcactacagatcccagcaaaggttggttcgaagaggaaactgtagacgccggcgtgagcttgaggtacgctccttgttccagtgtttatacaaccttgtcgaacacactcatgctatatgcatgcgagtgcggaagaagacagcttaacatgaaatggcgttagttcgcgccatgcataaatgttattacatgattcatgtacttccccaggagcagatgagttggaacagagcatcacttc

SEQ ID NO: 31244 - protein, 111 aa, Zea mays subsp. mays
  peptide (1)..(111): Ceres Seq. ID no. 12348237
  misc_feature (1)..(111): NCBI GI NO: 11280708 NR Description: hypothetical protein T10K17
  misc_feature (1)..(111): NCBI GI NO: 18410816 NR Description: auxin-regulated protein; protein id: At3g57810
  misc_feature (62)..(111): NCBI GI NO: 32031109 NR Description: hypothetical protein [Haemophilus somnus 2336]
LADELRATVADEFVKRRKETEWFVEGDFDTYVSHIREPHVWGGEPELFMASHVLQMPITVYMRDEDAGGLIAIAEYGQQYGKEDPIQVLYHGFGHYDALQIPAKVGSKRKL

SEQ ID NO: 31245 - protein, 70 aa, Zea mays subsp. mays
  peptide (1)..(70): Ceres Seq. ID no. 12348238
MASSMVKKTQSKSCIMVLAITTHYRSQQRLVRRGNCRRRRELEVRSLFQCLYNLVEHTHAICMRVRKKTA

SEQ ID NO: 31246 - protein, 66 aa, Zea mays subsp. mays
  peptide (1)..(66): Ceres Seq. ID no. 12348239
MVKKTQSKSCIMVLAITTHYRSQQRLVRRGNCRRRRELEVRSLFQCLYNLVEHTHAICMRVRKKTA

SEQ ID NO: 31247 - protein, 63 aa, Zea mays subsp. mays
  peptide (1)..(63): Ceres Seq. ID no. 12348240
  misc_feature (1)..(63): NCBI GI NO: 11280708 NR Description: hypothetical protein T10K17
  misc_feature (1)..(63): NCBI GI NO: 18410816 NR Description: auxin-regulated protein; protein id: At3g57810
  misc_feature (14)..(63): NCBI GI NO: 32031109 NR Description: hypothetical protein [Haemophilus somnus 2336]
MASHVLQMPITVYMRDEDAGGLIAIAEYGQQYGKEDPIQVLYHGFGHYDALQIPAKVGSKRKL

SEQ ID NO: 31248 - DNA, 1246 bp, Zea mays subsp. mays
  misc_feature (1)..(1246): Ceres Seq. ID no. 12416638
acgccaccggaccggaaacgcgaagcagccccacactgcccacgcggacacgctctgcaccaccacctgccggccgttgccgggctcccggctcgccgccgccgttgcgccctcgcgctcacacctccgccagcccaggtccatcgagcggagaaacccatggccccctcgccgatcctcgtccggccgccggcgctggcgaattcaccccttccgcctccccgatgcgtggccgcggtagcagcggcgccggcggttcggacggctccggcggccccattctctaggctccgtaccaagtgtaggttcgccgcatcggatgtgagagaagactactcttctactccgatagatattgtcgctgatgttaagacggagaagattgtggtgttaggaggaagtggattcgttggttctgcaatttgcagagctgctgtatctaaaggcattgaggttgtgagcttcagcaggtcaggaagaccatcttactctgattcctgggttgatcaagtcaattggctgccaggagatgttttctatgcaagatgggatgaagtattggttggggctactgctgttgtgtctacccttggagggtttggcaatgaagaacaaatgaaaaggataaatggtgaggcaaatgtcatagcagtaaatgctgcaaaagaatatggagtcccaaaattcattttaatctccgtccatgactacaaccttccatcctttcttcttacatcgggttacttcactggcaagagaaaggcagaatctgaagtcctttccaaatacccagcctcgggtgtcgtgttgaggccaggcttcatttacggtaaaaggaaagtaaatggcttcgaggtaccactcgacgctgtcggagaaccattggagaagttgctctcctctgtcgaaaacttcaccaagccgttgagctcgctgcctgcctctgacctaatccttgcaccccctgtgagcgtggatgatgttgcctatgctgtaatcaacggagtcatagacgacagcttctttggggtgttcacgattgaacagatcaaggaagccgcgtccaaggtacgagtgtgaacccggggtcttgttccacaatctctgaacgtgtgttgtaggtggaaagttcataaacttagcagtaactcattgatccttgtgttctttatttctcgctgaattttgaccatagtcaaccgttcaaaagtcagtgcagcattcttttttctgctggaatctcttg

SEQ ID NO: 31249 - protein, 359 aa, Zea mays subsp. mays
  peptide (1)..(359): Ceres Seq. ID no. 12416639
  misc_feature (54)..(359): NCBI GI NO: 38346147 NR Description: OSJNBb0118P14.7
  misc_feature (100)..(358): NCBI GI NO: 18398333 NR Description: expressed protein; protein id: At1g32220
  misc_feature (125)..(341): NCBI GI NO: 18416362 NR Description: putative protein; protein id: At5g10730
  misc_feature (124)..(350): NCBI GI NO: 18417824 NR Description: putative protein; protein id: At5g15910
  misc_feature (124)..(350): NCBI GI NO: 21592373 NR Description: unknown [Arabidopsis thaliana]
  misc_feature (125)..(341): NCBI GI NO: 10129651 NR Description: putative protein [Arabidopsis thaliana]
  misc_feature (206)..(350): NCBI GI NO: 11346175 NR Description: hypothetical protein F1N13_50 - Arabidopsisthaliana
  misc_feature (190)..(333): NCBI GI NO: 8744993 NR Description: hypothetical protein P1295.07 [Leishmania major]
  misc_feature (126)..(161): NCBI GI NO: 8744993 NR Description: hypothetical protein P1295.07 [Leishmania major]
  misc_feature (127)..(324): NCBI GI NO: 23037289 NR Description: hypothetical protein [Oenococcus oeni MCW]
TPPDRKREAAPHCPRGHALHHHLPAVAGLPARRRRCALALTPPPAQVHRAEKPMAPSPILVRPPALANSPLPPPRCVAAVAAAPAVRTAPAAPFSRLRTKCRFAASDVREDYSSTPIDIVADVKTEKIVVLGGSGFVGSAICRAAVSKGIEVVSFSRSGRPSYSDSWVDQVNWLPGDVFYARWDEVLVGATAVVSTLGGFGNEEQMKRINGEANVIAVNAAKEYGVPKFILISVHDYNLPSFLLTSGYFTGKRKAESEVLSKYPASGVVLRPGFIYGKRKVNGFEVPLDAVGEPLEKLLSSVENFTKPLSSLPASDLILAPPVSVDDVAYAVINGVIDDSFFGVFTIEQIKEAASKVRV

SEQ ID NO: 31250 - protein, 306 aa, Zea mays subsp. mays
  peptide (1)..(306): Ceres Seq. ID no. 12416640
  misc_feature (1)..(306): NCBI GI NO: 38346147 NR Description: OSJNBb0118P14.7
  misc_feature (47)..(305): NCBI GI NO: 18398333 NR Description: expressed protein; protein id: At1g32220
  misc_feature (72)..(288): NCBI GI NO: 18416362 NR Description: putative protein; protein id: At5g10730
  misc_feature (71)..(297): NCBI GI NO: 18417824 NR Description: putative protein; protein id: At5g15910
  misc_feature (71)..(297): NCBI GI NO: 21592373 NR Description: unknown [Arabidopsis thaliana]
  misc_feature (72)..(288): NCBI GI NO: 10129651 NR Description: putative protein [Arabidopsis thaliana]
  misc_feature (153)..(297): NCBI GI NO: 11346175 NR Description: hypothetical protein F1N13_50 - Arabidopsisthaliana
  misc_feature (137)..(280): NCBI GI NO: 8744993 NR Description: hypothetical protein P1295.07 [Leishmania major]
  misc_feature (73)..(108): NCBI GI NO: 8744993 NR Description: hypothetical protein P1295.07 [Leishmania major]
  misc_feature (74)..(271): NCBI GI NO: 23037289 NR Description: hypothetical protein [Oenococcus oeni MCW]
MAPSPILVRPPALANSPLPPPRCVAAVAAAPAVRTAPAAPFSRLRTKCRFAASDVREDYSSTPIDIVADVKTEKIVVLGGSGFVGSAICRAAVSKGIEVVSFSRSGRPSYSDSWVDQVNWLPGDVFYARWDEVLVGATAVVSTLGGFGNEEQMKRINGEANVIAVNAAKEYGVPKFILISVHDYNLPSFLLTSGYFTGKRKAESEVLSKYPASGVVLRPGFIYGKRKVNGFEVPLDAVGEPLEKLLSSVENFTKPLSSLPASDLILAPPVSVDDVAYAVINGVIDDSFFGVFTIEQIKEAASKVRV

SEQ ID NO: 31251 - DNA, 909 bp, Zea mays subsp. mays; identical to SEQ ID NO: 25383
  misc_feature (1)..(909): Ceres Seq. ID no. 12356120

SEQ ID NO: 31252 - protein, 198 aa, Zea mays subsp. mays; identical to SEQ ID NO: 25384
  peptide (1)..(198): Ceres Seq. ID no. 12356121
  misc_feature (19)..(178): Pfam Name: Pfam Description:  Equine herpesvirus glycoprotein gp2
  misc_feature (11)..(190): NCBI GI NO: 11359723 NR Description: proteophosphoglycan, membrane-associated
  misc_feature (19)..(193): NCBI GI NO: 32699068 NR Description: hypothetical protein FLJ35107 [Homo sapiens]
  misc_feature (1)..(193): NCBI GI NO: 2429362 NR Description: proline rich protein [Santalum album]
  misc_feature (13)..(190): NCBI GI NO: 11359723 NR Description: proteophosphoglycan, membrane-associated
  misc_feature (19)..(193): NCBI GI NO: 32699068 NR Description: hypothetical protein FLJ35107 [Homo sapiens]
  misc_feature (17)..(183): NCBI GI NO: 32699068 NR Description: hypothetical protein FLJ35107 [Homo sapiens]
  misc_feature (11)..(192): NCBI GI NO: 11359723 NR Description: proteophosphoglycan, membrane-associated
  misc_feature (11)..(193): NCBI GI NO: 13592175 NR Description: ppg3 [Leishmania major]
  misc_feature (11)..(190): NCBI GI NO: 13592175 NR Description: ppg3 [Leishmania major]
  misc_feature (11)..(190): NCBI GI NO: 13592175 NR Description: ppg3 [Leishmania major]

SEQ ID NO: 31253 - protein, 190 aa, Zea mays subsp. mays; identical to SEQ ID NO: 25385
  peptide (1)..(190): Ceres Seq. ID no. 12356122
  misc_feature (29)..(168): Pfam Name: Pfam Description:  Protein of unknown function, DUF538
  misc_feature (13)..(170): NCBI GI NO: 18411923 NR Description: coded for by A
  misc_feature (13)..(170): NCBI GI NO: 21554037 NR Description: unknown [Arabidopsis thaliana]
  misc_feature (29)..(168): NCBI GI NO: 18379014 NR Description: Expressed protein; protein id: At1g02816
  misc_feature (39)..(173): NCBI GI NO: 15235335 NR Description: putative protein; protein id: At4g02360.1
  misc_feature (23)..(168): NCBI GI NO: 18379012 NR Description: Expressed protein; protein id: At1g02813
  misc_feature (23)..(168): NCBI GI NO: 21553750 NR Description: unknown [Arabidopsis thaliana]

SEQ ID NO: 31254 - protein, 173 aa, Zea mays subsp. mays; identical to SEQ ID NO: 25386
  peptide (1)..(173): Ceres Seq. ID no. 12356123
  misc_feature (12)..(151): Pfam Name: Pfam Description:  Protein of unknown function, DUF538
  misc_feature (1)..(153): NCBI GI NO: 18411923 NR Description: coded for by A
  misc_feature (1)..(153): NCBI GI NO: 21554037 NR Description: unknown [Arabidopsis thaliana]
  misc_feature (12)..(151): NCBI GI NO: 18379014 NR Description: Expressed protein; protein id: At1g02816
  misc_feature (22)..(156): NCBI GI NO: 15235335 NR Description: putative protein; protein id: At4g02360.1
  misc_feature (6)..(151): NCBI GI NO: 18379012 NR Description: Expressed protein; protein id: At1g02813
  misc_feature (6)..(151): NCBI GI NO: 21553750 NR Description: unknown [Arabidopsis thaliana]

SEQ ID NO: 31255 - DNA, 1283 bp, Zea mays subsp. mays
  misc_feature (1)..(1283): Ceres Seq. ID no. 13494816
aaaacaccgattcgtttccccttggcacctggcgccctgtcgccttcgaaaaacagccgccgccgtcgcccgtcccggatccgacggcccccgctccttcgtctagtatttatactagtgccttgccggcgctgctcctgttgcctctcgcatttgcccacgcccgcagcgcctcgcctcggctgctctacctctatcccgcgacccgcgagatcggaatcgcggcgccccgccgccctcctccaaaatggcaccgtctctgctcggggggttcaccaagtcgttggccatgacggtgctctccgagatcggggacaagaccttcttcgccgccgcgattctggctatgcgccatcccaggaaactcgtattggcaggctgtttaactgcactaatagtcatgacagctctatcggcttctctaggttgggttgcaccaaatctgatttcacgtaaatggactcatcatttgaccactctattgttctttctatttggcatttggtcattgtgggaaggcttcaaggaagatgggtaccgagattcggaagaattggctgaagttgaagcagagctggatgctgcctttaagagtaataaaggtgaatctaaaaataaatttaaggcgaatgatgatatgaagaaacagcaaagaccatttctcatgcagttcttctcaccaatttttctgaaggcattttctattacattctttggtgagtggggtgacaagagccagattgctacaattggcttggctgctgatgaaaacccgttcggtgttgtcctgggtggaatcatagcgcaagcactctgcactactgctgccgttcttggtggaaagagcctagcgtcccagatatctgagaagatggttgaactgtcaagcggagtgctcttcctgctcttcggtatcatgtccttactctctggaccagaaggagaattgtaatccctgcttgagcctttttcagctagctgattaacatggctttctcttcttagacctatcttatttcagtacatgaatgatggcaacgaaagccatccatccatggcgaacaggatggtgatttaacagtttagccgacacgctgtaaacatttcagtcgcccttcaaaaattactacatgttacagaagtctgtagcgattgtatatttgtattctgtcgtgcccagcacgtgaaattttgttatcgcaattacatgcgttaacaaagctttgttcgtgaaccaagtattcaggcaattaatatggggcttatagcaggcctttgtcttt

SEQ ID NO: 31256 - protein, 234 aa, Zea mays subsp. mays
  peptide (1)..(234): Ceres Seq. ID no. 13494817
  misc_feature (9)..(84): Pfam Name: Pfam Description:  Uncharacterized protein family UPF0016
  misc_feature (4)..(228): NCBI GI NO: 15221462 NR Description: transmembrane protein -related
  misc_feature (4)..(231): NCBI GI NO: 15222613 NR Description: transmembrane protein -related
  misc_feature (4)..(231): NCBI GI NO: 21593636 NR Description: transmembrane protein, putative
  misc_feature (1)..(231): NCBI GI NO: 6755853 NR Description: TPA regulated locus [Mus musculus]
  misc_feature (1)..(231): NCBI GI NO: 7684611 NR Description: TPARDL [Mus musculus]
  misc_feature (1)..(231): NCBI GI NO: 21357589 NR Description: CG4196-PC [Drosophila melanogaster]
  misc_feature (1)..(174): NCBI GI NO: 34877387 NR Description: similar to probable transmembrane protein FT27 -mouse
  misc_feature (170)..(231): NCBI GI NO: 34877387 NR Description: similar to probable transmembrane protein FT27 -mouse
  misc_feature (4)..(226): NCBI GI NO: 17556152 NR Description: Uncharacterized protein family UPF0016 (32.1 kD)
  misc_feature (2)..(230): NCBI GI NO: 18421551 NR Description: transmembrane protein FT27/PFT27-related
MAPSLLGGFTKSLAMTVLSEIGDKTFFAAAILAMRHPRKLVLAGCLTALIVMTALSASLGWVAPNLISRKWTHHLTTLLFFLFGIWSLWEGFKEDGYRDSEELAEVEAELDAAFKSNKGESKNKFKANDDMKKQQRPFLMQFFSPIFLKAFSITFFGEWGDKSQIATIGLAADENPFGVVLGGIIAQALCTTAAVLGGKSLASQISEKMVELSSGVLFLLFGIMSLLSGPEGEL

SEQ ID NO: 31257 - protein, 220 aa, Zea mays subsp. mays
  peptide (1)..(220): Ceres Seq. ID no. 13494818
  misc_feature (1)..(70): Pfam Name: Pfam Description:  Uncharacterized protein family UPF0016
  misc_feature (1)..(214): NCBI GI NO: 15221462 NR Description: transmembrane protein -related
  misc_feature (1)..(217): NCBI GI NO: 15222613 NR Description: transmembrane protein -related
  misc_feature (1)..(217): NCBI GI NO: 21593636 NR Description: transmembrane protein, putative
  misc_feature (1)..(217): NCBI GI NO: 6755853 NR Description: TPA regulated locus [Mus musculus]
  misc_feature (1)..(217): NCBI GI NO: 7684611 NR Description: TPARDL [Mus musculus]
  misc_feature (1)..(217): NCBI GI NO: 21357589 NR Description: CG4196-PC [Drosophila melanogaster]
  misc_feature (1)..(160): NCBI GI NO: 34877387 NR Description: similar to probable transmembrane protein FT27 -mouse
  misc_feature (156)..(217): NCBI GI NO: 34877387 NR Description: similar to probable transmembrane protein FT27 -mouse
  misc_feature (1)..(212): NCBI GI NO: 17556152 NR Description: Uncharacterized protein family UPF0016 (32.1 kD)
  misc_feature (1)..(216): NCBI GI NO: 18421551 NR Description: transmembrane protein FT27/PFT27-related
MTVLSEIGDKTFFAAAILAMRHPRKLVLAGCLTALIVMTALSASLGWVAPNLISRKWTHHLTTLLFFLFGIWSLWEGFKEDGYRDSEELAEVEAELDAAFKSNKGESKNKFKANDDMKKQQRPFLMQFFSPIFLKAFSITFFGEWGDKSQIATIGLAADENPFGVVLGGIIAQALCTTAAVLGGKSLASQISEKMVELSSGVLFLLFGIMSLLSGPEGEL

SEQ ID NO: 31258 - protein, 201 aa, Zea mays subsp. mays
  peptide (1)..(201): Ceres Seq. ID no. 13494819
  misc_feature (1)..(51): Pfam Name: Pfam Description:  Uncharacterized protein family UPF0016
  misc_feature (1)..(195): NCBI GI NO: 15221462 NR Description: transmembrane protein -related
  misc_feature (1)..(198): NCBI GI NO: 15222613 NR Description: transmembrane protein -related
  misc_feature (1)..(198): NCBI GI NO: 21593636 NR Description: transmembrane protein, putative
  misc_feature (1)..(198): NCBI GI NO: 6755853 NR Description: TPA regulated locus [Mus musculus]
  misc_feature (1)..(198): NCBI GI NO: 7684611 NR Description: TPARDL [Mus musculus]
  misc_feature (1)..(198): NCBI GI NO: 21357589 NR Description: CG4196-PC [Drosophila melanogaster]
  misc_feature (1)..(141): NCBI GI NO: 34877387 NR Description: similar to probable transmembrane protein FT27 -mouse
  misc_feature (137)..(198): NCBI GI NO: 34877387 NR Description: similar to probable transmembrane protein FT27 -mouse
  misc_feature (1)..(193): NCBI GI NO: 17556152 NR Description: Uncharacterized protein family UPF0016 (32.1 kD)
  misc_feature (1)..(197): NCBI GI NO: 18421551 NR Description: transmembrane protein FT27/PFT27-related
MRHPRKLVLAGCLTALIVMTALSASLGWVAPNLISRKWTHHLTTLLFFLFGIWSLWEGFKEDGYRDSEELAEVEAELDAAFKSNKGESKNKFKANDDMKKQQRPFLMQFFSPIFLKAFSITFFGEWGDKSQIATIGLAADENPFGVVLGGIIAQALCTTAAVLGGKSLASQISEKMVELSSGVLFLLFGIMSLLSGPEGEL

SEQ ID NO: 31259 - DNA, 1693 bp, Zea mays subsp. mays; identical to SEQ ID NO: 29053
  misc_feature (1)..(1693): Ceres Seq. ID no. 13498349

SEQ ID NO: 31260 - protein, 208 aa, Zea mays subsp. mays; identical to SEQ ID NO: 29054
  peptide (1)..(208): Ceres Seq. ID no. 13498350
  misc_feature (1)..(91): NCBI GI NO: 34899270 NR Description: putative zinc-finger protein
  misc_feature (1)..(11): NCBI GI NO: 34899270 NR Description: putative zinc-finger protein
  misc_feature (1)..(93): NCBI GI NO: 7522220 NR Description: zinc-finger protein C60910 [imported] - rice

SEQ ID NO: 31261 - protein, 206 aa, Zea mays subsp. mays; identical to SEQ ID NO: 29055
  peptide (1)..(206): Ceres Seq. ID no. 13498351
  misc_feature (12)..(58): Pfam Name: Pfam Description:  B-box zinc finger
  misc_feature (3)..(69): NCBI GI NO: 34899270 NR Description: putative zinc-finger protein
  misc_feature (1)..(111): NCBI GI NO: 7522220 NR Description: zinc-finger protein C60910 [imported] - rice
  misc_feature (9)..(79): NCBI GI NO: 38175538 NR Description: zinc-finger protein C60910-like
  misc_feature (11)..(62): NCBI GI NO: 30685731 NR Description: CONSTANS B-box zinc finger family protein
  misc_feature (1)..(102): NCBI GI NO: 34898680 NR Description: Hd1 [Oryza sativa (japonica cultivar-group)]
  misc_feature (1)..(81): NCBI GI NO: 11094209 NR Description: allele:Hd1 [Oryza sativa]
  misc_feature (16)..(111): NCBI GI NO: 15231491 NR Description: CONSTANS B-box zinc finger family protein
  misc_feature (16)..(68): NCBI GI NO: 7489605 NR Description: zinc-finger protein S3574 [imported] - rice
  misc_feature (8)..(85): NCBI GI NO: 21667479 NR Description: CONSTANS-like protein
  misc_feature (8)..(85): NCBI GI NO: 21667483 NR Description: CONSTANS-like protein

SEQ ID NO: 31262 - protein, 185 aa, Zea mays subsp. mays; identical to SEQ ID NO: 29056
  peptide (1)..(185): Ceres Seq. ID no. 13498352
  misc_feature (1)..(37): Pfam Name: Pfam Description:  B-box zinc finger
  misc_feature (1)..(48): NCBI GI NO: 34899270 NR Description: putative zinc-finger protein
  misc_feature (1)..(90): NCBI GI NO: 7522220 NR Description: zinc-finger protein C60910 [imported] - rice
  misc_feature (1)..(58): NCBI GI NO: 38175538 NR Description: zinc-finger protein C60910-like
  misc_feature (1)..(41): NCBI GI NO: 30685731 NR Description: CONSTANS B-box zinc finger family protein
  misc_feature (1)..(81): NCBI GI NO: 34898680 NR Description: Hd1 [Oryza sativa (japonica cultivar-group)]
  misc_feature (1)..(60): NCBI GI NO: 11094209 NR Description: allele:Hd1 [Oryza sativa]
  misc_feature (1)..(90): NCBI GI NO: 15231491 NR Description: CONSTANS B-box zinc finger family protein
  misc_feature (1)..(47): NCBI GI NO: 7489605 NR Description: zinc-finger protein S3574 [imported] - rice
  misc_feature (1)..(64): NCBI GI NO: 21667479 NR Description: CONSTANS-like protein
  misc_feature (1)..(64): NCBI GI NO: 21667483 NR Description: CONSTANS-like protein

SEQ ID NO: 31263 - DNA, 1867 bp, Zea mays subsp. mays
  misc_feature (1)..(1867): Ceres Seq. ID no. 12374910
gtccatggtatgcgcgggaacctcccgtctctcgccgcggccagtaatggcgtcgctctccctctgtccttcttccacacgaagcagctccacgcgcgcctcatcgtcgcatccccctcctccgcctctggccctgcctacctccgcctcctagtgctccgctcctatgctgcccgcggagacctttcctccgcccgccgcctgctggacgaggctccccgcccggcctcgccgcttctctacaacgccctaatccgcgcgcacgcccgccgtctcgaccttccagccgggctcgcgcttttcgcccgcatgcgctgctccgccactccgcccgacgcgcacaccttcgcctgcgtcctccgcgcctgcgctgaatcctcgcgcccggatgctgttaaggtcgttcatggtatcgctacaacatgcggtatgtgctcccgtccgattgtcctgagctcgcttgtcagtgcgtacgcgaagcttggcctcgtggacaatgctcgcagcttgttcgatggattgtgtgagccggacttggtcatttggaactccatgatgtccgcatatgggtaccaagggatgtggtatgatggtctacagatgttctccttaatgcggagagctgggcagcatccggatgggtattcaatggttagcttagtctcatgcttctggaatccggaaatacttgcatttggtcaagcagttcatggaatatgtgtcaagggaggttatgactctggacaccatgtgagaagcacacttgtgtcaatgtacatgaggtgtgggtgtgtggaatctggccaaagattgtttggtagcttgcctgatgtggatttgattacctggtcgtcactgattactgggctaatacaaacgggcaagtatgaggaatcatttgatttgttccggaaaatgtgctttacaggtaggaggcccgacagccatattgattgctagtgttctctcggtatttgcttctactgctgctattagctataccaaggaggtccactgttatgcagtcaagcttggagctgatatagacataagagtctcttcttcgctaatggatgcttatgcaaaatgtggtttcactgagctcggatactgggtgttccgccaagtacctaataagaactcagtcatgtacaacacggtcatatcaaaccttgaatctcacgggtttgcaactaaggctattgaagtcctagatgagatggttaatgataagctcaggcctgatagtgctaccttctcctctttacttgctgcttgttgtcatgtggggcacttggaggagggatggaagttgttcaggagaatgagggatgagttcaagatagttgttgaaatggagcactatgtgtacatggtgaggcttcttgcaacatttggccagctgaaggaggcatatgatcttatacagacaatgcaaatccaaccagattgtggtgtgtggggtgcattgctttggggttgttgtgtccatcgtgattctagcttcggcaggattgttgctgaaaagctatgtgaactcaattcagacaaagctgcttacagggttatgctctcaaacatgtatgcctcacaagagatgtggtgggatgctgaggaggttagggatgagttatcaaaagaaaatatgtacaagaacacagggacgagttgggttggtgaagtaaaaaaatgatggttggcatttgtcattgagaaagcatgtcagatatcaagtacatatgaactctatattgttatattctggtagagatgatatcttgtgaaactccaaacatgtactcgttggattttagcttaaccagttttgtactcagtctttccttataatcatgggaggttcatttgc

SEQ ID NO: 31264 - protein, 319 aa, Zea mays subsp. mays
  peptide (1)..(319): Ceres Seq. ID no. 12374911
  misc_feature (107)..(315): NCBI GI NO: 34913768 NR Description: OSJNBa0051H17.34
  misc_feature (212)..(316): NCBI GI NO: 34913768 NR Description: OSJNBa0051H17.34
  misc_feature (11)..(315): NCBI GI NO: 34897084 NR Description: hypothetical protein
  misc_feature (49)..(319): NCBI GI NO: 34903762 NR Description: unnamed protein product
  misc_feature (56)..(314): NCBI GI NO: 15234006 NR Description: putative protein; protein id: At4g18750.1
  misc_feature (4)..(314): NCBI GI NO: 34903762 NR Description: unnamed protein product
  misc_feature (28)..(315): NCBI GI NO: 15233590 NR Description: putative protein; protein id: At4g21300.1
  misc_feature (56)..(315): NCBI GI NO: 34903762 NR Description: unnamed protein product
  misc_feature (28)..(315): NCBI GI NO: 11994419 NR Description: selenium-binding protein-like
  misc_feature (28)..(315): NCBI GI NO: 15230593 NR Description: unknown protein; protein id: At3g12770.1
VHGMRGNLPSLAAASNGVALPLSFFHTKQLHARLIVASPSSASGPAYLRLLVLRSYAARGDLSSARRLLDEAPRPASPLLYNALIRAHARRLDLPAGLALFARMRCSATPPDAHTFACVLRACAESSRPDAVKVVHGIATTCGMCSRPIVLSSLVSAYAKLGLVDNARSLFDGLCEPDLVIWNSMMSAYGYQGMWYDGLQMFSLMRRAGQHPDGYSMVSLVSCFWNPEILAFGQAVHGICVKGGYDSGHHVRSTLVSMYMRCGCVESGQRLFGSLPDVDLITWSSLITGLIQTGKYEESFDLFRKMCFTGRRPDSHIDC

SEQ ID NO: 31265 - protein, 316 aa, Zea mays subsp. mays
  peptide (1)..(316): Ceres Seq. ID no. 12374912
  misc_feature (104)..(312): NCBI GI NO: 34913768 NR Description: OSJNBa0051H17.34
  misc_feature (209)..(313): NCBI GI NO: 34913768 NR Description: OSJNBa0051H17.34
  misc_feature (8)..(312): NCBI GI NO: 34897084 NR Description: hypothetical protein
  misc_feature (46)..(316): NCBI GI NO: 34903762 NR Description: unnamed protein product
  misc_feature (53)..(311): NCBI GI NO: 15234006 NR Description: putative protein; protein id: At4g18750.1
  misc_feature (1)..(311): NCBI GI NO: 34903762 NR Description: unnamed protein product
  misc_feature (25)..(312): NCBI GI NO: 15233590 NR Description: putative protein; protein id: At4g21300.1
  misc_feature (53)..(312): NCBI GI NO: 34903762 NR Description: unnamed protein product
  misc_feature (25)..(312): NCBI GI NO: 11994419 NR Description: selenium-binding protein-like
  misc_feature (25)..(312): NCBI GI NO: 15230593 NR Description: unknown protein; protein id: At3g12770.1
MRGNLPSLAAASNGVALPLSFFHTKQLHARLIVASPSSASGPAYLRLLVLRSYAARGDLSSARRLLDEAPRPASPLLYNALIRAHARRLDLPAGLALFARMRCSATPPDAHTFACVLRACAESSRPDAVKVVHGIATTCGMCSRPIVLSSLVSAYAKLGLVDNARSLFDGLCEPDLVIWNSMMSAYGYQGMWYDGLQMFSLMRRAGQHPDGYSMVSLVSCFWNPEILAFGQAVHGICVKGGYDSGHHVRSTLVSMYMRCGCVESGQRLFGSLPDVDLITWSSLITGLIQTGKYEESFDLFRKMCFTGRRPDSHIDC

SEQ ID NO: 31266 - protein, 268 aa, Zea mays subsp. mays
  peptide (1)..(268): Ceres Seq. ID no. 12374913
  misc_feature (87)..(121): Pfam Name: Pfam Description:  PPR repeat
  misc_feature (18)..(268): NCBI GI NO: 34913768 NR Description: OSJNBa0051H17.34
  misc_feature (21)..(263): NCBI GI NO: 34897084 NR Description: hypothetical protein
  misc_feature (1)..(267): NCBI GI NO: 34903762 NR Description: unnamed protein product
  misc_feature (18)..(267): NCBI GI NO: 15234006 NR Description: putative protein; protein id: At4g18750.1
  misc_feature (21)..(268): NCBI GI NO: 15233590 NR Description: putative protein; protein id: At4g21300.1
  misc_feature (18)..(267): NCBI GI NO: 11994419 NR Description: selenium-binding protein-like
  misc_feature (18)..(267): NCBI GI NO: 15230593 NR Description: unknown protein; protein id: At3g12770.1
  misc_feature (18)..(267): NCBI GI NO: 15220337 NR Description: hypothetical protein; protein id: At1g11290.1
  misc_feature (7)..(261): NCBI GI NO: 34913364 NR Description: hypothetical protein~similar to Arabidopsisthaliana chromosome 4
  misc_feature (23)..(263): NCBI GI NO: 34911728 NR Description: P0707D10.28
MRNHLICSGKCALQVGGPTAILIASVLSVFASTAAISYTKEVHCYAVKLGADIDIRVSSSLMDAYAKCGFTELGYWVFRQVPNKNSVMYNTVISNLESHGFATKAIEVLDEMVNDKLRPDSATFSSLLAACCHVGHLEEGWKLFRRMRDEFKIVVEMEHYVYMVRLLATFGQLKEAYDLIQTMQIQPDCGVWGALLWGCCVHRDSSFGRIVAEKLCELNSDKAAYRVMLSNMYASQEMWWDAEEVRDELSKENMYKNTGTSWVGEVKK

SEQ ID NO: 31267 - DNA, 1168 bp, Zea mays subsp. mays
  misc_feature (1)..(1168): Ceres Seq. ID no. 12367987
gtgtccggtgcgggctgcgagtgacgtgggctaaataaagtgtgcgtcgggtggtaatggtggtggggcccggtgtcagtgcccgcgtccctcgctgctttgccctctccaccctccgccatcaccgccgcggcgtccttctgtaccggatccgtcgcagccaccactccgcagatccgctgggttgacgtccacggagctccggggatgtcgtcctccgcttccagcgtcgagggcgacgccgccggagagttcacggaggtcgtaatcgtgcgtcacggcgagacgtcatggaacgcctcgcgcatcatacagggacacttggatgcagagcttaatgatattggaaggcagcaagctgttgcggttgctcatcgtctttctaaagaagtgaaaccagttgtcatatactcttctgatctgaagcgagcagcagagactgcgcaaacaattgcaagaatttgcaatgtgccaaatgtcgtgttcgatccagcactgagagaaagacacattggagatctgcaaggcatgacgcttcaagatgctgctacagagaggccagaggcatacaaagcttttatgtcccacaagagaaatcaacaagttcctggtggtggagagagtcttgatcaactgtcggagcgatgtgtgtcttttctgtacgacattgttggtaaacacaaaggggagcgagttatcctggtttcacatggcggcaccatcagagagctctacagacacgtgagtcccacgaagccgctccacggcaaaatacacaacacgtcggtgagcgtcatcctcgtgtccgacgccaccggccggtgcatcgtcaagatgtgcggggacgtcagccacctccaggagacgggcgtcctggagaacgccttcggtggcgacaagacctccgcctgagattccaacattcatcacgcgccgagagctctcggcaattatcacgcgccgagtgagcgctcgtttcggccgtctttttttccactgtaccaatcatcctgttgctaccagtagtggtctagcggagaatgatgcacacttccccccgctgggaacgcggcgatttttgctggaacagttgaaggccgagccggggcgaatccttttggcctggccgtgcactgcttgctgaactgcacgtacgcatgtggagctg

SEQ ID NO: 31268 - protein, 234 aa, Zea mays subsp. mays
  peptide (1)..(234): Ceres Seq. ID no. 12367988
  misc_feature (18)..(201): Pfam Name: Pfam Description:  Phosphoglycerate mutase family
  misc_feature (15)..(233): NCBI GI NO: 15229783 NR Description: putative protein; protein id: At3g50520
  misc_feature (15)..(230): NCBI GI NO: 9955567 NR Description: phosphoglycerate mutase-like protein
  misc_feature (15)..(230): NCBI GI NO: 15237633 NR Description: phosphoglycerate mutase - like protein
  misc_feature (15)..(217): NCBI GI NO: 17545218 NR Description: PUTATIVE PHOSPHOGLYCERATE MUTASE 2 PROTEIN
  misc_feature (82)..(230): NCBI GI NO: 26450240 NR Description: putative phosphoglycerate mutase
  misc_feature (6)..(218): NCBI GI NO: 22976134 NR Description: hypothetical protein [Ralstonia metallidurans]
  misc_feature (17)..(221): NCBI GI NO: 33592552 NR Description: probable phosphoglycerate mutase 2
  misc_feature (17)..(221): NCBI GI NO: 33596671 NR Description: probable phosphoglycerate mutase 2
  misc_feature (17)..(218): NCBI GI NO: 15806410 NR Description: phosphoglycerate mutase, putative
  misc_feature (17)..(218): NCBI GI NO: 23021451 NR Description: hypothetical protein
MSSSASSVEGDAAGEFTEVVIVRHGETSWNASRIIQGHLDAELNDIGRQQAVAVAHRLSKEVKPVVIYSSDLKRAAETAQTIARICNVPNVVFDPALRERHIGDLQGMTLQDAATERPEAYKAFMSHKRNQQVPGGGESLDQLSERCVSFLYDIVGKHKGERVILVSHGGTIRELYRHVSPTKPLHGKIHNTSVSVILVSDATGRCIVKMCGDVSHLQETGVLENAFGGDKTSA

SEQ ID NO: 31269 - protein, 127 aa, Zea mays subsp. mays
  peptide (1)..(127): Ceres Seq. ID no. 12367989
  misc_feature (1)..(94): Pfam Name: Pfam Description:  Phosphoglycerate mutase family
  misc_feature (1)..(126): NCBI GI NO: 15229783 NR Description: putative protein; protein id: At3g50520
  misc_feature (1)..(123): NCBI GI NO: 9955567 NR Description: phosphoglycerate mutase-like protein
  misc_feature (1)..(123): NCBI GI NO: 15237633 NR Description: phosphoglycerate mutase - like protein
  misc_feature (1)..(110): NCBI GI NO: 17545218 NR Description: PUTATIVE PHOSPHOGLYCERATE MUTASE 2 PROTEIN
  misc_feature (1)..(123): NCBI GI NO: 26450240 NR Description: putative phosphoglycerate mutase
  misc_feature (1)..(111): NCBI GI NO: 22976134 NR Description: hypothetical protein [Ralstonia metallidurans]
  misc_feature (1)..(114): NCBI GI NO: 33592552 NR Description: probable phosphoglycerate mutase 2
  misc_feature (1)..(114): NCBI GI NO: 33596671 NR Description: probable phosphoglycerate mutase 2
  misc_feature (1)..(111): NCBI GI NO: 15806410 NR Description: phosphoglycerate mutase, putative
  misc_feature (1)..(111): NCBI GI NO: 23021451 NR Description: hypothetical protein
MTLQDAATERPEAYKAFMSHKRNQQVPGGGESLDQLSERCVSFLYDIVGKHKGERVILVSHGGTIRELYRHVSPTKPLHGKIHNTSVSVILVSDATGRCIVKMCGDVSHLQETGVLENAFGGDKTSA

SEQ ID NO: 31270 - DNA, 1157 bp, Zea mays subsp. mays
  misc_feature (1)..(1157): Ceres Seq. ID no. 12367688
aaaacacgactagagtgggtgggagactgggaaagacgagacagcgagacaccactgagacgagagtcagccggcaggtgagacatcgcaggggaaccagctctcaagacggccgacggccggcttgcctacctgctcccatccttcccgagggaccgagaaagataagaaaggcggtggtcaacttgtgtcctgaggtgcccgtagaagcccaaggacaagaaacaaggagaagagtagatctacatctactccaccgatgagcgcgtctcggttcatcaagtgcgtcaccgtgggggacggtgccgtcggaaagacctgcatgctcatctcctacacatccaacactttccccactgactatgttccaactgtgttcgacaacttcagtgccaatgttgtggttgacgggagcactgtcaacttgggtctgtgggatacagcaggacaagaagattacaatagactgcgtccgttgagctatcgtggtgctgatgtttttctgctcgccttttctcttatcagcaaagcaagctatgagaatgtctctaagaagtgggttcctgaattaaggcactatgctcctggcgtgcccataatccttgttgggacaaaacttgatctgcgtgatgataagcagttttttgttgatcaccctggtgctgttccaatttccactgcccagggcgaagagctgaggaagctaattggtgctgccgcctacatcgaatgcagttcaaaaacccagcagaacataaaagcagtgtttgacgcagcaattaaggtggttctccagccaccaaagcaaaagaagaggaagaagaaggtgcagaagggatgcaccattttgtaactacaaacggtagagggcaacagtctggctgcggcgctgctgccaatgataaccatcgcctccttgctgtataatatatcgcctgatcatgccaccagcatgcacaagggagatggtggttttaggatccttgtcctactgtgttgtgtagaccaccgggtgtagttgactgtatctggttgtttgtatgtatggacaagacaaaactagcactgcagatggtatggtaaggcgtaagcaaatacaatatgacactggtccagttccaggaatgaatggaatatgacattggtccgagatttgc

SEQ ID NO: 31271 - protein, 197 aa, Zea mays subsp. mays
  peptide (1)..(197): Ceres Seq. ID no. 12367689
  misc_feature (8)..(179): Pfam Name: Pfam Description:  Ras family
  misc_feature (1)..(197): NCBI GI NO: 11274342 NR Description: RacD protein - maize
  misc_feature (1)..(197): NCBI GI NO: 6822324 NR Description: small GTP binding protein RACDP
  misc_feature (1)..(197): NCBI GI NO: 38524283 NR Description: putative RACD protein
  misc_feature (1)..(197): NCBI GI NO: 14278856 NR Description: Rac-like GTPase 1 [Nicotiana tabacum]
  misc_feature (1)..(197): NCBI GI NO: 15236247 NR Description: Rho1Ps homolog  Rac-like protein
  misc_feature (1)..(197): NCBI GI NO: 2500195 NR Description: RAC-LIKE GTP BINDING PROTEIN RHO1
  misc_feature (1)..(197): NCBI GI NO: 2117168 NR Description: RAC1 [Lotus japonicus]
  misc_feature (1)..(197): NCBI GI NO: 2500199 NR Description: RAC-LIKE GTP BINDING PROTEIN RHO1
  misc_feature (1)..(197): NCBI GI NO: 28393687 NR Description: putative Rho1Ps homolog Rac protein
  misc_feature (1)..(197): NCBI GI NO: 4097583 NR Description: NTGP3 [Nicotiana tabacum]
MSASRFIKCVTVGDGAVGKTCMLISYTSNTFPTDYVPTVFDNFSANVVVDGSTVNLGLWDTAGQEDYNRLRPLSYRGADVFLLAFSLISKASYENVSKKWVPELRHYAPGVPIILVGTKLDLRDDKQFFVDHPGAVPISTAQGEELRKLIGAAAYIECSSKTQQNIKAVFDAAIKVVLQPPKQKKRKKKVQKGCTIL

SEQ ID NO: 31272 - protein, 176 aa, Zea mays subsp. mays
  peptide (1)..(176): Ceres Seq. ID no. 12367690
  misc_feature (1)..(158): Pfam Name: Pfam Description:  Ras family
  misc_feature (1)..(176): NCBI GI NO: 11274342 NR Description: RacD protein - maize
  misc_feature (1)..(176): NCBI GI NO: 6822324 NR Description: small GTP binding protein RACDP
  misc_feature (1)..(176): NCBI GI NO: 38524283 NR Description: putative RACD protein
  misc_feature (1)..(176): NCBI GI NO: 14278856 NR Description: Rac-like GTPase 1 [Nicotiana tabacum]
  misc_feature (1)..(176): NCBI GI NO: 15236247 NR Description: Rho1Ps homolog  Rac-like protein
  misc_feature (1)..(176): NCBI GI NO: 2500195 NR Description: RAC-LIKE GTP BINDING PROTEIN RHO1
  misc_feature (1)..(176): NCBI GI NO: 2117168 NR Description: RAC1 [Lotus japonicus]
  misc_feature (1)..(176): NCBI GI NO: 2500199 NR Description: RAC-LIKE GTP BINDING PROTEIN RHO1
  misc_feature (1)..(176): NCBI GI NO: 28393687 NR Description: putative Rho1Ps homolog Rac protein
  misc_feature (1)..(176): NCBI GI NO: 4097583 NR Description: NTGP3 [Nicotiana tabacum]
MLISYTSNTFPTDYVPTVFDNFSANVVVDGSTVNLGLWDTAGQEDYNRLRPLSYRGADVFLLAFSLISKASYENVSKKWVPELRHYAPGVPIILVGTKLDLRDDKQFFVDHPGAVPISTAQGEELRKLIGAAAYIECSSKTQQNIKAVFDAAIKVVLQPPKQKKRKKKVQKGCTIL

SEQ ID NO: 31273 - DNA, 1019 bp, Zea mays subsp. mays
  misc_feature (1)..(1019): Ceres Seq. ID no. 12369259
atccgttgatcccatcggcttccccttcctcttccccgatccccttcctcccccgatcccatccaattccacttccacaccgcgggcctcgccgccgacgccgacgccgccggccatgtccaagtacggcaccattcccacctcctcctccgcgggcggagggcccgtgcccctcggcggcgcctccccgctcgatttcatctcccgcgccaaggctcggggcgcctcggcgctggcgacgcgccggccctggcgcgagctcgtggacgtccacgccgtcggcctgcccccgagcctcggcgacgcgtacctccgcgtgcgcgccaacctcgcccacttcgccatgaactatgccatcgtcgtcctcgtcgtcgtcttcctctccctcctctggcaccccgtctccctcatcgtattcctcgtctgcatgcttgcctggctcgtcctctacttcctccgcgacgagcccctcgtcctcttcggccgcgtcgtcgccgacggctacgtcctcgccgtgctcgccgtcgtcacgctcgtcctgctcctcctcaccgacgccaccgccaacatcctctcctcgctgctcatcggcctcgtgctcgtcctcgtccacgccgcgctgcacaaggcggaggacaacgccgccgacgaggctgaccgctggtacgcgccggtgtcacagcagccgtcgcactgaggatctgaatgtggccgttctgcgccttggctgtgattctattctgtactccctgtttccgagttcctccagctgcgcaagctgggccatccccatctcatctgcgatgaaaaacctgtccctgttggttgtgattcacctgctgccggttccatgggaagttttggatccagcgacgacgctgggctgttaaacttgttctccacgcccatttctgtgatacgtttaaagcgtctcgttcacgtgtatcaaatccggactgaagtctagtgtacattttgagttggagaaatgtgatgccagggacctgcgttcagatttc

SEQ ID NO: 31274 - protein, 231 aa, Zea mays subsp. mays
  peptide (1)..(231): Ceres Seq. ID no. 12369260
  misc_feature (39)..(220): NCBI GI NO: 34903576 NR Description: P0419B01.1
  misc_feature (39)..(217): NCBI GI NO: 21617895 NR Description: unknown [Arabidopsis thaliana]
  misc_feature (39)..(217): NCBI GI NO: 18400140 NR Description: expressed protein; protein id: At3g13720
  misc_feature (39)..(217): NCBI GI NO: 18405248 NR Description: expressed protein; protein id: At1g55190
  misc_feature (61)..(217): NCBI GI NO: 15231332 NR Description: unknown protein; protein id: At3g13710.1
  misc_feature (61)..(212): NCBI GI NO: 15220814 NR Description: hypothetical protein; protein id: At1g17700.1
  misc_feature (36)..(217): NCBI GI NO: 21594668 NR Description: unknown [Arabidopsis thaliana]
  misc_feature (39)..(219): NCBI GI NO: 15239101 NR Description: putative protein; protein id: At5g05380.1
  misc_feature (39)..(219): NCBI GI NO: 18072825 NR Description: prenylated Rab receptor 2 [Arabidopsis thaliana]
  misc_feature (14)..(212): NCBI GI NO: 40539036 NR Description: putative prenylated rab acceptor protein
SVDPIGFPFLFPDPLPPPIPSNSTSTPRASPPTPTPPAMSKYGTIPTSSSAGGGPVPLGGASPLDFISRAKARGASALATRRPWRELVDVHAVGLPPSLGDAYLRVRANLAHFAMNYAIVVLVVVFLSLLWHPVSLIVFLVCMLAWLVLYFLRDEPLVLFGRVVADGYVLAVLAVVTLVLLLLTDATANILSSLLIGLVLVLVHAALHKAEDNAADEADRWYAPVSQQPSH

SEQ ID NO: 31275 - protein, 193 aa, Zea mays subsp. mays
  peptide (1)..(193): Ceres Seq. ID no. 12369261
  misc_feature (1)..(182): NCBI GI NO: 34903576 NR Description: P0419B01.1
  misc_feature (1)..(179): NCBI GI NO: 21617895 NR Description: unknown [Arabidopsis thaliana]
  misc_feature (1)..(179): NCBI GI NO: 18400140 NR Description: expressed protein; protein id: At3g13720
  misc_feature (1)..(179): NCBI GI NO: 18405248 NR Description: expressed protein; protein id: At1g55190
  misc_feature (23)..(179): NCBI GI NO: 15231332 NR Description: unknown protein; protein id: At3g13710.1
  misc_feature (23)..(174): NCBI GI NO: 15220814 NR Description: hypothetical protein; protein id: At1g17700.1
  misc_feature (1)..(179): NCBI GI NO: 21594668 NR Description: unknown [Arabidopsis thaliana]
  misc_feature (1)..(181): NCBI GI NO: 15239101 NR Description: putative protein; protein id: At5g05380.1
  misc_feature (1)..(181): NCBI GI NO: 18072825 NR Description: prenylated Rab receptor 2 [Arabidopsis thaliana]
  misc_feature (1)..(174): NCBI GI NO: 40539036 NR Description: putative prenylated rab acceptor protein
MSKYGTIPTSSSAGGGPVPLGGASPLDFISRAKARGASALATRRPWRELVDVHAVGLPPSLGDAYLRVRANLAHFAMNYAIVVLVVVFLSLLWHPVSLIVFLVCMLAWLVLYFLRDEPLVLFGRVVADGYVLAVLAVVTLVLLLLTDATANILSSLLIGLVLVLVHAALHKAEDNAADEADRWYAPVSQQPSH

SEQ ID NO: 31276 - protein, 179 aa, Zea mays subsp. mays
  peptide (1)..(179): Ceres Seq. ID no. 12369262
  misc_feature (1)..(106): Pfam Name: Pfam Description:  Equine herpesvirus glycoprotein gp2
  misc_feature (1)..(176): NCBI GI NO: 11359723 NR Description: proteophosphoglycan, membrane-associated
  misc_feature (1)..(151): NCBI GI NO: 13592175 NR Description: ppg3 [Leishmania major]
  misc_feature (1)..(156): NCBI GI NO: 13592175 NR Description: ppg3 [Leishmania major]
  misc_feature (1)..(151): NCBI GI NO: 13592175 NR Description: ppg3 [Leishmania major]
  misc_feature (1)..(106): NCBI GI NO: 23017082 NR Description: hypothetical protein [Thermobifida fusca]
  misc_feature (1)..(89): NCBI GI NO: 5420387 NR Description: proteophosphoglycan [Leishmania major]
  misc_feature (1)..(100): NCBI GI NO: 11359723 NR Description: proteophosphoglycan, membrane-associated
  misc_feature (1)..(156): NCBI GI NO: 13592175 NR Description: ppg3 [Leishmania major]
  misc_feature (1)..(156): NCBI GI NO: 5420387 NR Description: proteophosphoglycan [Leishmania major]
  misc_feature (1)..(80): NCBI GI NO: 2429362 NR Description: proline rich protein [Santalum album]
MPSSSSSSSSSPSSGTPSPSSYSSSACLPGSSSTSSATSPSSSSAASSPTATSSPCSPSSRSSCSSSPTPPPTSSPRCSSASCSSSSTPRCTRRRTTPPTRLTAGTRRCHSSRRTEDLNVAVLRLGCDSILYSLFPSSSSCASWAIPISSAMKNLSLLVVIHLLPVPWEVLDPATTLGC

SEQ ID NO: 31277 - DNA, 1560 bp, Zea mays subsp. mays
  misc_feature (1)..(1560): Ceres Seq. ID no. 12382424
gcaccgtttcccaaaccctccggactcgaacccaacccacgcacccacatcgggagacgagccaggccgagctctagaagagtctccggaaggcccgcatcgtcgatggcggccgagggcagcggcgtccaagagacgttcgaggcgcgggtgaagcgcctgttcgggtcccgcctcttcgacgccgtcccggactcctccttcccgacggcctcctggtccgtggccgcgggcgacgtcgagcgccaccgttggtcgaagccgtcggaggcccgcgacgcggaggaggaggcagcgggggaggccggccgcggggacacgccctgcgtctccgcgttctacgacgccaacgggtgccttcgtggccggaggcgcaggtccaggaaggaggagttcgaggggaacctcgacgacctagatgaagacgaggaggaagacggggagagggagaggaatgcggcagaacaggacgaggaggagggggttagagttaacatcggcctcgaccccactctggatcgggaggaagaggaggacaagtatgacagagaggcctttggcagagaggaggctgctgaccgcgtgtacatgcatgatataatggatgccggcataaacatgagcatcaacagtatagtccctgacctccttgatgattccattgaagaggtgtaccgttttaggaaggatccccgtgcagatatgagggcagcatctccaagactcagagaagatggttctactaaagattgtgattctcactatcccactcaagccaaggatttccccagtgtagttcatacaaagaaagctgtggaggaagtcaatgtaaaacctatactgaagaggaaggagtcacaagctgatttaaaaccaaggaaacgtgtcaggtttgatgctaatgttaaggatagtgagttggatatgtttgaacatgacgaagattctccaacggttcctcaatccatggatgtaatcactgagttggagagcacatctactttgtctgcatctcctggggtccctgactatgtaaggaacccttcaaagtacacccgatacaccctggatgtaccagagtctaatgatggctcgaacaggacagctcttgctgacatgcatgatctgttagcgagatcatacccaaacaggatacattctgagacgcctgttaagattcctagctcagtcacattcatccctcgcaagaagtcagttgataccatggcagtggatgagggccccagagctattgattccaactcctctgcaattggaatggtagcaggcgcctcagatgaacctgatcaatgtgaaatggatgaagatgacagtaaatcaccgacaacgccacagatgcatacaaactcaaaggcgagctcccggcgttacaggtcaagcagaacagatgatgatgagtgaaattgaggatcccagggtatccaatctgatgtttgtttctaagaaaattttgagtttcagaataccttatgtaaatccggatatatgtgtgttcttgtgatttgagctaattaactatgttgaactacttttcccccc

SEQ ID NO: 31278 - protein, 473 aa, Zea mays subsp. mays
  peptide (1)..(473): Ceres Seq. ID no. 12382425
  misc_feature (175)..(472): NCBI GI NO: 38347160 NR Description: OSJNBa0039C07.6
  misc_feature (40)..(181): NCBI GI NO: 38347160 NR Description: OSJNBa0039C07.6
  misc_feature (129)..(473): NCBI GI NO: 15240759 NR Description: putative protein; protein id: At5g13970
APFPKPSGLEPNPRTHIGRRARPSSRRVSGRPASSMAAEGSGVQETFEARVKRLFGSRLFDAVPDSSFPTASWSVAAGDVERHRWSKPSEARDAEEEAAGEAGRGDTPCVSAFYDANGCLRGRRRRSRKEEFEGNLDDLDEDEEEDGERERNAAEQDEEEGVRVNIGLDPTLDREEEEDKYDREAFGREEAADRVYMHDIMDAGINMSINSIVPDLLDDSIEEVYRFRKDPRADMRAASPRLREDGSTKDCDSHYPTQAKDFPSVVHTKKAVEEVNVKPILKRKESQADLKPRKRVRFDANVKDSELDMFEHDEDSPTVPQSMDVITELESTSTLSASPGVPDYVRNPSKYTRYTLDVPESNDGSNRTALADMHDLLARSYPNRIHSETPVKIPSSVTFIPRKKSVDTMAVDEGPRAIDSNSSAIGMVAGASDEPDQCEMDEDDSKSPTTPQMHTNSKASSRRYRSSRTDDDE

SEQ ID NO: 31279 - protein, 438 aa, Zea mays subsp. mays
  peptide (1)..(438): Ceres Seq. ID no. 12382426
  misc_feature (140)..(437): NCBI GI NO: 38347160 NR Description: OSJNBa0039C07.6
  misc_feature (5)..(146): NCBI GI NO: 38347160 NR Description: OSJNBa0039C07.6
  misc_feature (94)..(438): NCBI GI NO: 15240759 NR Description: putative protein; protein id: At5g13970
MAAEGSGVQETFEARVKRLFGSRLFDAVPDSSFPTASWSVAAGDVERHRWSKPSEARDAEEEAAGEAGRGDTPCVSAFYDANGCLRGRRRRSRKEEFEGNLDDLDEDEEEDGERERNAAEQDEEEGVRVNIGLDPTLDREEEEDKYDREAFGREEAADRVYMHDIMDAGINMSINSIVPDLLDDSIEEVYRFRKDPRADMRAASPRLREDGSTKDCDSHYPTQAKDFPSVVHTKKAVEEVNVKPILKRKESQADLKPRKRVRFDANVKDSELDMFEHDEDSPTVPQSMDVITELESTSTLSASPGVPDYVRNPSKYTRYTLDVPESNDGSNRTALADMHDLLARSYPNRIHSETPVKIPSSVTFIPRKKSVDTMAVDEGPRAIDSNSSAIGMVAGASDEPDQCEMDEDDSKSPTTPQMHTNSKASSRRYRSSRTDDDE

SEQ ID NO: 31280 - protein, 277 aa, Zea mays subsp. mays
  peptide (1)..(277): Ceres Seq. ID no. 12382427
  misc_feature (1)..(276): NCBI GI NO: 38347160 NR Description: OSJNBa0039C07.6
  misc_feature (1)..(277): NCBI GI NO: 15240759 NR Description: putative protein; protein id: At5g13970
MHDIMDAGINMSINSIVPDLLDDSIEEVYRFRKDPRADMRAASPRLREDGSTKDCDSHYPTQAKDFPSVVHTKKAVEEVNVKPILKRKESQADLKPRKRVRFDANVKDSELDMFEHDEDSPTVPQSMDVITELESTSTLSASPGVPDYVRNPSKYTRYTLDVPESNDGSNRTALADMHDLLARSYPNRIHSETPVKIPSSVTFIPRKKSVDTMAVDEGPRAIDSNSSAIGMVAGASDEPDQCEMDEDDSKSPTTPQMHTNSKASSRRYRSSRTDDDE

SEQ ID NO: 31281 - DNA, 1917 bp, Zea mays subsp. mays
  misc_feature (1)..(1917): Ceres Seq. ID no. 12375014
atagggcgtgttctaaaagacacaagatcttctctgggcacactagtgtatgaaaaaccacaagggtgattcagcttgccactgtcggctccttctatgcatgcagctgatccctgctgctcactcccatggcgcaaggtgaggagagctcgtggtgcatggcgagcagcgatcatgcatcattcgcccaagcagtcgcgtgtggaacccaaaggcgcgcttctgccgcacaacctgccaatttcttggagttgcaacctgcagcagctgctccttattactttggtgagttggaggaggcccttatccatggcacccgtacatctgttgatcacggcatgatcggaagtgatgtggacacagagcgtaagactgctggataccttgcagctaggccccccacactggagatcttcccttcatggccaatgagtcatctacagcagccatacagtggtaactcgcactcagtagggagcaccactgagtcgagctcaggtcagaacagtatgccacagaccgagctggtgtccccagggagcatgagggccgactctggacagcgtcaggagcttttgatggtgactgttgatgattacaactacgagcaaggactcggagccgcagcaaccacagctccaatctttcagcagcatgcagcaggccaagacaagggaaagcatggatccacaaggaaagacggcaggctgttagacgccaagaccgagaggcgattggcccagaacagagaagctgcaaggaagagcaggctgagaaaaaaggcctacgtacagcagctagagacgagtcggatcaggcttcagcaaatcgagcaggagctgcatggagcacgctcacagggtctgttcccgggaggaggtggtgcgcctggagacttgagttcaggcgctgtgattttcgacatggagtacgcccggtggctagaagacgacaccaagcacatgacggagctccaggccgtgctgcagccccagatcatcgacgcgaacctgggggccatcgtcgaggactgcatgcggcactacgacgagctgttccacctgagggccatgctcgcaagatccgacgtgttccacctgatgaccggcctgtgggcgaccacggccgagcgatgcttcctctggatgggagggttccgtccttctgaaatcctcaagatgctgataccgcagctcgaccctctcgcggagccgcagctgctagggatgtacaatctgcaacggtcgtcggagcagaccgaggaggcgctcgtgcaggggcttcagcagctgcaccagtcgctggcggacgccgtgggcgctagtcctctcagcgacggcgcgaatgtcgccaactacaccgctctcatggccctggcacttgacaggctcgacaccctcgagagcttttaccgccaggcggacagcctgaggcagcagaccttgcaccagatgcggcggatcctgacgatccgccagacggctcggtgcttcgtctccatcagcgagtaccaccgccgcctccgcgcccttagctccgtctgggcatcgtcccgccctccaactcctccaagcgagggcgtcgttgcggccgcagagaatgttagccctacagggacgacgagcgagcaagctctccctccgtaccaccatagccagccgttccctggcttctgatcgaaggttcgatgcatgcatgcatgctggttgtcgcggctagctagggtacagattccgtcgtcagtggtggcgagcggacgacgaggcccggccgagggggacagattgtagtgtataacgttcttctatatatcattcgtcgagaacggaaacatgcatcatcagtcggtattcagtcagtgcatcatcactatgaaaaaaaagaggacacacaaagggtctctgctctctttctctc

SEQ ID NO: 31282 - protein, 515 aa, Zea mays subsp. mays
  peptide (1)..(515): Ceres Seq. ID no. 12375015
  misc_feature (196)..(253): Pfam Name: Pfam Description:  bZIP transcription factor
  misc_feature (67)..(515): NCBI GI NO: 7489717 NR Description: basic leucine zipper protein - maize
  misc_feature (41)..(430): NCBI GI NO: 34908472 NR Description: putative basic leucine zipper protein
  misc_feature (430)..(511): NCBI GI NO: 34908472 NR Description: putative basic leucine zipper protein
  misc_feature (171)..(515): NCBI GI NO: 28630433 NR Description: liguleless2-like protein [Zea mays]
  misc_feature (47)..(477): NCBI GI NO: 30680599 NR Description: bZIP protein [Arabidopsis thaliana]
  misc_feature (192)..(489): NCBI GI NO: 6664324 NR Description: T27G7.2 [Arabidopsis thaliana]
  misc_feature (198)..(489): NCBI GI NO: 6579203 NR Description: T23G18.19 [Arabidopsis thaliana]
  misc_feature (141)..(477): NCBI GI NO: 17025920 NR Description: bZIP transcription factor [Oryza sativa]
  misc_feature (187)..(477): NCBI GI NO: 17025918 NR Description: bZIP transcription factor [Oryza sativa]
  misc_feature (187)..(477): NCBI GI NO: 422029 NR Description: transcription factor OBF3.2 - maize
MAQGEESSWCMASSDHASFAQAVACGTQRRASAAQPANFLELQPAAAAPYYFGELEEALIHGTRTSVDHGMIGSDVDTERKTAGYLAARPPTLEIFPSWPMSHLQQPYSGNSHSVGSTTESSSGQNSMPQTELVSPGSMRADSGQRQELLMVTVDDYNYEQGLGAAATTAPIFQQHAAGQDKGKHGSTRKDGRLLDAKTERRLAQNREAARKSRLRKKAYVQQLETSRIRLQQIEQELHGARSQGLFPGGGGAPGDLSSGAVIFDMEYARWLEDDTKHMTELQAVLQPQIIDANLGAIVEDCMRHYDELFHLRAMLARSDVFHLMTGLWATTAERCFLWMGGFRPSEILKMLIPQLDPLAEPQLLGMYNLQRSSEQTEEALVQGLQQLHQSLADAVGASPLSDGANVANYTALMALALDRLDTLESFYRQADSLRQQTLHQMRRILTIRQTARCFVSISEYHRRLRALSSVWASSRPPTPPSEGVVAAAENVSPTGTTSEQALPPYHHSQPFPGF

SEQ ID NO: 31283 - protein, 505 aa, Zea mays subsp. mays
  peptide (1)..(505): Ceres Seq. ID no. 12375016
  misc_feature (186)..(243): Pfam Name: Pfam Description:  bZIP transcription factor
  misc_feature (57)..(505): NCBI GI NO: 7489717 NR Description: basic leucine zipper protein - maize
  misc_feature (31)..(420): NCBI GI NO: 34908472 NR Description: putative basic leucine zipper protein
  misc_feature (420)..(501): NCBI GI NO: 34908472 NR Description: putative basic leucine zipper protein
  misc_feature (161)..(505): NCBI GI NO: 28630433 NR Description: liguleless2-like protein [Zea mays]
  misc_feature (37)..(467): NCBI GI NO: 30680599 NR Description: bZIP protein [Arabidopsis thaliana]
  misc_feature (182)..(479): NCBI GI NO: 6664324 NR Description: T27G7.2 [Arabidopsis thaliana]
  misc_feature (188)..(479): NCBI GI NO: 6579203 NR Description: T23G18.19 [Arabidopsis thaliana]
  misc_feature (131)..(467): NCBI GI NO: 17025920 NR Description: bZIP transcription factor [Oryza sativa]
  misc_feature (177)..(467): NCBI GI NO: 17025918 NR Description: bZIP transcription factor [Oryza sativa]
  misc_feature (177)..(467): NCBI GI NO: 422029 NR Description: transcription factor OBF3.2 - maize
MASSDHASFAQAVACGTQRRASAAQPANFLELQPAAAAPYYFGELEEALIHGTRTSVDHGMIGSDVDTERKTAGYLAARPPTLEIFPSWPMSHLQQPYSGNSHSVGSTTESSSGQNSMPQTELVSPGSMRADSGQRQELLMVTVDDYNYEQGLGAAATTAPIFQQHAAGQDKGKHGSTRKDGRLLDAKTERRLAQNREAARKSRLRKKAYVQQLETSRIRLQQIEQELHGARSQGLFPGGGGAPGDLSSGAVIFDMEYARWLEDDTKHMTELQAVLQPQIIDANLGAIVEDCMRHYDELFHLRAMLARSDVFHLMTGLWATTAERCFLWMGGFRPSEILKMLIPQLDPLAEPQLLGMYNLQRSSEQTEEALVQGLQQLHQSLADAVGASPLSDGANVANYTALMALALDRLDTLESFYRQADSLRQQTLHQMRRILTIRQTARCFVSISEYHRRLRALSSVWASSRPPTPPSEGVVAAAENVSPTGTTSEQALPPYHHSQPFPGF

SEQ ID NO: 31284 - protein, 445 aa, Zea mays subsp. mays
  peptide (1)..(445): Ceres Seq. ID no. 12375017
  misc_feature (126)..(183): Pfam Name: Pfam Description:  bZIP transcription factor
  misc_feature (1)..(445): NCBI GI NO: 7489717 NR Description: basic leucine zipper protein - maize
  misc_feature (1)..(360): NCBI GI NO: 34908472 NR Description: putative basic leucine zipper protein
  misc_feature (360)..(441): NCBI GI NO: 34908472 NR Description: putative basic leucine zipper protein
  misc_feature (101)..(445): NCBI GI NO: 28630433 NR Description: liguleless2-like protein [Zea mays]
  misc_feature (1)..(407): NCBI GI NO: 30680599 NR Description: bZIP protein [Arabidopsis thaliana]
  misc_feature (122)..(419): NCBI GI NO: 6664324 NR Description: T27G7.2 [Arabidopsis thaliana]
  misc_feature (128)..(419): NCBI GI NO: 6579203 NR Description: T23G18.19 [Arabidopsis thaliana]
  misc_feature (71)..(407): NCBI GI NO: 17025920 NR Description: bZIP transcription factor [Oryza sativa]
  misc_feature (117)..(407): NCBI GI NO: 17025918 NR Description: bZIP transcription factor [Oryza sativa]
  misc_feature (117)..(407): NCBI GI NO: 422029 NR Description: transcription factor OBF3.2 - maize
MIGSDVDTERKTAGYLAARPPTLEIFPSWPMSHLQQPYSGNSHSVGSTTESSSGQNSMPQTELVSPGSMRADSGQRQELLMVTVDDYNYEQGLGAAATTAPIFQQHAAGQDKGKHGSTRKDGRLLDAKTERRLAQNREAARKSRLRKKAYVQQLETSRIRLQQIEQELHGARSQGLFPGGGGAPGDLSSGAVIFDMEYARWLEDDTKHMTELQAVLQPQIIDANLGAIVEDCMRHYDELFHLRAMLARSDVFHLMTGLWATTAERCFLWMGGFRPSEILKMLIPQLDPLAEPQLLGMYNLQRSSEQTEEALVQGLQQLHQSLADAVGASPLSDGANVANYTALMALALDRLDTLESFYRQADSLRQQTLHQMRRILTIRQTARCFVSISEYHRRLRALSSVWASSRPPTPPSEGVVAAAENVSPTGTTSEQALPPYHHSQPFPGF

SEQ ID NO: 31285 - DNA, 1535 bp, Zea mays subsp. mays
  misc_feature (1)..(1535): Ceres Seq. ID no. 12382136
atgaagctcacatttctcaatggcattccattcttgcacaatcattccagccagccaccatagctccatgtcgtcgtcgacctcacaaatggcgtcgctcgccgtgctcgtcttcctggtggtctgcgcaacgcttgcgtccggcgccgccagcgtccgcgttgggctcacgcgcatccactccgacccggacaccaccgcgccccagttcgtgcgcgacgcgctgcgccgcgacatgcaccggcagcggtcccggtcgttcggccgcgaccgcgaccgcgagctcgcggagtccgacgggcgcaccagcaccacggtgtccgcgcgcacccgcaaggacctgcccaacggcggggagtacctcatgacgctggccatcggcacgccgccgctgccgtacgcggccgtcgccgacacgggcagcgacctcatctggacgcagtgcgcgccctgcggcacccagtgcttcgagcagccggcgccgctgtacaacccagcgagctcgaccacgttcagcgtgctcccgtgcaacagctccctgagcatgtgcgcgggggcgctggcgggggccgcgccgccgcccgggtgcgcctgcatgtactaccagacgtacggcaccgggtggacggcgggcgtgcagggctccgagaccttcaccttcggctcgtccgccgccgaccaggcccgcgtccccggcgtcgccttcggctgcagcaacgccagcagcagcgactggaacgggtcggcggggctggtggggctgggcaggggcagcctgtcgctcgtctcgcagctcggcgccggcaggttctcctactgcctgacgccgttccaggacaccaacagcaccagcaccctcctcctcggcccgtcggcggcgctcaacggcaccggcgtccgctccacgccgttcgtcgctagcccggccagggcgcccatgagcacctactactacctcaacctgacgggcatatccctgggcgcgaaggcgctgcccatctctcccggcgcattctccctgaagcccgacggcacgggcggcctcatcatcgactccggcacgaccatcacctcgctggccaacgcggcgtaccagcaggtccgcgccgcggtaaagtcccagctggtcacgacgctgccaacggtcgacgggtcggactccacggggctcgacctgtgcttcgcgctgccggccccgacgtcggcgccgccggccgtgctgccgagcatgacgctccacttcgacggcgccgacatggtgctccccgcggacagctacatgatctcggggtccggcgtgtggtgcctggccatgcggaaccagacggacggcgcgatgagcacgttcgggaactaccagcagcagaacatgcacatcctctacgacgtccgggaggagacgctgtcgttcgctccggccaagtgcagcactctttgacgatgcgatagttgtacatatgtatatgtgtgcatatataggattcgtgatttttttgtatacagtggattgttaaccgaacacgctaattaattcc

SEQ ID NO: 31286 - protein, 472 aa, Zea mays subsp. mays
  peptide (1)..(472): Ceres Seq. ID no. 12382137
  misc_feature (64)..(467): Pfam Name: Pfam Description:  Eukaryotic aspartyl protease
  misc_feature (25)..(472): NCBI GI NO: 34898762 NR Description: OJ1131_E05.5
  misc_feature (24)..(472): NCBI GI NO: 34898756 NR Description: OJ1131_E05.2
  misc_feature (38)..(472): NCBI GI NO: 38344829 NR Description: OSJNBa0064H22.10
  misc_feature (47)..(472): NCBI GI NO: 30678047 NR Description: chloroplast nucleoid DNA binding protein -related
  misc_feature (116)..(472): NCBI GI NO: 20197342 NR Description: putative chloroplast nucleoid DNA binding protein
  misc_feature (24)..(472): NCBI GI NO: 15242803 NR Description: putative protein; protein id: At5g33340.1
  misc_feature (42)..(469): NCBI GI NO: 15290061 NR Description: nucleoid DNA-binding protein cnd41-like protein
  misc_feature (7)..(470): NCBI GI NO: 15223368 NR Description: chloroplast nucleoid DNA binding protein, putative
  misc_feature (112)..(469): NCBI GI NO: 34895664 NR Description: nucleoid DNA-binding protein cnd41-like protein
  misc_feature (112)..(472): NCBI GI NO: 15228044 NR Description: putative chloroplast nucleoid DNA binding protein
MAFHSCTIIPASHHSSMSSSTSQMASLAVLVFLVVCATLASGAASVRVGLTRIHSDPDTTAPQFVRDALRRDMHRQRSRSFGRDRDRELAESDGRTSTTVSARTRKDLPNGGEYLMTLAIGTPPLPYAAVADTGSDLIWTQCAPCGTQCFEQPAPLYNPASSTTFSVLPCNSSLSMCAGALAGAAPPPGCACMYYQTYGTGWTAGVQGSETFTFGSSAADQARVPGVAFGCSNASSSDWNGSAGLVGLGRGSLSLVSQLGAGRFSYCLTPFQDTNSTSTLLLGPSAALNGTGVRSTPFVASPARAPMSTYYYLNLTGISLGAKALPISPGAFSLKPDGTGGLIIDSGTTITSLANAAYQQVRAAVKSQLVTTLPTVDGSDSTGLDLCFALPAPTSAPPAVLPSMTLHFDGADMVLPADSYMISGSGVWCLAMRNQTDGAMSTFGNYQQQNMHILYDVREETLSFAPAKCSTL

SEQ ID NO: 31287 - protein, 456 aa, Zea mays subsp. mays
  peptide (1)..(456): Ceres Seq. ID no. 12382138
  misc_feature (48)..(451): Pfam Name: Pfam Description:  Eukaryotic aspartyl protease
  misc_feature (9)..(456): NCBI GI NO: 34898762 NR Description: OJ1131_E05.5
  misc_feature (8)..(456): NCBI GI NO: 34898756 NR Description: OJ1131_E05.2
  misc_feature (22)..(456): NCBI GI NO: 38344829 NR Description: OSJNBa0064H22.10
  misc_feature (31)..(456): NCBI GI NO: 30678047 NR Description: chloroplast nucleoid DNA binding protein -related
  misc_feature (100)..(456): NCBI GI NO: 20197342 NR Description: putative chloroplast nucleoid DNA binding protein
  misc_feature (8)..(456): NCBI GI NO: 15242803 NR Description: putative protein; protein id: At5g33340.1
  misc_feature (26)..(453): NCBI GI NO: 15290061 NR Description: nucleoid DNA-binding protein cnd41-like protein
  misc_feature (1)..(454): NCBI GI NO: 15223368 NR Description: chloroplast nucleoid DNA binding protein, putative
  misc_feature (96)..(453): NCBI GI NO: 34895664 NR Description: nucleoid DNA-binding protein cnd41-like protein
  misc_feature (96)..(456): NCBI GI NO: 15228044 NR Description: putative chloroplast nucleoid DNA binding protein
MSSSTSQMASLAVLVFLVVCATLASGAASVRVGLTRIHSDPDTTAPQFVRDALRRDMHRQRSRSFGRDRDRELAESDGRTSTTVSARTRKDLPNGGEYLMTLAIGTPPLPYAAVADTGSDLIWTQCAPCGTQCFEQPAPLYNPASSTTFSVLPCNSSLSMCAGALAGAAPPPGCACMYYQTYGTGWTAGVQGSETFTFGSSAADQARVPGVAFGCSNASSSDWNGSAGLVGLGRGSLSLVSQLGAGRFSYCLTPFQDTNSTSTLLLGPSAALNGTGVRSTPFVASPARAPMSTYYYLNLTGISLGAKALPISPGAFSLKPDGTGGLIIDSGTTITSLANAAYQQVRAAVKSQLVTTLPTVDGSDSTGLDLCFALPAPTSAPPAVLPSMTLHFDGADMVLPADSYMISGSGVWCLAMRNQTDGAMSTFGNYQQQNMHILYDVREETLSFAPAKCSTL

SEQ ID NO: 31288 - protein, 449 aa, Zea mays subsp. mays
  peptide (1)..(449): Ceres Seq. ID no. 12382139
  misc_feature (41)..(444): Pfam Name: Pfam Description:  Eukaryotic aspartyl protease
  misc_feature (2)..(449): NCBI GI NO: 34898762 NR Description: OJ1131_E05.5
  misc_feature (1)..(449): NCBI GI NO: 34898756 NR Description: OJ1131_E05.2
  misc_feature (15)..(449): NCBI GI NO: 38344829 NR Description: OSJNBa0064H22.10
  misc_feature (24)..(449): NCBI GI NO: 30678047 NR Description: chloroplast nucleoid DNA binding protein -related
  misc_feature (93)..(449): NCBI GI NO: 20197342 NR Description: putative chloroplast nucleoid DNA binding protein
  misc_feature (1)..(449): NCBI GI NO: 15242803 NR Description: putative protein; protein id: At5g33340.1
  misc_feature (19)..(446): NCBI GI NO: 15290061 NR Description: nucleoid DNA-binding protein cnd41-like protein
  misc_feature (1)..(447): NCBI GI NO: 15223368 NR Description: chloroplast nucleoid DNA binding protein, putative
  misc_feature (89)..(446): NCBI GI NO: 34895664 NR Description: nucleoid DNA-binding protein cnd41-like protein
  misc_feature (89)..(449): NCBI GI NO: 15228044 NR Description: putative chloroplast nucleoid DNA binding protein
MASLAVLVFLVVCATLASGAASVRVGLTRIHSDPDTTAPQFVRDALRRDMHRQRSRSFGRDRDRELAESDGRTSTTVSARTRKDLPNGGEYLMTLAIGTPPLPYAAVADTGSDLIWTQCAPCGTQCFEQPAPLYNPASSTTFSVLPCNSSLSMCAGALAGAAPPPGCACMYYQTYGTGWTAGVQGSETFTFGSSAADQARVPGVAFGCSNASSSDWNGSAGLVGLGRGSLSLVSQLGAGRFSYCLTPFQDTNSTSTLLLGPSAALNGTGVRSTPFVASPARAPMSTYYYLNLTGISLGAKALPISPGAFSLKPDGTGGLIIDSGTTITSLANAAYQQVRAAVKSQLVTTLPTVDGSDSTGLDLCFALPAPTSAPPAVLPSMTLHFDGADMVLPADSYMISGSGVWCLAMRNQTDGAMSTFGNYQQQNMHILYDVREETLSFAPAKCSTL

SEQ ID NO: 31289 - DNA, 1422 bp, Zea mays subsp. mays
  misc_feature (1)..(1422): Ceres Seq. ID no. 13492589
gaccaacccaaccgtgggggtgccgggtgccctacggcctacgggccggagcagcgcttgggagccgcggcacggaggcatcgacgccgttgagctcgaggcgaccggcggctggcggccccgccacagcgttgctgtggcagtgtggcttcttctggtttctgcgggctcagcgcggaggcctattgcaggattaaatggcaaatagggcaagatggatgatgaagtacgaaaagggtcttgttgatatacttcatgagaacaacacttcacattatcgtacccaaaacggttggagaacataggggtggaggaaaattgttagggatttcaatgtacggtaccctgaagcaaagtttagtaaaatgcaaatccaggaacatgagactcaattgaagaaagactacaggtcgataaaatatatcctccaacgtgatggtgtctcgtgggaccagagtgcgtccatgtttagaacaacagatgaaatctgggatgagattatcgaggatatgcccaaggcacggaagtaccaaagcaagagctttccattgcttgactcactagaaccgttatttgatggtcctattcctgaaggggcacaaaaatcaccttccagcatacctcagaatgttggtggaaacgttggtgatggaggcaacaatatcagcacagtcccagacttgtctgaaagacctagtggaacaattaacacaagcgttaatgaggcatggaataatatcagcctacttaagcaaacagcattgggaccccaaggtatagacaatctcgattctcgacacgctgcaaaatcgtgataaagaggtgctggaacggctacagcatggctcggaccggaggccgaagagagcggatgaacaggcacagtcaagttcttgcgtagaactgcagagagacaggcgcaagaagcggaaggccccagacatccagcagatcatggagacctatatgaatttcagaatgaagcaacctcgcgtcaaacaacgaagagcaaaggacggtgaccagttcacgatttcaagctgtatcaaggctctgcacaccatggctgatatgtcagatgaggtcaaggtattagcctctgatgttttcaaggacgctgagaacagggagacctttctttcgtatgaacccaggctgcgcaccttgtggctgaagagggaagttggcaagctactctcctatagaagtggcagcccttgcttgttttgtttgctacccgtgcctaggcttcatttaacaaactctactagtgacttaacttgttccatgcacagtacgtcactatactgcttagtcattcatgatcaatgatgtgcttgctgcatgtagtgcttccaaaattttgcatctgtgccaatacactgttaaaaaatgcgacagaatgcttgtttcttgacagct

SEQ ID NO: 31290 - protein, 149 aa, Zea mays subsp. mays
  peptide (1)..(149): Ceres Seq. ID no. 13492590
  misc_feature (1)..(142): NCBI GI NO: 21741991 NR Description: OSJNBa0060P14.12
  misc_feature (1)..(86): NCBI GI NO: 34907580 NR Description: B1078G07.31
  misc_feature (1)..(77): NCBI GI NO: 37535590 NR Description: hypothetical protein
  misc_feature (1)..(77): NCBI GI NO: 37535236 NR Description: hypothetical protein
  misc_feature (1)..(77): NCBI GI NO: 34915330 NR Description: hypothetical protein~similar to Oryza sativachromosome 10
  misc_feature (50)..(89): NCBI GI NO: 38344751 NR Description: OSJNBa0089K21.9
  misc_feature (1)..(77): NCBI GI NO: 34394471 NR Description: unknown protein
  misc_feature (1)..(70): NCBI GI NO: 15224652 NR Description: hypothetical protein [Arabidopsis thaliana]
  misc_feature (1)..(66): NCBI GI NO: 25371570 NR Description: hypothetical protein AT4g02210
  misc_feature (1)..(66): NCBI GI NO: 15293059 NR Description: unknown protein [Arabidopsis thaliana]
MQIQEHETQLKKDYRSIKYILQRDGVSWDQSASMFRTTDEIWDEIIEDMPKARKYQSKSFPLLDSLEPLFDGPIPEGAQKSPSSIPQNVGGNVGDGGNNISTVPDLSERPSGTINTSVNEAWNNISLLKQTALGPQGIDNLDSRHAAKS

SEQ ID NO: 31291 - protein, 125 aa, Zea mays subsp. mays
  peptide (1)..(125): Ceres Seq. ID no. 13492591
  misc_feature (1)..(82): NCBI GI NO: 21741991 NR Description: OSJNBa0060P14.12
  misc_feature (11)..(74): NCBI GI NO: 34907580 NR Description: B1078G07.31
  misc_feature (1)..(80): NCBI GI NO: 37535236 NR Description: hypothetical protein
  misc_feature (1)..(80): NCBI GI NO: 34915330 NR Description: hypothetical protein~similar to Oryza sativachromosome 10
  misc_feature (1)..(77): NCBI GI NO: 38344751 NR Description: OSJNBa0089K21.9
  misc_feature (27)..(77): NCBI GI NO: 15224652 NR Description: hypothetical protein [Arabidopsis thaliana]
  misc_feature (15)..(77): NCBI GI NO: 25371570 NR Description: hypothetical protein AT4g02210
  misc_feature (15)..(77): NCBI GI NO: 15293059 NR Description: unknown protein [Arabidopsis thaliana]
  misc_feature (15)..(77): NCBI GI NO: 18411878 NR Description: expressed protein [Arabidopsis thaliana]
  misc_feature (1)..(77): NCBI GI NO: 37535088 NR Description: hypothetical protein
METYMNFRMKQPRVKQRRAKDGDQFTISSCIKALHTMADMSDEVKVLASDVFKDAENRETFLSYEPRLRTLWLKREVGKLLSYRSGSPCLFCLLPVPRLHLTNSTSDLTCSMHSTSLYCLVIHDQ

SEQ ID NO: 31292 - protein, 121 aa, Zea mays subsp. mays
  peptide (1)..(121): Ceres Seq. ID no. 13492592
  misc_feature (1)..(78): NCBI GI NO: 21741991 NR Description: OSJNBa0060P14.12
  misc_feature (7)..(70): NCBI GI NO: 34907580 NR Description: B1078G07.31
  misc_feature (1)..(76): NCBI GI NO: 37535236 NR Description: hypothetical protein
  misc_feature (1)..(76): NCBI GI NO: 34915330 NR Description: hypothetical protein~similar to Oryza sativachromosome 10
  misc_feature (1)..(73): NCBI GI NO: 38344751 NR Description: OSJNBa0089K21.9
  misc_feature (23)..(73): NCBI GI NO: 15224652 NR Description: hypothetical protein [Arabidopsis thaliana]
  misc_feature (11)..(73): NCBI GI NO: 25371570 NR Description: hypothetical protein AT4g02210
  misc_feature (11)..(73): NCBI GI NO: 15293059 NR Description: unknown protein [Arabidopsis thaliana]
  misc_feature (11)..(73): NCBI GI NO: 18411878 NR Description: expressed protein [Arabidopsis thaliana]
  misc_feature (1)..(73): NCBI GI NO: 37535088 NR Description: hypothetical protein
MNFRMKQPRVKQRRAKDGDQFTISSCIKALHTMADMSDEVKVLASDVFKDAENRETFLSYEPRLRTLWLKREVGKLLSYRSGSPCLFCLLPVPRLHLTNSTSDLTCSMHSTSLYCLVIHDQ

SEQ ID NO: 31293 - DNA, 1464 bp, Zea mays subsp. mays
  misc_feature (1)..(1464): Ceres Seq. ID no. 12381445
aagtcacatcagcgcgtccgccttcacctatcatcatcgtctcaatctccggccggtctcagccgggcacccaaactgagatggcgtccgtccggtggtcccgccgtgggccctgatcgcctccttcctcgtcgtcgcggcagtgggagcccagccgatggacccgaagaaccccatctcgtcggaccccaacgtgatccccgtatacatgagccccggctcgccccccacctacgtgagctgttacaacagcacccatgggcagcaagggtcggaacccacgtgctccatcctcgcgcgccagtgtccccgcggttgccgggacacctgctacgtccactgcccgtcctgcaagctcgtctgcctgtgcgagctgaccggctcggagtgctacgacccgcgcttcgtgggaggcgacggcaacaagttcctgttccacggccggcgcgacgccgacttctgtctggtgtcggacgccaacctgcacatcaacgcgcacttcatcggcaagcgcaacgacgcgcgcgccgccgcgccggcgcgggacttcacgtgggtgcaggcgctgggcatccggttcggcgggcaccggctgtacctgggcgtccggaggacggccgtctgggacgacgccgaggaccggctggccatcaccttcgacggggtgcccgtggcgctggacgccgtggccggcgccagctggagccccgcggcggcgcccgcgctgtccgtgttccgcacgggccccgccaacggcgtggtggtgcgcctggacgggcggttccgggccgtggccaacgccgtgccggtgaccgcggaggactcgagggtccacggctacggcctgcgccccggggacggcagcctcgcgcacctcaacgtggcgttcaggttctacgccctcagcgccgacgtgcacggcgtgctgggccagacctaccgcccgggctacgtcagcgccgccggggtggacgcgggcgccagggtccccgtcatgggcggcgccggaaggttccaggtgtacggcggcatcttcgacaccagctgcgaggtcgggcggttcgctggcgaggaccacgggcccgtgggcggcgtcatcaccgtggaggagccgaccgacgcgctctgcggcagcggcaaggccagcactggcctggtctgcaagaagtgacgactgacgaggccggcggcgtgaggtcccgctccgcttgtgtagtgtttttgcttgtgtgtacgtgcgtgctgacgtatatcggtatatatagctgctgctgctgctgcgaagtatagtagcaatggttctatgtatggcggggcggccgaataaaagactgtgacgcgtctcttgtgctatagtcgtgtggacaacactggaaaaaatgccgtgttggtctggtcacgtaagaagtgtgtattattattattattattattattattattattattactaaaaaaaaaaaa

SEQ ID NO: 31294 - protein, 429 aa, Zea mays subsp. mays
  peptide (1)..(429): Ceres Seq. ID no. 12381446
  misc_feature (169)..(380): Pfam Name: Pfam Description:  HlyD family secretion protein
  misc_feature (34)..(380): NCBI GI NO: 23018055 NR Description: hypothetical protein [Thermobifida fusca]
  misc_feature (39)..(375): NCBI GI NO: 23018788 NR Description: hypothetical protein [Thermobifida fusca]
  misc_feature (210)..(377): NCBI GI NO: 23102044 NR Description: hypothetical protein [Azotobacter vinelandii]
  misc_feature (192)..(366): NCBI GI NO: 29247944 NR Description: GLP_26_54603_52153 [Giardia lamblia ATCC 50803]
  misc_feature (136)..(386): NCBI GI NO: 23103741 NR Description: hypothetical protein [Azotobacter vinelandii]
  misc_feature (122)..(370): NCBI GI NO: 23106338 NR Description: hypothetical protein [Azotobacter vinelandii]
  misc_feature (60)..(305): NCBI GI NO: 23102229 NR Description: hypothetical protein [Azotobacter vinelandii]
  misc_feature (199)..(380): NCBI GI NO: 23106326 NR Description: hypothetical protein [Azotobacter vinelandii]
KSHQRVRLHLSSSSQSPAGLSRAPKLRWRPSGGPAVGPDRLLPRRRGSGSPADGPEEPHLVGPQRDPRIHEPRLAPHLRELLQQHPWAARVGTHVLHPRAPVSPRLPGHLLRPLPVLQARLPVRADRLGVLRPALRGRRRQQVPVPRPARRRLLSGVGRQPAHQRALHRQAQRRARRRAGAGLHVGAGAGHPVRRAPAVPGRPEDGRLGRRRGPAGHHLRRGARGAGRRGRRQLEPRGGARAVRVPHGPRQRRGGAPGRAVPGRGQRRAGDRGGLEGPRLRPAPRGRQPRAPQRGVQVLRPQRRRARRAGPDLPPGLRQRRRGGRGRQGPRHGRRRKVPGVRRHLRHQLRGRAVRWRGPRARGRRHHRGGADRRALRQRQGQHWPGLQEVTTDEAGGVRSRSACVVFLLVCTCVLTYIGIYSCCCCCEV

SEQ ID NO: 31295 - protein, 337 aa, Zea mays subsp. mays
  peptide (1)..(337): Ceres Seq. ID no. 12381447
  misc_feature (1)..(337): NCBI GI NO: 21741738 NR Description: OSJNBa0073L04.18
  misc_feature (1)..(337): NCBI GI NO: 4514637 NR Description: root cap protein 2 [Zea mays]
  misc_feature (1)..(307): NCBI GI NO: 4514635 NR Description: root cap protein 1 [Zea mays]
  misc_feature (1)..(302): NCBI GI NO: 34905930 NR Description: similar to root cap protein
  misc_feature (1)..(311): NCBI GI NO: 34905940 NR Description: similar to root cap protein
  misc_feature (1)..(302): NCBI GI NO: 34905936 NR Description: similar to root cap protein
  misc_feature (1)..(337): NCBI GI NO: 11994465 NR Description: contains similarity to late embryogenesis abundantprotein~gene_id:MLD14
  misc_feature (1)..(337): NCBI GI NO: 30685319 NR Description: late embryogenesis abundant protein -related
  misc_feature (19)..(302): NCBI GI NO: 34905934 NR Description: similar to root cap protein
  misc_feature (41)..(337): NCBI GI NO: 7484468 NR Description: late embryonic abundant protein EMB7
MDPKNPISSDPNVIPVYMSPGSPPTYVSCYNSTHGQQGSEPTCSILARQCPRGCRDTCYVHCPSCKLVCLCELTGSECYDPRFVGGDGNKFLFHGRRDADFCLVSDANLHINAHFIGKRNDARAAAPARDFTWVQALGIRFGGHRLYLGVRRTAVWDDAEDRLAITFDGVPVALDAVAGASWSPAAAPALSVFRTGPANGVVVRLDGRFRAVANAVPVTAEDSRVHGYGLRPGDGSLAHLNVAFRFYALSADVHGVLGQTYRPGYVSAAGVDAGARVPVMGGAGRFQVYGGIFDTSCEVGRFAGEDHGPVGGVITVEEPTDALCGSGKASTGLVCKK

SEQ ID NO: 31296 - protein, 320 aa, Zea mays subsp. mays
  peptide (1)..(320): Ceres Seq. ID no. 12381448
  misc_feature (1)..(320): NCBI GI NO: 21741738 NR Description: OSJNBa0073L04.18
  misc_feature (1)..(320): NCBI GI NO: 4514637 NR Description: root cap protein 2 [Zea mays]
  misc_feature (1)..(290): NCBI GI NO: 4514635 NR Description: root cap protein 1 [Zea mays]
  misc_feature (1)..(285): NCBI GI NO: 34905930 NR Description: similar to root cap protein
  misc_feature (1)..(294): NCBI GI NO: 34905940 NR Description: similar to root cap protein
  misc_feature (1)..(285): NCBI GI NO: 34905936 NR Description: similar to root cap protein
  misc_feature (1)..(320): NCBI GI NO: 11994465 NR Description: contains similarity to late embryogenesis abundantprotein~gene_id:MLD14
  misc_feature (1)..(320): NCBI GI NO: 30685319 NR Description: late embryogenesis abundant protein -related
  misc_feature (2)..(285): NCBI GI NO: 34905934 NR Description: similar to root cap protein
  misc_feature (24)..(320): NCBI GI NO: 7484468 NR Description: late embryonic abundant protein EMB7
MSPGSPPTYVSCYNSTHGQQGSEPTCSILARQCPRGCRDTCYVHCPSCKLVCLCELTGSECYDPRFVGGDGNKFLFHGRRDADFCLVSDANLHINAHFIGKRNDARAAAPARDFTWVQALGIRFGGHRLYLGVRRTAVWDDAEDRLAITFDGVPVALDAVAGASWSPAAAPALSVFRTGPANGVVVRLDGRFRAVANAVPVTAEDSRVHGYGLRPGDGSLAHLNVAFRFYALSADVHGVLGQTYRPGYVSAAGVDAGARVPVMGGAGRFQVYGGIFDTSCEVGRFAGEDHGPVGGVITVEEPTDALCGSGKASTGLVCKK

SEQ ID NO: 31297 - DNA, 738 bp, Zea mays subsp. mays
  misc_feature (1)..(738): Ceres Seq. ID no. 12356758
atcactgccaaatcccccagaaaatcaactcctcctcaattccacgctgccaccaactcgccgtcctccgcgccaagcatcaaagctccgatggcccgcacgaagcagacggctcgcaagtcgacgggcggcaaggcgccccgcaagcagctggcgaccaaggcggcgcgcaagtctgcgccggccaccggcggcgtgaagaagccccaccgcttccgccccggcaccgtcgcgctccgggagatccgcaagtaccagaagagcacggagctgctcatccgcaagttgcccttccagcgcctcgtccgtgagatcgcgcaggacttcaagaccgatctccgcttccagtcctccgccgtcgcggcgctgcaggaggccgccgaggcctaccttgtggggctctttgaggacactaacctctgcgccatccacgccaagcgcgtcaccatcatgcccaaggacatccagctcgcgcgccgcatcaggggcgagagggcctgagcgaggcgagctcctctcaccgcaggcggcgtcgttgttgcttcggacctgcttgtaggacttgtgcttctcttggtttcctttctggtggcagaggcatcttggtaccattgtgcttgttcttagaatcttagggatagagagttttcagttgctgggtaacctgattgtttatcttgcattcctgcctctgtaatggttgtctgctgtcttaatggaaattatatttgctttttt

SEQ ID NO: 31298 - protein, 166 aa, Zea mays subsp. mays
  peptide (1)..(166): Ceres Seq. ID no. 12356759
  misc_feature (47)..(165): Pfam Name: Pfam Description:  Core histone H2A/H2B/H3/H4
  misc_feature (31)..(166): NCBI GI NO: 15232146 NR Description: histone H3, putative; protein id: At3g27360
  misc_feature (6)..(166): NCBI GI NO: 31210959 NR Description: ENSANGP00000016066 [Anopheles gambiae]
  misc_feature (31)..(166): NCBI GI NO: 122087 NR Description: Histone H3
  misc_feature (31)..(166): NCBI GI NO: 1362108 NR Description: histone H3 homolog - common tobacco
  misc_feature (21)..(166): NCBI GI NO: 31239843 NR Description: ENSANGP00000014183 [Anopheles gambiae]
  misc_feature (31)..(166): NCBI GI NO: 166384 NR Description: histone H3 (H3-1.1)
  misc_feature (32)..(166): NCBI GI NO: 70753 NR Description: histone H3 - garden pea (tentative sequence)
  misc_feature (32)..(166): NCBI GI NO: 122083 NR Description: Histone H3
  misc_feature (20)..(166): NCBI GI NO: 34876364 NR Description: similar to CG31613-PA [Rattus norvegicus]
  misc_feature (18)..(166): NCBI GI NO: 31210957 NR Description: ENSANGP00000016056 [Anopheles gambiae]
ITAKSPRKSTPPQFHAATNSPSSAPSIKAPMARTKQTARKSTGGKAPRKQLATKAARKSAPATGGVKKPHRFRPGTVALREIRKYQKSTELLIRKLPFQRLVREIAQDFKTDLRFQSSAVAALQEAAEAYLVGLFEDTNLCAIHAKRVTIMPKDIQLARRIRGERA

SEQ ID NO: 31299 - protein, 136 aa, Zea mays subsp. mays; identical to SEQ ID NO: 30406
  peptide (1)..(136): Ceres Seq. ID no. 12356760
  misc_feature (17)..(135): Pfam Name: Pfam Description:  Core histone H2A/H2B/H3/H4
  misc_feature (1)..(136): NCBI GI NO: 15232146 NR Description: histone H3, putative; protein id: At3g27360
  misc_feature (1)..(136): NCBI GI NO: 31210959 NR Description: ENSANGP00000016066 [Anopheles gambiae]
  misc_feature (1)..(136): NCBI GI NO: 122087 NR Description: Histone H3
  misc_feature (1)..(136): NCBI GI NO: 1362108 NR Description: histone H3 homolog - common tobacco
  misc_feature (1)..(136): NCBI GI NO: 31239843 NR Description: ENSANGP00000014183 [Anopheles gambiae]
  misc_feature (1)..(136): NCBI GI NO: 166384 NR Description: histone H3 (H3-1.1)
  misc_feature (2)..(136): NCBI GI NO: 70753 NR Description: histone H3 - garden pea (tentative sequence)
  misc_feature (2)..(136): NCBI GI NO: 122083 NR Description: Histone H3
  misc_feature (1)..(136): NCBI GI NO: 34876364 NR Description: similar to CG31613-PA [Rattus norvegicus]
  misc_feature (1)..(136): NCBI GI NO: 31210957 NR Description: ENSANGP00000016056 [Anopheles gambiae]

SEQ ID NO: 31300 - protein, 102 aa, Zea mays subsp. mays
  peptide (1)..(102): Ceres Seq. ID no. 12356761
HCQIPQKINSSSIPRCHQLAVLRAKHQSSDGPHEADGSQVDGRQGAPQAAGDQGGAQVCAGHRRREEAPPLPPRHRRAPGDPQVPEEHGAAHPQVALPAPRP

SEQ ID NO: 31301 - DNA, 1364 bp, Zea mays subsp. mays
  misc_feature (1)..(1364): Ceres Seq. ID no. 12354363
acaacgagccaacgctcggggttttcactgcacacaagctttgctcagtcgttctgtgcttactgttcctgactcgtgtcgtgcaggagtcgaaggcattggcgtcaactacggcacgatcgccagcaacctgccgtcccccgacaaggtgatcacgctgtgcaaggccaagggcatcaccgacgtccggctcttccacccggacaccgccgtcctggcggcgctccgaggctcgggcctgggcgtcgtgctcggcaccctgaacgaggacctggcccgcctggcctccgacccctcgttcgccgcgtcgtgggtgcagtcctacgtgcggcccttcgccggcgccgtccgcttccgctacgtgggccgcgggcaacgaggtcgtcccgggggacctagcctcgcacgtccttccgtccatgcacaacctcgagtccgcgctccgtgccgcggggctcggcggcgtgcgggtcaccaccgccgtgtcgacgtccgtgctgggaacctcgtacccgccgtcgcagggcgccttctccgacgcggcgctgccgtccatggggcccatcgcgtcgttcctggcgcccaggtccacgccgctgctcgtcaacgtgtacccctacttcgcctactcggccgacccggcgtcggtgtcgctggactacgcgctgctgcggtccgactcgggcggcggggccgtcgtcgtggcggacggcggggcgtcgtacggcaacatgttcgacgccatcgtggacgccgtgtacgcggcgctggagagggccggcgcgcggggcctggagctggtggtctcggagaccgggtggccgtcgggcggaggcggcgccggcgcaagcgtgggtaacgcgtcggcgtacgtcaacaacgtggtgcgccacgtcgggagcggccgcggcacgccgcggcggcccgggaagcccgtggaggcgttcatcttcgccatgttcaatgagaaccagaagcccgagggcgtggagcagcacttcggcatgttccagccggacatgaccgaggtgtaccacgtcgacttcatggcggcatcttcctcgtaggcgaaacaacgtacgtactgcgctgcgcggattaaggacgacacacacgttggcattttttttgtaaaaaaaaagtttttaatggtctcatcgacgtcgatctgcattattgtgcacgaactattaagatttgggagatgattactcgcatctagttccagtaggattcatcgaatggttgggtcggcgattgttggtgacatttgcacatatgagtgcatcttaaagcatcaaccaacgccacgttactatacaatgcaatgctgcatatattatcaatatagttttttatgctct

SEQ ID NO: 31302 - protein, 285 aa, Zea mays subsp. mays
  peptide (1)..(285): Ceres Seq. ID no. 12354364
  misc_feature (33)..(147): Pfam Name: Pfam Description:  Glycosyl hydrolases family 17
  misc_feature (28)..(147): NCBI GI NO: 34908958 NR Description: beta-1,3-glucanase precursor
  misc_feature (28)..(130): NCBI GI NO: 4097944 NR Description: beta-1,3-glucanase precursor [Oryza sativa]
  misc_feature (28)..(139): NCBI GI NO: 585078 NR Description: PUTATIVE GLUCAN ENDO-1
  misc_feature (9)..(133): NCBI GI NO: 4097946 NR Description: beta-1,3-glucanase precursor [Oryza sativa]
  misc_feature (35)..(133): NCBI GI NO: 4884532 NR Description: beta-1,3-glucanase [Oryza sativa]
  misc_feature (33)..(139): NCBI GI NO: 322839 NR Description: glucan endo-1,3-beta-D-glucosidase (EC 3
  misc_feature (33)..(130): NCBI GI NO: 7447972 NR Description: glucan endo-1,3-beta-D-glucosidase (EC 3
  misc_feature (13)..(130): NCBI GI NO: 6073860 NR Description: beta-1, 3-glucananse [Musa acuminata]
  misc_feature (30)..(130): NCBI GI NO: 6448757 NR Description: beta-1,3-glucanase [Musa acuminata]
  misc_feature (30)..(139): NCBI GI NO: 34906500 NR Description: beta 1,3-glucanase
QRANARGFHCTQALLSRSVLTVPDSCRAGVEGIGVNYGTIASNLPSPDKVITLCKAKGITDVRLFHPDTAVLAALRGSGLGVVLGTLNEDLARLASDPSFAASWVQSYVRPFAGAVRFRYVGRGQRGRPGGPSLARPSVHAQPRVRAPCRGARRRAGHHRRVDVRAGNLVPAVAGRLLRRGAAVHGAHRVVPGAQVHAAARQRVPLLRLLGRPGVGVAGLRAAAVRLGRRGRRRGGRRGVVRQHVRRHRGRRVRGAGEGRRAGPGAGGLGDRVAVGRRRRRRKRG

SEQ ID NO: 31303 - protein, 215 aa, Zea mays subsp. mays
  peptide (1)..(215): Ceres Seq. ID no. 12354365
  misc_feature (1)..(209): Pfam Name: Pfam Description:  Glycosyl hydrolases family 17
  misc_feature (1)..(211): NCBI GI NO: 34908958 NR Description: beta-1,3-glucanase precursor
  misc_feature (1)..(211): NCBI GI NO: 4097944 NR Description: beta-1,3-glucanase precursor [Oryza sativa]
  misc_feature (1)..(214): NCBI GI NO: 585078 NR Description: PUTATIVE GLUCAN ENDO-1
  misc_feature (1)..(208): NCBI GI NO: 4097946 NR Description: beta-1,3-glucanase precursor [Oryza sativa]
  misc_feature (1)..(213): NCBI GI NO: 4884532 NR Description: beta-1,3-glucanase [Oryza sativa]
  misc_feature (1)..(214): NCBI GI NO: 322839 NR Description: glucan endo-1,3-beta-D-glucosidase (EC 3
  misc_feature (1)..(213): NCBI GI NO: 7447972 NR Description: glucan endo-1,3-beta-D-glucosidase (EC 3
  misc_feature (1)..(209): NCBI GI NO: 6073860 NR Description: beta-1, 3-glucananse [Musa acuminata]
  misc_feature (1)..(209): NCBI GI NO: 6448757 NR Description: beta-1,3-glucanase [Musa acuminata]
  misc_feature (1)..(209): NCBI GI NO: 34906500 NR Description: beta 1,3-glucanase
MHNLESALRAAGLGGVRVTTAVSTSVLGTSYPPSQGAFSDAALPSMGPIASFLAPRSTPLLVNVYPYFAYSADPASVSLDYALLRSDSGGGAVVVADGGASYGNMFDAIVDAVYAALERAGARGLELVVSETGWPSGGGGAGASVGNASAYVNNVVRHVGSGRGTPRRPGKPVEAFIFAMFNENQKPEGVEQHFGMFQPDMTEVYHVDFMAASSS

SEQ ID NO: 31304 - protein, 170 aa, Zea mays subsp. mays
  peptide (1)..(170): Ceres Seq. ID no. 12354366
  misc_feature (1)..(164): Pfam Name: Pfam Description:  Glycosyl hydrolases family 17
  misc_feature (1)..(166): NCBI GI NO: 34908958 NR Description: beta-1,3-glucanase precursor
  misc_feature (1)..(166): NCBI GI NO: 4097944 NR Description: beta-1,3-glucanase precursor [Oryza sativa]
  misc_feature (1)..(169): NCBI GI NO: 585078 NR Description: PUTATIVE GLUCAN ENDO-1
  misc_feature (1)..(163): NCBI GI NO: 4097946 NR Description: beta-1,3-glucanase precursor [Oryza sativa]
  misc_feature (1)..(168): NCBI GI NO: 4884532 NR Description: beta-1,3-glucanase [Oryza sativa]
  misc_feature (1)..(169): NCBI GI NO: 322839 NR Description: glucan endo-1,3-beta-D-glucosidase (EC 3
  misc_feature (1)..(168): NCBI GI NO: 7447972 NR Description: glucan endo-1,3-beta-D-glucosidase (EC 3
  misc_feature (1)..(164): NCBI GI NO: 6073860 NR Description: beta-1, 3-glucananse [Musa acuminata]
  misc_feature (1)..(164): NCBI GI NO: 6448757 NR Description: beta-1,3-glucanase [Musa acuminata]
  misc_feature (1)..(164): NCBI GI NO: 34906500 NR Description: beta 1,3-glucanase
MGPIASFLAPRSTPLLVNVYPYFAYSADPASVSLDYALLRSDSGGGAVVVADGGASYGNMFDAIVDAVYAALERAGARGLELVVSETGWPSGGGGAGASVGNASAYVNNVVRHVGSGRGTPRRPGKPVEAFIFAMFNENQKPEGVEQHFGMFQPDMTEVYHVDFMAASSS

SEQ ID NO: 31305 - DNA, 1285 bp, Zea mays subsp. mays
  misc_feature (1)..(1285): Ceres Seq. ID no. 12416626
gaagtcgccggagccacacgcattcccctgcctcgcccttccccctcctatttaccgcccgcgtcgtcccccaacgcacgccttcccacccccgtgcctgcctctgcctgcctgctccccgacgccggggggccccacgacgacccagccccggccccgcgcggtcacagcaagccgggacatggcgcgcggcggcatcgcccgcctactcgccacgctccttttcttcctcctgctcgccacgcccctcgcagacggagcttccgaggcagagacgggcctcgcgcagggcgcgtctgaggcggcggcgccggacgcgggcgcggacacgcagcagcagcacctcctgccgcggcccctcgtcatcgagctcccgtcgtcgcgggccgaggacgaggacgagcccggcgctgacgccgtgccgccggacgtgcgctgcgccagctggcggctggcggcggaggccaacaacctcgcgccgtggagggcggtgccgccggagtgcgcgccgcacgtgcgggactacgtcaccggcgtcgcctaccgctccgacctcgacctcgtggcgcgggagtccgccgcctacgcgcgcgccgccgcgccgctcggcgccgacgggcgcgacgcctgggtcttcgacgtcgacgagaccctgctctccaacctcccgtactacgccgagcacggctacggggctgagttgttcgaccaccacaagtttgacgagtgggtggagaggggcgaggcggccgccatcccctcgagcttgaagctgtacaatgaggttcgcgagctggggttcaagaccttcctgctcacgggcagaagcgaggggcaccgaggcgtcacggtggacaacctcaacaaacaggggttccatgactgggaaaagctcgtactcagggcagcaggtgaccgcaagaaaacagcgacagtctacaaatcagaaaagaggaaggagatggaacaagagggttacaggatcctaggcaactctggcgaccaatggagcgacctgctggggtcttccatgggtgcccgctctttcaagctccctaacccaatgtattatatcccgtgacagaaactgggaaacaaggccgggtgaaaggtgctgcgtttattggatgcacaggcccggtcgaaaacagaaatcatttcgcaatggaatttaaaactgtacaaatgcttctttcactaacttggtgtacattactcgactgcatgtgcagagttacttcaactatgtaagagtgaaaacgggtccggggatcaatgttcctcg

SEQ ID NO: 31306 - protein, 359 aa, Zea mays subsp. mays
  peptide (1)..(359): Ceres Seq. ID no. 12416627
  misc_feature (119)..(358): Pfam Name: Acid phosphatase Pfam Description: HAD superfamily, subfamily IIIB
  misc_feature (107)..(358): NCBI GI NO: 130718 NR Description: Acid phosphatase precursor 1
  misc_feature (107)..(358): NCBI GI NO: 445113 NR Description: acid phosphatase 1
  misc_feature (109)..(359): NCBI GI NO: 15234949 NR Description: acid phosphatase - like protein
  misc_feature (121)..(359): NCBI GI NO: 15241412 NR Description: acid phosphatase; protein id: At5g51260.1
  misc_feature (146)..(358): NCBI GI NO: 15233526 NR Description: acid phosphatase-like protein
  misc_feature (135)..(359): NCBI GI NO: 15233504 NR Description: acid phosphatase-like protein
  misc_feature (142)..(358): NCBI GI NO: 7442053 NR Description: acid phosphatase (EC 3.1.3.-) - soybean
  misc_feature (148)..(358): NCBI GI NO: 19911583 NR Description: syringolide-induced protein B15-3-5 [Glycine max]
  misc_feature (136)..(358): NCBI GI NO: 134145 NR Description: STEM 28 kDa glycoprotein precursor
  misc_feature (154)..(325): NCBI GI NO: 7705154 NR Description: acid phosphatase-1(1); Apase-1(1)
KSPEPHAFPCLALPPPIYRPRRPPTHAFPPPCLPLPACSPTPGGPTTTQPRPRAVTASRDMARGGIARLLATLLFFLLLATPLADGASEAETGLAQGASEAAAPDAGADTQQQHLLPRPLVIELPSSRAEDEDEPGADAVPPDVRCASWRLAAEANNLAPWRAVPPECAPHVRDYVTGVAYRSDLDLVARESAAYARAAAPLGADGRDAWVFDVDETLLSNLPYYAEHGYGAELFDHHKFDEWVERGEAAAIPSSLKLYNEVRELGFKTFLLTGRSEGHRGVTVDNLNKQGFHDWEKLVLRAAGDRKKTATVYKSEKRKEMEQEGYRILGNSGDQWSDLLGSSMGARSFKLPNPMYYIP

SEQ ID NO: 31307 - protein, 299 aa, Zea mays subsp. mays
  peptide (1)..(299): Ceres Seq. ID no. 12416628
  misc_feature (59)..(298): Pfam Name: Acid phosphatase Pfam Description: HAD superfamily, subfamily IIIB
  misc_feature (47)..(298): NCBI GI NO: 130718 NR Description: Acid phosphatase precursor 1
  misc_feature (47)..(298): NCBI GI NO: 445113 NR Description: acid phosphatase 1
  misc_feature (49)..(299): NCBI GI NO: 15234949 NR Description: acid phosphatase - like protein
  misc_feature (61)..(299): NCBI GI NO: 15241412 NR Description: acid phosphatase; protein id: At5g51260.1
  misc_feature (86)..(298): NCBI GI NO: 15233526 NR Description: acid phosphatase-like protein
  misc_feature (75)..(299): NCBI GI NO: 15233504 NR Description: acid phosphatase-like protein
  misc_feature (82)..(298): NCBI GI NO: 7442053 NR Description: acid phosphatase (EC 3.1.3.-) - soybean
  misc_feature (88)..(298): NCBI GI NO: 19911583 NR Description: syringolide-induced protein B15-3-5 [Glycine max]
  misc_feature (76)..(298): NCBI GI NO: 134145 NR Description: STEM 28 kDa glycoprotein precursor
  misc_feature (94)..(265): NCBI GI NO: 7705154 NR Description: acid phosphatase-1(1); Apase-1(1)
MARGGIARLLATLLFFLLLATPLADGASEAETGLAQGASEAAAPDAGADTQQQHLLPRPLVIELPSSRAEDEDEPGADAVPPDVRCASWRLAAEANNLAPWRAVPPECAPHVRDYVTGVAYRSDLDLVARESAAYARAAAPLGADGRDAWVFDVDETLLSNLPYYAEHGYGAELFDHHKFDEWVERGEAAAIPSSLKLYNEVRELGFKTFLLTGRSEGHRGVTVDNLNKQGFHDWEKLVLRAAGDRKKTATVYKSEKRKEMEQEGYRILGNSGDQWSDLLGSSMGARSFKLPNPMYYIP

SEQ ID NO: 31308 - protein, 255 aa, Zea mays subsp. mays
  peptide (1)..(255): Ceres Seq. ID no. 12416629
  misc_feature (51)..(255): Pfam Name: Pfam Description:  Equine herpesvirus glycoprotein gp2
  misc_feature (1)..(255): NCBI GI NO: 11360318 NR Description: probable mucin DKFZp434C196.1 - human (fragment)
  misc_feature (6)..(255): NCBI GI NO: 28574039 NR Description: Salivary gland secretion 1 CG3047-PA
  misc_feature (38)..(255): NCBI GI NO: 5821145 NR Description: RNA binding protein [Homo sapiens]
  misc_feature (26)..(255): NCBI GI NO: 28574039 NR Description: Salivary gland secretion 1 CG3047-PA
  misc_feature (38)..(255): NCBI GI NO: 5821143 NR Description: RNA binding protein [Homo sapiens]
  misc_feature (1)..(255): NCBI GI NO: 5032119 NR Description: Ser/Arg-related nuclear matrix protein
  misc_feature (2)..(255): NCBI GI NO: 6649242 NR Description: splicing coactivator subunit SRm300 [Homo sapiens]
  misc_feature (38)..(255): NCBI GI NO: 6649242 NR Description: splicing coactivator subunit SRm300 [Homo sapiens]
  misc_feature (38)..(255): NCBI GI NO: 19923466 NR Description: splicing coactivator subunit SRm300
  misc_feature (3)..(255): NCBI GI NO: 28574039 NR Description: Salivary gland secretion 1 CG3047-PA
SRRSHTHSPASPFPLLFTARVVPQRTPSHPRACLCLPAPRRRGAPRRPSPGPARSQQAGTWRAAASPAYSPRSFSSSCSPRPSQTELPRQRRASRRARLRRRRRTRARTRSSSTSCRGPSSSSSRRRGPRTRTSPALTPCRRTCAAPAGGWRRRPTTSRRGGRCRRSARRTCGTTSPASPTAPTSTSWRGSPPPTRAPPRRSAPTGATPGSSTSTRPCSPTSRTTPSTATGLSCSTTTSLTSGWRGARRPPSPRA

SEQ ID NO: 31309 - DNA, 1240 bp, Zea mays subsp. mays
  misc_feature (1)..(1240): Ceres Seq. ID no. 12354293
aaaaacagtgcactgactgagtgagtgtcatccagtgcaagctcccagtcccagtcccagtcccagtcccagggtagtagaggactagaggcaggctagagcaaagcacgcggattgcgtggctagcgcaacaatggcgatggccacggccaagctcgtccttctcatggtcctcgtggccggcagctccagcggcggcagcgcgtgggggccgctgatgagccgcctccggatgccgacggcgcgggtcgccccgtcgaggtggcgaaggagcgcctccaggaggactacgtcgtatcggcggctgcgccgctgatccacgcgctgcggccgctgctgggctccgcgggggacctgggccggcgcgccggcgtgccgtgcgacagctggcgcctggccgtggagacgtacaacaagcgcgattggacgacggtgccggccagctgcgagcgctacgtcggccactacatgctcggcggccactaccgccgggactcccgcgtcgtcatcgacgaggccatcgcctacgccgagggcctcaagctgggcggcaacggcaaggaggtctgggtcttcgatatcgacgagacgtccctctccaatctcccctactatgccacccacggcttcggcactaagctatacaacgcgacgagcttcaacgagtacgtgctggaggggagcgcgccggtgctcccggagacgcagcggctgttcaagaagctcgtctcgctgggcatcaagccggtgttcctgacgggccgcaccgaggaccagagggccatcaccgtcaccaacctccgccgccaggggtactccggctggatgacgctgctgctcaagcccgtcggcctcaaggccaccgccatcgcctacaagtccggcgagcgccagaagctccaggacgccgggtacgtcatcgtcggcaacatcggcgaccagtggagcgacatcctcggcgcgccggagggcgcgcgcaccttcaagctgcctgaccccctctactacattggctaagcagcgatgccaacggcgcggctctccatcagcccatcgatcaacccgtcaccccggctccagtgcctgtgctcaactgctctttgtttgttacccctcacttcttatcatcattaattcctaaggttaattccctgagctgagtggaaataaggccgactcggtggagagctgtcgacttctcaataattgctcatgaaaaccatgatggtttatgttatgc

SEQ ID NO: 31310 - protein, 182 aa, Zea mays subsp. mays
  peptide (1)..(182): Ceres Seq. ID no. 12354294
  misc_feature (1)..(181): Pfam Name: Acid phosphatase Pfam Description: HAD superfamily, subfamily IIIB
  misc_feature (1)..(181): NCBI GI NO: 6900306 NR Description: putative acid phosphatase
  misc_feature (1)..(181): NCBI GI NO: 7442053 NR Description: acid phosphatase (EC 3.1.3.-) - soybean
  misc_feature (1)..(181): NCBI GI NO: 34906412 NR Description: putative acid phosphatase
  misc_feature (59)..(182): NCBI GI NO: 34394047 NR Description: acid phosphatase-like
  misc_feature (1)..(181): NCBI GI NO: 134145 NR Description: STEM 28 kDa glycoprotein precursor
  misc_feature (1)..(181): NCBI GI NO: 15233526 NR Description: acid phosphatase-like protein
  misc_feature (1)..(181): NCBI GI NO: 15234949 NR Description: acid phosphatase - like protein
  misc_feature (1)..(181): NCBI GI NO: 15233504 NR Description: acid phosphatase-like protein
  misc_feature (1)..(181): NCBI GI NO: 130718 NR Description: Acid phosphatase precursor 1
  misc_feature (1)..(181): NCBI GI NO: 445113 NR Description: acid phosphatase 1
MLGGHYRRDSRVVIDEAIAYAEGLKLGGNGKEVWVFDIDETSLSNLPYYATHGFGTKLYNATSFNEYVLEGSAPVLPETQRLFKKLVSLGIKPVFLTGRTEDQRAITVTNLRRQGYSGWMTLLLKPVGLKATAIAYKSGERQKLQDAGYVIVGNIGDQWSDILGAPEGARTFKLPDPLYYIG

SEQ ID NO: 31311 - DNA, 1412 bp, Zea mays subsp. mays
  misc_feature (1)..(1412): Ceres Seq. ID no. 12416622
ctaactagggttttgccaagccctctccttccctatcctcacccccatggaccccttttccaagaagcgcaagcccgacgagaacggtgccgtcaccgcctctcccgccggtggggctgccacgctgggcctcacccgcgacgacgtcatccgccttctcgagccgctctcccgggaccagcttgcggacatagcggccgccgccgcgctcgtctcctcgcaagcgctcgacgccgtgcgcgcagccgccgaccgtgacccggccctccgcaagctcttcgttcgggggctaggttgggagaccacatccgactcgctccgcgccatcttctccgcttacggggacctggaggaggccgtcgtcatcactgacaaacccacggggcggtccaagggctacgggttcgtcaccttccgccacgccgattccgccgtcctcgcgctcaaggagccatccaagaagatcgacggtcgcatgactgtcacgcagctcgccgccgccggctcggctggtgggcccgccggtgggcccgccggcagtggcggtgctcctgtgtctgatgtgtcgctccggaagatcttcgttggtaacgttccggcagacatggcatcagagcgtctccttgcgcattttgcctcctatggcgagattgaggaggggccgctgggttttgacaagcagacgggcaagttccggggttttgcactcttcgtatacaagacaccagaaggtgcgcaggcctccctagtggacacggtgaaggtaattgacggccaccagcttgtatgcaagcttgccttagacgggaagaaggagaagcaggggcaatcacagcaacctggacctggcaatcaccaccagcagcagatactgccgggtggtccgcaggacattcagggagggcttgggcttgggtcacaaatgggagcacagtatggtgtccctgggactggtatgccttcatttggttttggtggtgttggcggcgggtttgggggtccaaatccttatggtaacatgccatcttccatgggtggaagtggcgcaggtggtttagggtcgatgggaggccaggtgcccagtggtttggctagtgctggggctggtgcatttgggcctggcggattgggtggtggttcatttggtgtatcatctcagttcggtgctgctgggatgggggcatatggtggccttggaattggtggaggctctatgtaccgcatacaacagggagcaggtgggctgcctgcaggcgcatttggtgatggagggagctacccacctccaggttctggtttccggggccaggaccctcaaggtggaatgtctcctcctggtccaggtggcagggctcctcctatgtatcccaacgtgccaccttatttctaaggtattcatttacactgcttcc

SEQ ID NO: 31312 - protein, 447 aa, Zea mays subsp. mays
  peptide (1)..(447): Ceres Seq. ID no. 12416623
  misc_feature (178)..(248): Pfam Name: a.k.a. RRM, RBD, or RNP domain Pfam Description: RNA recognition motif.
  misc_feature (1)..(354): NCBI GI NO: 34912640 NR Description: P0410E01.24
  misc_feature (1)..(414): NCBI GI NO: 15232459 NR Description: RNA-binding protein; protein id: At3g15010
  misc_feature (32)..(417): NCBI GI NO: 34903096 NR Description: unnamed protein product
  misc_feature (6)..(392): NCBI GI NO: 15226817 NR Description: RRM-containing RNA-binding protein
  misc_feature (12)..(417): NCBI GI NO: 18410591 NR Description: RRM-containing RNA-binding protein
  misc_feature (12)..(417): NCBI GI NO: 14596195 NR Description: putative protein [Arabidopsis thaliana]
  misc_feature (6)..(410): NCBI GI NO: 21666573 NR Description: RNA-binding protein AKIP1 [Vicia faba]
  misc_feature (70)..(409): NCBI GI NO: 27882514 NR Description: Similar to heterogeneous nuclear ribonucleoproteinA1
  misc_feature (65)..(434): NCBI GI NO: 28374304 NR Description: similar to heterogeneous ribonuclear particleprotein
  misc_feature (70)..(434): NCBI GI NO: 542649 NR Description: heterogeneous ribonuclear particle protein A3 -African clawed frog
MDPFSKKRKPDENGAVTASPAGGAATLGLTRDDVIRLLEPLSRDQLADIAAAAALVSSQALDAVRAAADRDPALRKLFVRGLGWETTSDSLRAIFSAYGDLEEAVVITDKPTGRSKGYGFVTFRHADSAVLALKEPSKKIDGRMTVTQLAAAGSAGGPAGGPAGSGGAPVSDVSLRKIFVGNVPADMASERLLAHFASYGEIEEGPLGFDKQTGKFRGFALFVYKTPEGAQASLVDTVKVIDGHQLVCKLALDGKKEKQGQSQQPGPGNHHQQQILPGGPQDIQGGLGLGSQMGAQYGVPGTGMPSFGFGGVGGGFGGPNPYGNMPSSMGGSGAGGLGSMGGQVPSGLASAGAGAFGPGGLGGGSFGVSSQFGAAGMGAYGGLGIGGGSMYRIQQGAGGLPAGAFGDGGSYPPPGSGFRGQDPQGGMSPPGPGGRAPPMYPNVPPYF

SEQ ID NO: 31313 - protein, 304 aa, Zea mays subsp. mays
  peptide (1)..(304): Ceres Seq. ID no. 12416624
  misc_feature (35)..(105): Pfam Name: a.k.a. RRM, RBD, or RNP domain Pfam Description: RNA recognition motif.
  misc_feature (1)..(211): NCBI GI NO: 34912640 NR Description: P0410E01.24
  misc_feature (1)..(271): NCBI GI NO: 15232459 NR Description: RNA-binding protein; protein id: At3g15010
  misc_feature (1)..(274): NCBI GI NO: 34903096 NR Description: unnamed protein product
  misc_feature (1)..(249): NCBI GI NO: 15226817 NR Description: RRM-containing RNA-binding protein
  misc_feature (1)..(274): NCBI GI NO: 18410591 NR Description: RRM-containing RNA-binding protein
  misc_feature (1)..(274): NCBI GI NO: 14596195 NR Description: putative protein [Arabidopsis thaliana]
  misc_feature (1)..(267): NCBI GI NO: 21666573 NR Description: RNA-binding protein AKIP1 [Vicia faba]
  misc_feature (1)..(266): NCBI GI NO: 27882514 NR Description: Similar to heterogeneous nuclear ribonucleoproteinA1
  misc_feature (1)..(291): NCBI GI NO: 28374304 NR Description: similar to heterogeneous ribonuclear particleprotein
  misc_feature (1)..(291): NCBI GI NO: 542649 NR Description: heterogeneous ribonuclear particle protein A3 -African clawed frog
MTVTQLAAAGSAGGPAGGPAGSGGAPVSDVSLRKIFVGNVPADMASERLLAHFASYGEIEEGPLGFDKQTGKFRGFALFVYKTPEGAQASLVDTVKVIDGHQLVCKLALDGKKEKQGQSQQPGPGNHHQQQILPGGPQDIQGGLGLGSQMGAQYGVPGTGMPSFGFGGVGGGFGGPNPYGNMPSSMGGSGAGGLGSMGGQVPSGLASAGAGAFGPGGLGGGSFGVSSQFGAAGMGAYGGLGIGGGSMYRIQQGAGGLPAGAFGDGGSYPPPGSGFRGQDPQGGMSPPGPGGRAPPMYPNVPPYF

SEQ ID NO: 31314 - protein, 261 aa, Zea mays subsp. mays
  peptide (1)..(261): Ceres Seq. ID no. 12416625
  misc_feature (1)..(62): Pfam Name: a.k.a. RRM, RBD, or RNP domain Pfam Description: RNA recognition motif.
  misc_feature (1)..(168): NCBI GI NO: 34912640 NR Description: P0410E01.24
  misc_feature (1)..(228): NCBI GI NO: 15232459 NR Description: RNA-binding protein; protein id: At3g15010
  misc_feature (1)..(231): NCBI GI NO: 34903096 NR Description: unnamed protein product
  misc_feature (1)..(206): NCBI GI NO: 15226817 NR Description: RRM-containing RNA-binding protein
  misc_feature (1)..(231): NCBI GI NO: 18410591 NR Description: RRM-containing RNA-binding protein
  misc_feature (1)..(231): NCBI GI NO: 14596195 NR Description: putative protein [Arabidopsis thaliana]
  misc_feature (1)..(224): NCBI GI NO: 21666573 NR Description: RNA-binding protein AKIP1 [Vicia faba]
  misc_feature (1)..(223): NCBI GI NO: 27882514 NR Description: Similar to heterogeneous nuclear ribonucleoproteinA1
  misc_feature (1)..(248): NCBI GI NO: 28374304 NR Description: similar to heterogeneous ribonuclear particleprotein
  misc_feature (1)..(248): NCBI GI NO: 542649 NR Description: heterogeneous ribonuclear particle protein A3 -African clawed frog
MASERLLAHFASYGEIEEGPLGFDKQTGKFRGFALFVYKTPEGAQASLVDTVKVIDGHQLVCKLALDGKKEKQGQSQQPGPGNHHQQQILPGGPQDIQGGLGLGSQMGAQYGVPGTGMPSFGFGGVGGGFGGPNPYGNMPSSMGGSGAGGLGSMGGQVPSGLASAGAGAFGPGGLGGGSFGVSSQFGAAGMGAYGGLGIGGGSMYRIQQGAGGLPAGAFGDGGSYPPPGSGFRGQDPQGGMSPPGPGGRAPPMYPNVPPYF

SEQ ID NO: 31315 - DNA, 2061 bp, Zea mays subsp. mays
  misc_feature (1)..(2061): Ceres Seq. ID no. 12416040
cattgttgattacacggtatgcgcagagtggttattctgatgaggctgtagaattgtttcttgacatgctggagaacggatttcagccggaccagtacaccttgagcagtatgttatcggcctgtacagagttgggatcattcaggttggggcagcaactgcactctctagcgctcaggcttggactggaatcagacagttgcgtgagctgtgggcttgtggacatgtatgcaaagtctcacaatggacagtccttgcacaatgcgagagaagtcttcaatcggatgccaaagcataatgtgatgtcgtggacggcacttttgtcagggtatgtgcagcgtggatcgcaggacaaccaggttatgatactgttttgcaagatgttaaatgaaggcatcagaccaaaccatatcacatattctagtatgcttaaggcatgtgcaaaccttggtgatcaagattcaggcaggcaaattcatactcattgcgtcaaatctaacctagctgacttaaacgttgttgggaatgctttagtaagcatgtatgctgaatctggttccatagaggaagctagacatgcgttcgaccagctatatgaaaagaacatggtatccttcagcggcaatttagacggagatgggaggagcaacacttatcaagactatcagattgaaagaatggagttaggaatcagcactttcacatttggtagtctgatcagtgctgccgcttgtgtagggatgctaaccaaaggccagcagctgcatgccctctcactgaaggctggatttgggtcagatagagccataggaaactctcttgtatctatgtattctaggtgtggatacctagtagatgcttgccaagtctttgatgaaatgaatgaccataatgtgatctcatggacttcaatgatcagtggtttggcaaaacatgggtatgcagcaagagctctggaattgtttcacgatatgatcgcagctggggtgaaaccaaatgatgtcacatacattgctgttttatctgcatgtagccatgccggtctagttaaagaagggaaggaacactttagaatgatgcagaagcatcatggactcataccaaggatggagcattatgcttgcatggttgatctccttgggcgatcaggccttgttgaagatgcactagattttatcaacgaaatgccttgtcaagtagacgcattggtctggaagacacttcttggtgcctgtaagacccacaacaacatggatattggtgagattgctgctaaccatgtcatacagctcgaaccacaagatccagccccctatgtcttgctttccaacttatacgcagaggctggtttgtgggatcaagtagctaggataaggagtctaatgagggataaaaacttgatgaaagaaaaagggttgagctggatgcatgttgacaataccattcacgagtttcgagctggtgataccagccatccacaagcagaggagatctatacaaagttggagacactgataagagaaatcaaagtcatgggctatgtaccagacaccagcgtagtgctccatgacatgtcggatgagcttaaggaactgtgtctgcttcagcacagcgagaagattgctgttgcattcggtttgatcagttgtacatcagcaacaaagccaataaggatatttaagaacctccgtgtatgcgttgattgtcattcagcactcaagtatgtctccaaggccaccggtagggagataatattgagagatagcaacagattccacaggatgaaggatggggaatgctcgtgcggagaatactggtaacaagcaagctagctagctcacgtagtcacgtttagctgaagagccatgtacagagttctggcgcaccacaacattattgacagtgagtgtccatgttcatattttctgtaggaccttcacaaaatcatagtttatacaaagcatgagttgttgtgatagtttatactttatactagggtcagagtttgtacagttgtatgcactctcctatcaccataaatgcaaattgttttgagtggtc

SEQ ID NO: 31316 - protein, 605 aa, Zea mays subsp. mays
  peptide (1)..(605): Ceres Seq. ID no. 12416041
  misc_feature (370)..(404): Pfam Name: Pfam Description:  PPR repeat
  misc_feature (1)..(605): NCBI GI NO: 30693150 NR Description: pentatricopeptide (PPR) repeat-containing protein
  misc_feature (1)..(560): NCBI GI NO: 11357746 NR Description: hypothetical protein F2K15
  misc_feature (2)..(605): NCBI GI NO: 34915012 NR Description: P0458A05.10
  misc_feature (18)..(605): NCBI GI NO: 15236324 NR Description: putative protein; protein id: At4g13650.1
  misc_feature (2)..(605): NCBI GI NO: 15242550 NR Description: selenium-binding protein-like
  misc_feature (2)..(605): NCBI GI NO: 15234095 NR Description: putative protein; protein id: At4g33170.1
  misc_feature (2)..(605): NCBI GI NO: 34912228 NR Description: P0415C01.16
  misc_feature (2)..(605): NCBI GI NO: 34897884 NR Description: Similar to Arabidopsis thaliana DNA chromosome 4
  misc_feature (2)..(605): NCBI GI NO: 18418348 NR Description: putative protein; protein id: At4g33990.1
  misc_feature (2)..(605): NCBI GI NO: 15220337 NR Description: hypothetical protein; protein id: At1g11290.1
LLITRYAQSGYSDEAVELFLDMLENGFQPDQYTLSSMLSACTELGSFRLGQQLHSLALRLGLESDSCVSCGLVDMYAKSHNGQSLHNAREVFNRMPKHNVMSWTALLSGYVQRGSQDNQVMILFCKMLNEGIRPNHITYSSMLKACANLGDQDSGRQIHTHCVKSNLADLNVVGNALVSMYAESGSIEEARHAFDQLYEKNMVSFSGNLDGDGRSNTYQDYQIERMELGISTFTFGSLISAAACVGMLTKGQQLHALSLKAGFGSDRAIGNSLVSMYSRCGYLVDACQVFDEMNDHNVISWTSMISGLAKHGYAARALELFHDMIAAGVKPNDVTYIAVLSACSHAGLVKEGKEHFRMMQKHHGLIPRMEHYACMVDLLGRSGLVEDALDFINEMPCQVDALVWKTLLGACKTHNNMDIGEIAANHVIQLEPQDPAPYVLLSNLYAEAGLWDQVARIRSLMRDKNLMKEKGLSWMHVDNTIHEFRAGDTSHPQAEEIYTKLETLIREIKVMGYVPDTSVVLHDMSDELKELCLLQHSEKIAVAFGLISCTSATKPIRIFKNLRVCVDCHSALKYVSKATGREIILRDSNRFHRMKDGECSCGEYW

SEQ ID NO: 31317 - protein, 584 aa, Zea mays subsp. mays
  peptide (1)..(584): Ceres Seq. ID no. 12416042
  misc_feature (349)..(383): Pfam Name: Pfam Description:  PPR repeat
  misc_feature (1)..(584): NCBI GI NO: 30693150 NR Description: pentatricopeptide (PPR) repeat-containing protein
  misc_feature (1)..(539): NCBI GI NO: 11357746 NR Description: hypothetical protein F2K15
  misc_feature (1)..(584): NCBI GI NO: 34915012 NR Description: P0458A05.10
  misc_feature (1)..(584): NCBI GI NO: 15236324 NR Description: putative protein; protein id: At4g13650.1
  misc_feature (1)..(584): NCBI GI NO: 15242550 NR Description: selenium-binding protein-like
  misc_feature (1)..(584): NCBI GI NO: 15234095 NR Description: putative protein; protein id: At4g33170.1
  misc_feature (1)..(584): NCBI GI NO: 34912228 NR Description: P0415C01.16
  misc_feature (1)..(584): NCBI GI NO: 34897884 NR Description: Similar to Arabidopsis thaliana DNA chromosome 4
  misc_feature (1)..(584): NCBI GI NO: 18418348 NR Description: putative protein; protein id: At4g33990.1
  misc_feature (1)..(584): NCBI GI NO: 15220337 NR Description: hypothetical protein; protein id: At1g11290.1
MLENGFQPDQYTLSSMLSACTELGSFRLGQQLHSLALRLGLESDSCVSCGLVDMYAKSHNGQSLHNAREVFNRMPKHNVMSWTALLSGYVQRGSQDNQVMILFCKMLNEGIRPNHITYSSMLKACANLGDQDSGRQIHTHCVKSNLADLNVVGNALVSMYAESGSIEEARHAFDQLYEKNMVSFSGNLDGDGRSNTYQDYQIERMELGISTFTFGSLISAAACVGMLTKGQQLHALSLKAGFGSDRAIGNSLVSMYSRCGYLVDACQVFDEMNDHNVISWTSMISGLAKHGYAARALELFHDMIAAGVKPNDVTYIAVLSACSHAGLVKEGKEHFRMMQKHHGLIPRMEHYACMVDLLGRSGLVEDALDFINEMPCQVDALVWKTLLGACKTHNNMDIGEIAANHVIQLEPQDPAPYVLLSNLYAEAGLWDQVARIRSLMRDKNLMKEKGLSWMHVDNTIHEFRAGDTSHPQAEEIYTKLETLIREIKVMGYVPDTSVVLHDMSDELKELCLLQHSEKIAVAFGLISCTSATKPIRIFKNLRVCVDCHSALKYVSKATGREIILRDSNRFHRMKDGECSCGEYW

SEQ ID NO: 31318 - protein, 569 aa, Zea mays subsp. mays
  peptide (1)..(569): Ceres Seq. ID no. 12416043
  misc_feature (334)..(368): Pfam Name: Pfam Description:  PPR repeat
  misc_feature (1)..(569): NCBI GI NO: 30693150 NR Description: pentatricopeptide (PPR) repeat-containing protein
  misc_feature (1)..(524): NCBI GI NO: 11357746 NR Description: hypothetical protein F2K15
  misc_feature (1)..(569): NCBI GI NO: 34915012 NR Description: P0458A05.10
  misc_feature (1)..(569): NCBI GI NO: 15236324 NR Description: putative protein; protein id: At4g13650.1
  misc_feature (1)..(569): NCBI GI NO: 15242550 NR Description: selenium-binding protein-like
  misc_feature (1)..(569): NCBI GI NO: 15234095 NR Description: putative protein; protein id: At4g33170.1
  misc_feature (1)..(569): NCBI GI NO: 34912228 NR Description: P0415C01.16
  misc_feature (1)..(569): NCBI GI NO: 34897884 NR Description: Similar to Arabidopsis thaliana DNA chromosome 4
  misc_feature (1)..(569): NCBI GI NO: 18418348 NR Description: putative protein; protein id: At4g33990.1
  misc_feature (1)..(569): NCBI GI NO: 15220337 NR Description: hypothetical protein; protein id: At1g11290.1
MLSACTELGSFRLGQQLHSLALRLGLESDSCVSCGLVDMYAKSHNGQSLHNAREVFNRMPKHNVMSWTALLSGYVQRGSQDNQVMILFCKMLNEGIRPNHITYSSMLKACANLGDQDSGRQIHTHCVKSNLADLNVVGNALVSMYAESGSIEEARHAFDQLYEKNMVSFSGNLDGDGRSNTYQDYQIERMELGISTFTFGSLISAAACVGMLTKGQQLHALSLKAGFGSDRAIGNSLVSMYSRCGYLVDACQVFDEMNDHNVISWTSMISGLAKHGYAARALELFHDMIAAGVKPNDVTYIAVLSACSHAGLVKEGKEHFRMMQKHHGLIPRMEHYACMVDLLGRSGLVEDALDFINEMPCQVDALVWKTLLGACKTHNNMDIGEIAANHVIQLEPQDPAPYVLLSNLYAEAGLWDQVARIRSLMRDKNLMKEKGLSWMHVDNTIHEFRAGDTSHPQAEEIYTKLETLIREIKVMGYVPDTSVVLHDMSDELKELCLLQHSEKIAVAFGLISCTSATKPIRIFKNLRVCVDCHSALKYVSKATGREIILRDSNRFHRMKDGECSCGEYW

SEQ ID NO: 31319 - DNA, 861 bp, Zea mays subsp. mays
  misc_feature (1)..(861): Ceres Seq. ID no. 12347397
accccgactcctccccatcgcccatcgccgccctccgatccttcatggccgctgccacagccgccgccgccgcgctcgcctccccggcgggcctctccacatcgctggcgcgccgcggcctcgtcagcttcgcacccgcgctccgccccggccctgaccgcagctctcgcgccgtcgccctcctcggtgtacgaactcatgtcacggctgttgatcaagccattgtaaaaggtgatacaaagttggaaggtcctgtggttgttgttactggtgcttccagggggattggaaaagccactgcattggctcttggaaaagcaggctgcaaggtcttggtgaattatgctcgatcttcaaaggaggctgaagaagtctccaaggagattgaagcatctggaggccaggccattacctttggaggagatgtttccaaagaggctgatgtttaatctattataaaagtggctgttgatacatggggaacgattgatgtactagtaaataatgcaggaatcacacgggacacattgttgatgagaatgaagaaatcacagtggcaagatgtgattgatttgaatcttacaggcgttttcctttgcacgcaggctgcaacaaaagtaatgatgaagaagaaaaagggaagaattatcaatatagcatcggttgttggtcttactggtaatgctggacaagctaattatgctgctgccaaaggtttgtattcctgtatatggtacaaattgtaaaatccgtgccagggtttatgtttcctgaccgtggcgacggtcctgttttcactcttctttcttcattgccctgtattctttttgtctgcattcttttttgtcaagcttggcgtcc

SEQ ID NO: 31320 - protein, 148 aa, Zea mays subsp. mays
  peptide (1)..(148): Ceres Seq. ID no. 12347398
  misc_feature (17)..(148): NCBI GI NO: 38346116 NR Description: OSJNBb0006N15.11
  misc_feature (15)..(148): NCBI GI NO: 119791 NR Description: 3-oxoacyl-
  misc_feature (47)..(148): NCBI GI NO: 14422263 NR Description: beta-oxyacyl-
  misc_feature (17)..(148): NCBI GI NO: 14422251 NR Description: 3-oxyacyl-
  misc_feature (64)..(148): NCBI GI NO: 14422247 NR Description: 3-oxyacyl-
  misc_feature (48)..(148): NCBI GI NO: 14422249 NR Description: 3-oxyacyl-
  misc_feature (84)..(148): NCBI GI NO: 13096234 NR Description: Chain A
  misc_feature (53)..(148): NCBI GI NO: 18395461 NR Description: putative 3-oxoacyl
  misc_feature (53)..(148): NCBI GI NO: 99753 NR Description: 3-oxoacyl-
  misc_feature (80)..(148): NCBI GI NO: 14422253 NR Description: 3-oxyacyl-
PDSSPSPIAALRSFMAAATAAAAALASPAGLSTSLARRGLVSFAPALRPGPDRSSRAVALLGVRTHVTAVDQAIVKGDTKLEGPVVVVTGASRGIGKATALALGKAGCKVLVNYARSSKEAEEVSKEIEASGGQAITFGGDVSKEADV

SEQ ID NO: 31321 - protein, 134 aa, Zea mays subsp. mays
  peptide (1)..(134): Ceres Seq. ID no. 12347399
  misc_feature (3)..(134): NCBI GI NO: 38346116 NR Description: OSJNBb0006N15.11
  misc_feature (1)..(134): NCBI GI NO: 119791 NR Description: 3-oxoacyl-
  misc_feature (33)..(134): NCBI GI NO: 14422263 NR Description: beta-oxyacyl-
  misc_feature (3)..(134): NCBI GI NO: 14422251 NR Description: 3-oxyacyl-
  misc_feature (50)..(134): NCBI GI NO: 14422247 NR Description: 3-oxyacyl-
  misc_feature (34)..(134): NCBI GI NO: 14422249 NR Description: 3-oxyacyl-
  misc_feature (70)..(134): NCBI GI NO: 13096234 NR Description: Chain A
  misc_feature (39)..(134): NCBI GI NO: 18395461 NR Description: putative 3-oxoacyl
  misc_feature (39)..(134): NCBI GI NO: 99753 NR Description: 3-oxoacyl-
  misc_feature (66)..(134): NCBI GI NO: 14422253 NR Description: 3-oxyacyl-
MAAATAAAAALASPAGLSTSLARRGLVSFAPALRPGPDRSSRAVALLGVRTHVTAVDQAIVKGDTKLEGPVVVVTGASRGIGKATALALGKAGCKVLVNYARSSKEAEEVSKEIEASGGQAITFGGDVSKEADV

SEQ ID NO: 31322 - protein, 75 aa, Zea mays subsp. mays
  peptide (1)..(75): Ceres Seq. ID no. 12347400
TPTPPHRPSPPSDPSWPLPQPPPPRSPPRRASPHRWRAAASSASHPRSAPALTAALAPSPSSVYELMSRLLIKPL

SEQ ID NO: 31323 - DNA, 1417 bp, Zea mays subsp. mays
  misc_feature (1)..(1417): Ceres Seq. ID no. 12383227
gcacgagaccattacctagaacatcctaatcgaaaaaggcaattgcaagcagcacaaggctccaaagatgcaccgctccttcctcctcgtctctgcactcgtagccaccgcgctttccaccgacaccaccgttgccgctgcccagagccagaggcagaggtcatgggccgaactcagcgggcgggacaactgggacgggctcctggacccgctcgacggcgacctccggcgcgccgtcatccggtacgggaagctggcgcaggcgacgtcgtacgcgttcatcggcgacccggcgtcgccgtacgcgggcgcgtcgcggtacgcccccggcgcgttcctccgcagggcgcaggcgcccgacccggacgcgtacaacgtgacgaggttcctgtacgcgacgtcgagcgcgcgcgtccccggccagttcatcacgcggccggcgccgccgggggcgtggagcgccgagtccaactggatggggtacgtcggccgtggccacggacgccggcgtcgcgaggcctggggaggcgggacatcgtggtggcgtggcgcgggaccaagcgcgccgtggagtgggccaacgacctggacatcacgctggtgccggcggcgggcgtcgtcgggcctggccccgggtggtcgcagccggcggtgcaccggggtttcttgtccgtgtacgcgtcgaggaactccacgtcgcggttcaacaagcaaagcgccagagagcaggtgttggcctagattagaaggctattggacgcgtacaagggcgagaactgcagcatcacgctaaccggccacagcctgggcgcggcgctctccacgctcaccgccatcgacatcgtcgccaacggcctcaacgtccggggccccaacaacgacacggtccccgtcgccgccatcgtcttcggcagcccccgcgtgggcgacgaccagttcaagaaggcgttcgactcggcgcccggcgcccggctgctccgggtccggaacgcgcccgacgtcgtgcccaccgtcctgcccaacgccttctacaaggacgtcggcgtggagctgctgctggacacgcgcaagtcgccgcacctcaagaggcccggcccgggccccgccgcctggcacaacctcgagtgctacctgcacggcgtcgcgggcacgcagggcgccggcgacgccgccgggttcagcctggaggtggaccgcgacgtcgcgctggtgaacaaggaggtggacgcgctcagcgacgactaccccgtgccggcggcctggtgggtggaggggaacaagggcatgaccagggacgccagcggacgctgggttttgcaggatcatgaggagggtaacctcgctatgtgatgattttgataacttcattaaagatggttattaatgaattaataatacgaaagcaagagttttctcc

SEQ ID NO: 31324 - protein, 246 aa, Zea mays subsp. mays
  peptide (1)..(246): Ceres Seq. ID no. 12383228
  misc_feature (131)..(246): NCBI GI NO: 34911842 NR Description: lipase-like protein
  misc_feature (174)..(246): NCBI GI NO: 34911830 NR Description: lipase-like protein
  misc_feature (174)..(246): NCBI GI NO: 34911832 NR Description: lipase-like protein
  misc_feature (174)..(246): NCBI GI NO: 15233922 NR Description: lipase-like protein; protein id: At4g18550.1
  misc_feature (170)..(246): NCBI GI NO: 34910484 NR Description: putative lipase
  misc_feature (174)..(246): NCBI GI NO: 15221426 NR Description: lipase-like protein; protein id: At1g06250
  misc_feature (174)..(246): NCBI GI NO: 21537306 NR Description: lipase-like protein [Arabidopsis thaliana]
  misc_feature (174)..(246): NCBI GI NO: 1527001 NR Description: Ipomoea nil Pn47p
  misc_feature (174)..(246): NCBI GI NO: 30679836 NR Description: lipase (class 3) family [Arabidopsis thaliana]
  misc_feature (174)..(246): NCBI GI NO: 15224613 NR Description: putative lipase; protein id: At2g31100.1
ARDHYLEHPNRKRQLQAAQGSKDAPLLPPRLCTRSHRAFHRHHRCRCPEPEAEVMGRTQRAGQLGRAPGPARRRPPARRHPVREAGAGDVVRVHRRPGVAVRGRVAVRPRRVPPQGAGARPGRVQRDEVPVRDVERARPRPVHHAAGAAGGVERRVQLDGVRRPWPRTPASRGLGRRDIVVAWRGTKRAVEWANDLDITLVPAAGVVGPGPGWSQPAVHRGFLSVYASRNSTSRFNKQSAREQVLA

SEQ ID NO: 31325 - protein, 241 aa, Zea mays subsp. mays
  peptide (1)..(241): Ceres Seq. ID no. 12383229
  misc_feature (170)..(241): Pfam Name: Pfam Description:  Equine herpesvirus glycoprotein gp2
  misc_feature (31)..(140): NCBI GI NO: 34911830 NR Description: lipase-like protein
  misc_feature (33)..(140): NCBI GI NO: 34911832 NR Description: lipase-like protein
  misc_feature (31)..(140): NCBI GI NO: 15233922 NR Description: lipase-like protein; protein id: At4g18550.1
  misc_feature (31)..(168): NCBI GI NO: 34910484 NR Description: putative lipase
  misc_feature (31)..(140): NCBI GI NO: 15221426 NR Description: lipase-like protein; protein id: At1g06250
  misc_feature (31)..(140): NCBI GI NO: 21537306 NR Description: lipase-like protein [Arabidopsis thaliana]
  misc_feature (31)..(174): NCBI GI NO: 1527001 NR Description: Ipomoea nil Pn47p
  misc_feature (24)..(140): NCBI GI NO: 30679836 NR Description: lipase (class 3) family [Arabidopsis thaliana]
  misc_feature (33)..(65): NCBI GI NO: 15224613 NR Description: putative lipase; protein id: At2g31100.1
  misc_feature (26)..(168): NCBI GI NO: 18402385 NR Description: putative lipase; protein id: At2g30550
MHRSFLLVSALVATALSTDTTVAAAQSQRQRSWAELSGRDNWDGLLDPLDGDLRRAVIRYGKLAQATSYAFIGDPASPYAGASRYAPGAFLRRAQAPDPDAYNVTRFLYATSSARVPGQFITRPAPPGAWSAESNWMGYVGRGHGRRRREAWGGGTSWWRGAGPSAPWSGPTTWTSRWCRRRASSGLAPGGRSRRCTGVSCPCTRRGTPRRGSTSKAPESRCWPRLEGYWTRTRARTAASR

SEQ ID NO: 31326 - protein, 192 aa, Zea mays subsp. mays
  peptide (1)..(192): Ceres Seq. ID no. 12383230
  misc_feature (77)..(192): NCBI GI NO: 34911842 NR Description: lipase-like protein
  misc_feature (120)..(192): NCBI GI NO: 34911830 NR Description: lipase-like protein
  misc_feature (120)..(192): NCBI GI NO: 34911832 NR Description: lipase-like protein
  misc_feature (120)..(192): NCBI GI NO: 15233922 NR Description: lipase-like protein; protein id: At4g18550.1
  misc_feature (116)..(192): NCBI GI NO: 34910484 NR Description: putative lipase
  misc_feature (120)..(192): NCBI GI NO: 15221426 NR Description: lipase-like protein; protein id: At1g06250
  misc_feature (120)..(192): NCBI GI NO: 21537306 NR Description: lipase-like protein [Arabidopsis thaliana]
  misc_feature (120)..(192): NCBI GI NO: 1527001 NR Description: Ipomoea nil Pn47p
  misc_feature (120)..(192): NCBI GI NO: 30679836 NR Description: lipase (class 3) family [Arabidopsis thaliana]
  misc_feature (120)..(192): NCBI GI NO: 15224613 NR Description: putative lipase; protein id: At2g31100.1
MGRTQRAGQLGRAPGPARRRPPARRHPVREAGAGDVVRVHRRPGVAVRGRVAVRPRRVPPQGAGARPGRVQRDEVPVRDVERARPRPVHHAAGAAGGVERRVQLDGVRRPWPRTPASRGLGRRDIVVAWRGTKRAVEWANDLDITLVPAAGVVGPGPGWSQPAVHRGFLSVYASRNSTSRFNKQSAREQVLA

SEQ ID NO: 31327 - DNA, 1672 bp, Zea mays subsp. mays
  misc_feature (1)..(1672): Ceres Seq. ID no. 12354367
acactcccactcggccactcccacctgtaggttcacgggaggcgaggaccttgcccccctgcattcttcccgtatcgcggaccgatcctcgccgcgggaggcgagcggagcggggcgtttctgcgggggagaagcgcgtccctgcaatttctgagagaggggaggcggcgagtggaaaagagcagacgttgctatcctatcttgctgacacagcggcgttgtggcgaggcgcatggcgagggcgcgcggtggcgccgcgtggtgggtgctggcagcggcgtgggtgctgtgggcggcggcggctgcggcggaggcagaggccaggtcgccgtcggcgaggagggtgcaccggcacctcaagcgcctcaacaagccggccgtcaagagcatcgagagtccagatggagacatcatcgactgcgtgcatatctcccaccagccagcctttgatcatcctctcctcaagaaccacacaatacagtttaggccggcgtaccaccctgaaggtctatacgatgataccaagagcagcataggctcaaacaatgctggcgagaggccgatgctccagatgtggcatcgaaatggcaggtgccccgagggcacggttccaatcaggagaaccaagaaggacgacctgcttcgagctagctccgtgaggcggtatggcaggaagcggcacactgctccgaacccactgtctgttgatcccaacatgctcagcgagggtggccaccaacacgccatcgcgtacgtccagggcgacaagtactatggtgcaaaggccaccattaatgtgtgggagcccaagattcagcaggctaacgaatttagcctgtcccagctctggatcttggggggttcatttggggaggatctcaacagcatagaggctggctggcaggttagccctgacctctatggagacaacaacaccaggctgttcacatattggactagtgatgcataccaagccacaggttgctacaacatgttgtgctctggtttcattcagataaacagcgaggttgccatgggggctagtatcttccccatctcgaactacgcgggctcccaatatgatattagcatcctgatctggaaggaccccaaggaaggcaactggtggatgcagtttggcaaggaatacgtcctgggctactggccgtccttcctcttctcctacctcgcggacagcgcgtcgatgatcgaatggggcggggaggtggtgaactcggagcccgacggcacgcacacatcgacccagatgggcagcgggcacttcccggaggaagggttcagcaaggcgagctacttcaagaacgttcaggtggtgtacagcagcaaccagctcagcgcccccaagggcgtaggcaccttcaccgagcagtccaactgctacgacgtgcagaacggtaacaatggggactggggcacctacttctactacggcggccctggcaagaactcgaactgcccgtgactggtgcttctaatgtgtagtgtgaagtgccgtcaccactagcaaaaaaatgtaacccaagcgttcaggttcgcttatacagcgtcaatctgcatctccttgttcagtcttaggtagtgtgtaacatgtgcatgtgctctctagaccctaatgttttcttcttcttttcattgtattttcttcttgtgc

SEQ ID NO: 31328 - protein, 416 aa, Zea mays subsp. mays
  peptide (1)..(416): Ceres Seq. ID no. 12354368
  misc_feature (180)..(374): Pfam Name: Pfam Description:  Arabidopsis proteins of unknown function
  misc_feature (8)..(416): NCBI GI NO: 34393299 NR Description: putative DD1A protein
  misc_feature (2)..(416): NCBI GI NO: 30103019 NR Description: unknown protein
  misc_feature (2)..(416): NCBI GI NO: 34393554 NR Description: putative carboxyl-terminal proteinase
  misc_feature (1)..(416): NCBI GI NO: 15222707 NR Description: unknown protein; protein id: At1g55360.1
  misc_feature (17)..(416): NCBI GI NO: 18400044 NR Description: expressed protein; protein id: At3g13510
  misc_feature (17)..(416): NCBI GI NO: 21593294 NR Description: putative carboxyl-terminal peptidase
  misc_feature (1)..(416): NCBI GI NO: 27311623 NR Description: unknown protein [Arabidopsis thaliana]
  misc_feature (5)..(415): NCBI GI NO: 15241244 NR Description: putative protein; protein id: At5g56530
  misc_feature (37)..(416): NCBI GI NO: 18406483 NR Description: expressed protein; protein id: At2g44210
  misc_feature (36)..(416): NCBI GI NO: 15220207 NR Description: putative carboxyl-terminal peptidase
MARARGGAAWWVLAAAWVLWAAAAAAEAEARSPSARRVHRHLKRLNKPAVKSIESPDGDIIDCVHISHQPAFDHPLLKNHTIQFRPAYHPEGLYDDTKSSIGSNNAGERPMLQMWHRNGRCPEGTVPIRRTKKDDLLRASSVRRYGRKRHTAPNPLSVDPNMLSEGGHQHAIAYVQGDKYYGAKATINVWEPKIQQANEFSLSQLWILGGSFGEDLNSIEAGWQVSPDLYGDNNTRLFTYWTSDAYQATGCYNMLCSGFIQINSEVAMGASIFPISNYAGSQYDISILIWKDPKEGNWWMQFGKEYVLGYWPSFLFSYLADSASMIEWGGEVVNSEPDGTHTSTQMGSGHFPEEGFSKASYFKNVQVVYSSNQLSAPKGVGTFTEQSNCYDVQNGNNGDWGTYFYYGGPGKNSNCP

SEQ ID NO: 31329 - protein, 306 aa, Zea mays subsp. mays
  peptide (1)..(306): Ceres Seq. ID no. 12354369
  misc_feature (70)..(264): Pfam Name: Pfam Description:  Arabidopsis proteins of unknown function
  misc_feature (1)..(306): NCBI GI NO: 34393299 NR Description: putative DD1A protein
  misc_feature (1)..(306): NCBI GI NO: 30103019 NR Description: unknown protein
  misc_feature (1)..(306): NCBI GI NO: 34393554 NR Description: putative carboxyl-terminal proteinase
  misc_feature (1)..(306): NCBI GI NO: 15222707 NR Description: unknown protein; protein id: At1g55360.1
  misc_feature (1)..(306): NCBI GI NO: 18400044 NR Description: expressed protein; protein id: At3g13510
  misc_feature (1)..(306): NCBI GI NO: 21593294 NR Description: putative carboxyl-terminal peptidase
  misc_feature (1)..(306): NCBI GI NO: 27311623 NR Description: unknown protein [Arabidopsis thaliana]
  misc_feature (1)..(305): NCBI GI NO: 15241244 NR Description: putative protein; protein id: At5g56530
  misc_feature (1)..(306): NCBI GI NO: 18406483 NR Description: expressed protein; protein id: At2g44210
  misc_feature (1)..(306): NCBI GI NO: 15220207 NR Description: putative carboxyl-terminal peptidase
MLQMWHRNGRCPEGTVPIRRTKKDDLLRASSVRRYGRKRHTAPNPLSVDPNMLSEGGHQHAIAYVQGDKYYGAKATINVWEPKIQQANEFSLSQLWILGGSFGEDLNSIEAGWQVSPDLYGDNNTRLFTYWTSDAYQATGCYNMLCSGFIQINSEVAMGASIFPISNYAGSQYDISILIWKDPKEGNWWMQFGKEYVLGYWPSFLFSYLADSASMIEWGGEVVNSEPDGTHTSTQMGSGHFPEEGFSKASYFKNVQVVYSSNQLSAPKGVGTFTEQSNCYDVQNGNNGDWGTYFYYGGPGKNSNCP

SEQ ID NO: 31330 - protein, 303 aa, Zea mays subsp. mays
  peptide (1)..(303): Ceres Seq. ID no. 12354370
  misc_feature (67)..(261): Pfam Name: Pfam Description:  Arabidopsis proteins of unknown function
  misc_feature (1)..(303): NCBI GI NO: 34393299 NR Description: putative DD1A protein
  misc_feature (1)..(303): NCBI GI NO: 30103019 NR Description: unknown protein
  misc_feature (1)..(303): NCBI GI NO: 34393554 NR Description: putative carboxyl-terminal proteinase
  misc_feature (1)..(303): NCBI GI NO: 15222707 NR Description: unknown protein; protein id: At1g55360.1
  misc_feature (1)..(303): NCBI GI NO: 18400044 NR Description: expressed protein; protein id: At3g13510
  misc_feature (1)..(303): NCBI GI NO: 21593294 NR Description: putative carboxyl-terminal peptidase
  misc_feature (1)..(303): NCBI GI NO: 27311623 NR Description: unknown protein [Arabidopsis thaliana]
  misc_feature (1)..(302): NCBI GI NO: 15241244 NR Description: putative protein; protein id: At5g56530
  misc_feature (1)..(303): NCBI GI NO: 18406483 NR Description: expressed protein; protein id: At2g44210
  misc_feature (1)..(303): NCBI GI NO: 15220207 NR Description: putative carboxyl-terminal peptidase
MWHRNGRCPEGTVPIRRTKKDDLLRASSVRRYGRKRHTAPNPLSVDPNMLSEGGHQHAIAYVQGDKYYGAKATINVWEPKIQQANEFSLSQLWILGGSFGEDLNSIEAGWQVSPDLYGDNNTRLFTYWTSDAYQATGCYNMLCSGFIQINSEVAMGASIFPISNYAGSQYDISILIWKDPKEGNWWMQFGKEYVLGYWPSFLFSYLADSASMIEWGGEVVNSEPDGTHTSTQMGSGHFPEEGFSKASYFKNVQVVYSSNQLSAPKGVGTFTEQSNCYDVQNGNNGDWGTYFYYGGPGKNSNCP

SEQ ID NO: 31331 - DNA, 1255 bp, Zea mays subsp. mays
  misc_feature (1)..(1255): Ceres Seq. ID no. 12415959
accctcacttcccctactgcgcgtctcgtctgcactaggattggattgaatccagaaccctctcctgcagcctgcaggttgtcgtcgccctcttcctcctccttcgctgttggctgttactattgcttccgcttccgccgccgcggaaatcaaactaatctgatcgagaccacaccgttccagagagatcccccaaacaaaaaaaagagcacgggatcgaaatggagctcgacggcaagtacagcaaggaccagagcctcaaatgcgaatgcctcctcttcgacctcgatgacacactatacccgttcaactccggcattgctgccgacataaagaagaacatccaagactatatggtgcacaagctcggcgttgacgaggccataagcttggacctatgcgtcctcctctacaagcagtacggaaccaccatggctggcttgagggctgttgggtaccagtttgattacgatgactaccacagctttgttcatgggaggttgtcttatgacaaaatcaagcctgatcctgtgcttaggaacatcctcctcagcttacccattcgcaaacttgtgttcacaaacggtgacagaacacatgcttcaagggccctcaagaggcttggcattgaggattgtttcgaaggagtcgtgtgctttgagacactgaacccgacatctcctcctcctcctgtcccagctcaggaacttgaaatctttgatctaatgaagcatctggctcatccacagcccgcggtgcagctaccaaaatcacctatcctatgcaaaccgtcaagggaggccatgctgcaggctctcaaggtcgcctccattaatccacagacaactatattgttcgatgacagcttcaggaacattgaagctgcaaagcaaattggaatgtgtactgtcctggttggaacatctgagcggaaaaagggtgctgaccatgccttggaaagcctccacaacatgaaggaagcactgccggagctgtgggaggaagctgagaaggatgaagatgtgaggaattcgagcaaagccggaatcgagacatctgtgatcgcgtaatcttttttgttccttggttacaaatgtagccccttctgttttccttggaggacaacacgaggtggtggtgtatgaaaaaagaggagacctcctcaaggggtgggggggactgactgatactacgaccactgatgttacaccccgtaaactattactatccaataagaatgttttcttcttcaact

SEQ ID NO: 31332 - protein, 282 aa, Zea mays subsp. mays; identical to SEQ ID NO: 28437
  peptide (1)..(282): Ceres Seq. ID no. 12415960
  misc_feature (16)..(235): Pfam Name: Pfam Description:  haloacid dehalogenase-like hydrolase
  misc_feature (1)..(154): NCBI GI NO: 34906034 NR Description: P0518C01.30
  misc_feature (181)..(282): NCBI GI NO: 34906034 NR Description: P0518C01.30
  misc_feature (1)..(152): NCBI GI NO: 7406669 NR Description: putative ripening-related protein [Vitis vinifera]
  misc_feature (141)..(282): NCBI GI NO: 7406669 NR Description: putative ripening-related protein [Vitis vinifera]
  misc_feature (1)..(282): NCBI GI NO: 15241720 NR Description: putative protein; protein id: At5g02230
  misc_feature (1)..(282): NCBI GI NO: 21593165 NR Description: unknown [Arabidopsis thaliana]
  misc_feature (1)..(278): NCBI GI NO: 30697234 NR Description: haloacid dehalogenase-like hydrolase family
  misc_feature (1)..(278): NCBI GI NO: 30697236 NR Description: haloacid dehalogenase-like hydrolase family
  misc_feature (1)..(278): NCBI GI NO: 21618155 NR Description: putative ripening-related protein-like
  misc_feature (14)..(282): NCBI GI NO: 40714684 NR Description: expressed protein

SEQ ID NO: 31333 - protein, 238 aa, Zea mays subsp. mays; identical to SEQ ID NO: 28438
  peptide (1)..(238): Ceres Seq. ID no. 12415961
  misc_feature (1)..(191): Pfam Name: Pfam Description:  haloacid dehalogenase-like hydrolase
  misc_feature (1)..(110): NCBI GI NO: 34906034 NR Description: P0518C01.30
  misc_feature (137)..(238): NCBI GI NO: 34906034 NR Description: P0518C01.30
  misc_feature (1)..(108): NCBI GI NO: 7406669 NR Description: putative ripening-related protein [Vitis vinifera]
  misc_feature (97)..(238): NCBI GI NO: 7406669 NR Description: putative ripening-related protein [Vitis vinifera]
  misc_feature (1)..(238): NCBI GI NO: 15241720 NR Description: putative protein; protein id: At5g02230
  misc_feature (1)..(238): NCBI GI NO: 21593165 NR Description: unknown [Arabidopsis thaliana]
  misc_feature (1)..(234): NCBI GI NO: 30697234 NR Description: haloacid dehalogenase-like hydrolase family
  misc_feature (1)..(234): NCBI GI NO: 30697236 NR Description: haloacid dehalogenase-like hydrolase family
  misc_feature (1)..(234): NCBI GI NO: 21618155 NR Description: putative ripening-related protein-like
  misc_feature (1)..(238): NCBI GI NO: 40714684 NR Description: expressed protein

SEQ ID NO: 31334 - protein, 212 aa, Zea mays subsp. mays; identical to SEQ ID NO: 28439
  peptide (1)..(212): Ceres Seq. ID no. 12415962
  misc_feature (1)..(165): Pfam Name: Pfam Description:  haloacid dehalogenase-like hydrolase
  misc_feature (1)..(84): NCBI GI NO: 34906034 NR Description: P0518C01.30
  misc_feature (111)..(212): NCBI GI NO: 34906034 NR Description: P0518C01.30
  misc_feature (1)..(82): NCBI GI NO: 7406669 NR Description: putative ripening-related protein [Vitis vinifera]
  misc_feature (71)..(212): NCBI GI NO: 7406669 NR Description: putative ripening-related protein [Vitis vinifera]
  misc_feature (1)..(212): NCBI GI NO: 15241720 NR Description: putative protein; protein id: At5g02230
  misc_feature (1)..(212): NCBI GI NO: 21593165 NR Description: unknown [Arabidopsis thaliana]
  misc_feature (1)..(208): NCBI GI NO: 30697234 NR Description: haloacid dehalogenase-like hydrolase family
  misc_feature (1)..(208): NCBI GI NO: 30697236 NR Description: haloacid dehalogenase-like hydrolase family
  misc_feature (1)..(208): NCBI GI NO: 21618155 NR Description: putative ripening-related protein-like
  misc_feature (1)..(212): NCBI GI NO: 40714684 NR Description: expressed protein

SEQ ID NO: 31335 - DNA, 1957 bp, Zea mays subsp. mays
  misc_feature (1)..(1957): Ceres Seq. ID no. 13493484
aacgtgtcctcctacaattgccgacgtagccgtcgtcttcgccagagcagcgccagcgggcccagttcttgaaagggtgcagtgtatccaaggagacaaaggcatcggtctgcagtttcttggctacaaattcaaacagcactagggtgaaatcagtgggcttgagagtagcatcatccttcaaatgatggtggttatccagctgacggtttctctgggaatggcaacacgctattgccaaaaagcacatccgttcgtggcgaggaccatccggttgctgatcctgtactcccaatggattcaatgatgacgccagaaatcctctctgctaatttggcacttgttatggacaagttctcagatgatgacacagatactgaacttgatttggatagcccgacagagggcttcgcgtcgattgcagatgccattgaggacgtacggcaaggaaaacttgtgattgttgttgatgacgaatcaagggaaaatgaaggagatctgataatggctgcctccttggttaccccagaggcgatggcttttatagtaagacatggaacaggaattgtttgtgtcagcattaaagaagatgatctggaaagactatgccttcctttgatggttaccacaaaagaaaacgaggagaagctatgcactgcttttactgttacagtggatgcaaaagagggcacaactactggagtatctgccaaagacagggcaaaaacagttatgactcttgcatctcctgactctaggcctgaggacttcaaccgccctggtcatattttccctttgaaatacagagaagggggtgttctgaaacgagctggacacacagaggcatcggttgaccttgccatgctggctggattacctcctgttgctgtcctttgtgagattgtggatgatgcagatggttccatggctcgcctgccaaagttgcgtgtctttgctgaaagggaaaatttgaagattatatctattgctgacttgattaggtataggaggaaaagagacaggctagttgaacgtgcttctgttgcacgcttgccttctcaatggggcaatggccatgcatattgctacagatctgctattgatggcatcgagcatcttgccatggtgaaaggtgatattggtgatggccaagacattatggtgagggtgcactctgagtgcctcacaggcgacatttttagatcggcaagatgcgattgcggtgaccagcttgcaatggcaattgagatgattgagaaggccggaaggggcgtaatagtttatctccgtggacacgaaggacggggtatcggtctgggccacaagcttcgtgcttataacttgcaggatgatgggcgtgatactgtggaagctaatgaagaacttggtcttcctgtggactcacgagaatatgggattggcgcacagatactacgggacctaggagtccgttcgatgaagctgatgactaatagccctgcgaaatatagtggtctgaagggttatggactgagcattgcgggcagggtgcccttggttacgccaattaccagcgagaaccgtaagtacctcgagaccaaaagaacaaagatggggcatgtatatggattggctaatgcgcaggttaaccagccaagtggtagccagagcacagaagagaagcattgagcccaaaaaagtgatgcagtcttctttttgggagttcctgaaatcttctccctcgatatttccatatattctttttttctatatttccatatattctttctttcacatagaaggccgttttgttcttcaactgtagctgtaggtttcaagatggttaatgagcctaataaaagcaagtttaataatataagcaactgttcttgtaaggagctttacagtctgtcttatatagccgatatgtataatggttagctttcacaatgaatatatgatcaactgtttttctcac

SEQ ID NO: 31336 - protein, 457 aa, Zea mays subsp. mays
  peptide (1)..(457): Ceres Seq. ID no. 13493485
  misc_feature (1)..(439): NCBI GI NO: 27735197 NR Description: Riboflavin biosynthesis protein ribA
  misc_feature (22)..(453): NCBI GI NO: 7436011 NR Description: GTP cyclohydrolase II (EC 3
  misc_feature (71)..(439): NCBI GI NO: 30697989 NR Description: GTP cyclohydrolase II
  misc_feature (26)..(438): NCBI GI NO: 29367375 NR Description: GTP cyclohydrolase II/3
  misc_feature (26)..(437): NCBI GI NO: 18424277 NR Description: GTP cyclohydrolase II / 3
  misc_feature (5)..(416): NCBI GI NO: 25290324 NR Description: probable GTP cyclohydrolase
  misc_feature (5)..(416): NCBI GI NO: 30681714 NR Description: GTP cyclohydrolase -related [Arabidopsis thaliana]
  misc_feature (39)..(435): NCBI GI NO: 23111383 NR Description: hypothetical protein
  misc_feature (42)..(441): NCBI GI NO: 23018011 NR Description: hypothetical protein [Thermobifida fusca]
  misc_feature (39)..(450): NCBI GI NO: 23020139 NR Description: hypothetical protein
MDSMMTPEILSANLALVMDKFSDDDTDTELDLDSPTEGFASIADAIEDVRQGKLVIVVDDESRENEGDLIMAASLVTPEAMAFIVRHGTGIVCVSIKEDDLERLCLPLMVTTKENEEKLCTAFTVTVDAKEGTTTGVSAKDRAKTVMTLASPDSRPEDFNRPGHIFPLKYREGGVLKRAGHTEASVDLAMLAGLPPVAVLCEIVDDADGSMARLPKLRVFAERENLKIISIADLIRYRRKRDRLVERASVARLPSQWGNGHAYCYRSAIDGIEHLAMVKGDIGDGQDIMVRVHSECLTGDIFRSARCDCGDQLAMAIEMIEKAGRGVIVYLRGHEGRGIGLGHKLRAYNLQDDGRDTVEANEELGLPVDSREYGIGAQILRDLGVRSMKLMTNSPAKYSGLKGYGLSIAGRVPLVTPITSENRKYLETKRTKMGHVYGLANAQVNQPSGSQSTEEKH

SEQ ID NO: 31337 - protein, 454 aa, Zea mays subsp. mays
  peptide (1)..(454): Ceres Seq. ID no. 13493486
  misc_feature (1)..(436): NCBI GI NO: 27735197 NR Description: Riboflavin biosynthesis protein ribA
  misc_feature (19)..(450): NCBI GI NO: 7436011 NR Description: GTP cyclohydrolase II (EC 3
  misc_feature (68)..(436): NCBI GI NO: 30697989 NR Description: GTP cyclohydrolase II
  misc_feature (23)..(435): NCBI GI NO: 29367375 NR Description: GTP cyclohydrolase II/3
  misc_feature (23)..(434): NCBI GI NO: 18424277 NR Description: GTP cyclohydrolase II / 3
  misc_feature (2)..(413): NCBI GI NO: 25290324 NR Description: probable GTP cyclohydrolase
  misc_feature (2)..(413): NCBI GI NO: 30681714 NR Description: GTP cyclohydrolase -related [Arabidopsis thaliana]
  misc_feature (36)..(432): NCBI GI NO: 23111383 NR Description: hypothetical protein
  misc_feature (39)..(438): NCBI GI NO: 23018011 NR Description: hypothetical protein [Thermobifida fusca]
  misc_feature (36)..(447): NCBI GI NO: 23020139 NR Description: hypothetical protein
MMTPEILSANLALVMDKFSDDDTDTELDLDSPTEGFASIADAIEDVRQGKLVIVVDDESRENEGDLIMAASLVTPEAMAFIVRHGTGIVCVSIKEDDLERLCLPLMVTTKENEEKLCTAFTVTVDAKEGTTTGVSAKDRAKTVMTLASPDSRPEDFNRPGHIFPLKYREGGVLKRAGHTEASVDLAMLAGLPPVAVLCEIVDDADGSMARLPKLRVFAERENLKIISIADLIRYRRKRDRLVERASVARLPSQWGNGHAYCYRSAIDGIEHLAMVKGDIGDGQDIMVRVHSECLTGDIFRSARCDCGDQLAMAIEMIEKAGRGVIVYLRGHEGRGIGLGHKLRAYNLQDDGRDTVEANEELGLPVDSREYGIGAQILRDLGVRSMKLMTNSPAKYSGLKGYGLSIAGRVPLVTPITSENRKYLETKRTKMGHVYGLANAQVNQPSGSQSTEEKH

SEQ ID NO: 31338 - protein, 453 aa, Zea mays subsp. mays
  peptide (1)..(453): Ceres Seq. ID no. 13493487
  misc_feature (1)..(435): NCBI GI NO: 27735197 NR Description: Riboflavin biosynthesis protein ribA
  misc_feature (18)..(449): NCBI GI NO: 7436011 NR Description: GTP cyclohydrolase II (EC 3
  misc_feature (67)..(435): NCBI GI NO: 30697989 NR Description: GTP cyclohydrolase II
  misc_feature (22)..(434): NCBI GI NO: 29367375 NR Description: GTP cyclohydrolase II/3
  misc_feature (22)..(433): NCBI GI NO: 18424277 NR Description: GTP cyclohydrolase II / 3
  misc_feature (1)..(412): NCBI GI NO: 25290324 NR Description: probable GTP cyclohydrolase
  misc_feature (1)..(412): NCBI GI NO: 30681714 NR Description: GTP cyclohydrolase -related [Arabidopsis thaliana]
  misc_feature (35)..(431): NCBI GI NO: 23111383 NR Description: hypothetical protein
  misc_feature (38)..(437): NCBI GI NO: 23018011 NR Description: hypothetical protein [Thermobifida fusca]
  misc_feature (35)..(446): NCBI GI NO: 23020139 NR Description: hypothetical protein
MTPEILSANLALVMDKFSDDDTDTELDLDSPTEGFASIADAIEDVRQGKLVIVVDDESRENEGDLIMAASLVTPEAMAFIVRHGTGIVCVSIKEDDLERLCLPLMVTTKENEEKLCTAFTVTVDAKEGTTTGVSAKDRAKTVMTLASPDSRPEDFNRPGHIFPLKYREGGVLKRAGHTEASVDLAMLAGLPPVAVLCEIVDDADGSMARLPKLRVFAERENLKIISIADLIRYRRKRDRLVERASVARLPSQWGNGHAYCYRSAIDGIEHLAMVKGDIGDGQDIMVRVHSECLTGDIFRSARCDCGDQLAMAIEMIEKAGRGVIVYLRGHEGRGIGLGHKLRAYNLQDDGRDTVEANEELGLPVDSREYGIGAQILRDLGVRSMKLMTNSPAKYSGLKGYGLSIAGRVPLVTPITSENRKYLETKRTKMGHVYGLANAQVNQPSGSQSTEEKH

SEQ ID NO: 31339 - DNA, 1528 bp, Zea mays subsp. mays
  misc_feature (1)..(1528): Ceres Seq. ID no. 12354371
agtgagtagtagccaaccttggtctccacttcctgctgccaagtgccgacgcgagtccgtccctcttctcctccgcatccaaagaaaccagaccacaagacatcgagagaacagttgcggccttgctggcacggggatagatcttctccactccaatggcgggcttctcacggccgaacaactcgctcctcctcaagatgcctgcgactttggccagtagccacaccccgaacctctcaagcctcctgttctacgaccagaaccatggccaagctgtaaatgcaaatgcagcagcgatgacgatggtggaggacgacgcctcactccagagctcatctgcagtgctcgacacctccccgcagccacagggcagtgctgctgctgcgtctccgatggagaggaagaggaagcctgcagaagacagtgctacactcagctctctcaatccaaggaggattgcaagcagcagcaggagagcaagagcaggcggggaaagaggccccacaacaaggaggctaatactgaggagaagagcgctactgaagacgaggccaccagggggtacatccatgtgagggcgaggaggggtcaggcaacggacagccacagccttgcagagagggtaaggagagagaggatcagtgagaggatgaggatgctgcaagcactggtccctggttgtgacaaggttactggaaaggccctgattctggatgagattatcaactatgtgcagtccctgcagaaccaagttgagttcctttccatgaggattgcctccatgagcccagtgctatatgggttcggactggatagtgatggcctccatgaccacgcacaaaagatgggagtcatgttccaggaagcccttgcaatggcaggtccagtgctgagccaagccagcccagcagctccatctgaagccatcatggacaccaccacaccttactcactgcatggccatggccagggttccatctctttttcccaggacaatggcagcagcacttacctgatgcagcatcagcaagcagcgggggagccaacaagacagcaggagctgctcagccagttggtgttcaacaacatgtgctctttccagtaggggtggggagcatttgggtgagaggaagcgaggaatggaccccacattgacaataggaaggaaataatgctgcgagatttggtaggagcatgcacgtaccagatgagtttgagatgttggatctagtccatccccttgtctggatttggagagagcagtagcaagtagatcgagcctgctgtttgtttacacattttgagagactttgtagtatttgtaactcctttattgggcattgtccatgaggattttctcagcggctgcaccttccatctcaccgtgttgttgtagttcttgagcaatcggttgttagtacatacgagagctattttgttctttgccaaacagtgattgactgttccatccattcagtcttgtctagctccaagcatctgcaaatcgctacgttgttttctttaaccc

SEQ ID NO: 31340 - protein, 151 aa, Zea mays subsp. mays
  peptide (1)..(151): Ceres Seq. ID no. 12354372
  misc_feature (1)..(151): NCBI GI NO: 38175541 NR Description: bHLH transcription factor-like protein
  misc_feature (1)..(113): NCBI GI NO: 5923912 NR Description: bHLH transcription factor GBOF-1
  misc_feature (1)..(80): NCBI GI NO: 18423212 NR Description: Expressed protein; protein id: At5g50915
  misc_feature (1)..(85): NCBI GI NO: 15222679 NR Description: bHLH protein; protein id: At1g26260.1
  misc_feature (1)..(47): NCBI GI NO: 30681559 NR Description: expressed protein [Arabidopsis thaliana]
  misc_feature (1)..(101): NCBI GI NO: 30697769 NR Description: DNA-binding protein -related
  misc_feature (1)..(56): NCBI GI NO: 15231450 NR Description: bHLH protein; protein id: At3g07340
  misc_feature (1)..(56): NCBI GI NO: 20127064 NR Description: putative bHLH transcription factor
  misc_feature (1)..(85): NCBI GI NO: 29647487 NR Description: OJ1191_A10.7
  misc_feature (1)..(111): NCBI GI NO: 20127044 NR Description: putative bHLH transcription factor
MRMLQALVPGCDKVTGKALILDEIINYVQSLQNQVEFLSMRIASMSPVLYGFGLDSDGLHDHAQKMGVMFQEALAMAGPVLSQASPAAPSEAIMDTTTPYSLHGHGQGSISFSQDNGSSTYLMQHQQAAGEPTRQQELLSQLVFNNMCSFQ

SEQ ID NO: 31341 - protein, 149 aa, Zea mays subsp. mays
  peptide (1)..(149): Ceres Seq. ID no. 12354373
  misc_feature (1)..(149): NCBI GI NO: 38175541 NR Description: bHLH transcription factor-like protein
  misc_feature (1)..(111): NCBI GI NO: 5923912 NR Description: bHLH transcription factor GBOF-1
  misc_feature (1)..(78): NCBI GI NO: 18423212 NR Description: Expressed protein; protein id: At5g50915
  misc_feature (1)..(83): NCBI GI NO: 15222679 NR Description: bHLH protein; protein id: At1g26260.1
  misc_feature (1)..(45): NCBI GI NO: 30681559 NR Description: expressed protein [Arabidopsis thaliana]
  misc_feature (1)..(99): NCBI GI NO: 30697769 NR Description: DNA-binding protein -related
  misc_feature (1)..(54): NCBI GI NO: 15231450 NR Description: bHLH protein; protein id: At3g07340
  misc_feature (1)..(54): NCBI GI NO: 20127064 NR Description: putative bHLH transcription factor
  misc_feature (1)..(83): NCBI GI NO: 29647487 NR Description: OJ1191_A10.7
  misc_feature (1)..(109): NCBI GI NO: 20127044 NR Description: putative bHLH transcription factor
MLQALVPGCDKVTGKALILDEIINYVQSLQNQVEFLSMRIASMSPVLYGFGLDSDGLHDHAQKMGVMFQEALAMAGPVLSQASPAAPSEAIMDTTTPYSLHGHGQGSISFSQDNGSSTYLMQHQQAAGEPTRQQELLSQLVFNNMCSFQ

SEQ ID NO: 31342 - protein, 139 aa, Zea mays subsp. mays
  peptide (1)..(139): Ceres Seq. ID no. 12354374
MAGFSRPNNSLLLKMPATLASSHTPNLSSLLFYDQNHGQAVNANAAAMTMVEDDASLQSSSAVLDTSPQPQGSAAAASPMERKRKPAEDSATLSSLNPRRIASSSRRARAGGERGPTTRRLILRRRALLKTRPPGGTSM

SEQ ID NO: 31343 - DNA, 1542 bp, Zea mays subsp. mays
  misc_feature (1)..(1542): Ceres Seq. ID no. 12354375
accgctgttcttgctgagttgttgtggacaaaaagagcacaaaagtgggtagggcaagccaaccacactcgcagccagcctgcctgctcgcccgcccgccattcttgccgattcgagtcgacgtcacgcctccggcgcccccttcggttgtcacctcgggggtcgcggattggtggagtggaggatttgagcggcgcggccatggatacaacctctagggccgccaagatcccgtcgctccaccagacggagatcaactgggataacctcgacaagaccaagctctacgtggtgggcgcaggcatgttcagcggggtcaccgtggcgctgtaccctgtatcggtggtcaagacccggatgcaggttgcctctggggatgccatggggaggaacgcgctggctaccttcaagaacatccttaaggtggacggcgtgccagggctgtaccgggggtttcctactgttataattggggctgtaccaactaggattatcttcctcacggcgcttgagacaaccaaagcagcctctctcaagcttgttgagcccttcaagctgtcagagccggtgcaggccgcctttgccaatggccttgccggtctgtcggcatccacatgttcgcaggctatttttgtcccaattgatgtgatcagccagaaattgatggttcaagggtattctggtaatgtcagatacaaaggtggagtagatgttgctcgcaaggtcataaaggctgatggcattaaggggctctacagaggatttggactgtctgttatgacctatgcaccatcgagtgctgtgtggtgggcgagttatggttctagccagcgcataatttggagtgcccttggccatttgcataacaaagaagaggctcctagccaattgaaaatagttggtgttcaagcatcaggggggatttttgctggtgctgtgacctcttttgttacgactcccatagatacaatcaagaccaggctgcaggttatggataatgaaaataagccaaaagctggggaagttgttaaaagattgatcgctgaagatggatggaaaggtttgtacagagggttgggtccaagatttttcagctcatcagcttggggtacctcaatgatagtatgctacgagtacctgaagcgcttgtgtgctaaagttgaagaggtctgacttctgttcttactattctggaagttttgtattagaagaagtgaaataatgctgtatgtcgacaacattgacaccaccggaagcttcagttcttgctgacgtaggtgaaagcattcaacatggatgtttgatggtgtacttcatttggtgctagacaatagtctttacaaactttgcttctctgggctatatctcaaaaaatgtaggggcctatatttttttgctcatatgatgaatatgggtttggcggattattttaggtgagtataaacgatatcagatgtacacacttctcattcttttatacatgaaggctattttagcgaggctgtatgattatgaccagtctggatgattgagaccagttgt

SEQ ID NO: 31344 - protein, 390 aa, Zea mays subsp. mays
  peptide (1)..(390): Ceres Seq. ID no. 12354376
  misc_feature (68)..(390): NCBI GI NO: 21326111 NR Description: putative mitochondrial carrier protein
  misc_feature (68)..(390): NCBI GI NO: 12061241 NR Description: 36I5.1 [Oryza sativa (japonica cultivar-group)]
  misc_feature (68)..(389): NCBI GI NO: 18496651 NR Description: putative mitochondrial carrier protein
  misc_feature (68)..(389): NCBI GI NO: 12278522 NR Description: putative mitochondrial carrier protein
  misc_feature (68)..(389): NCBI GI NO: 18417739 NR Description: mitochondrial carrier protein family
  misc_feature (68)..(389): NCBI GI NO: 21553961 NR Description: putative mitochondrial carrier protein
  misc_feature (68)..(281): NCBI GI NO: 11358653 NR Description: probable mitochondrial carrier protein -Arabidopsis thaliana
  misc_feature (293)..(389): NCBI GI NO: 11358653 NR Description: probable mitochondrial carrier protein -Arabidopsis thaliana
  misc_feature (60)..(386): NCBI GI NO: 37534064 NR Description: putative Tricarboxylate transport protein
  misc_feature (114)..(388): NCBI GI NO: 34894824 NR Description: P0554D10.15
TAVLAELLWTKRAQKWVGQANHTRSQPACSPARHSCRFESTSRLRRPLRLSPRGSRIGGVEDLSGAAMDTTSRAAKIPSLHQTEINWDNLDKTKLYVVGAGMFSGVTVALYPVSVVKTRMQVASGDAMGRNALATFKNILKVDGVPGLYRGFPTVIIGAVPTRIIFLTALETTKAASLKLVEPFKLSEPVQAAFANGLAGLSASTCSQAIFVPIDVISQKLMVQGYSGNVRYKGGVDVARKVIKADGIKGLYRGFGLSVMTYAPSSAVWWASYGSSQRIIWSALGHLHNKEEAPSQLKIVGVQASGGIFAGAVTSFVTTPIDTIKTRLQVMDNENKPKAGEVVKRLIAEDGWKGLYRGLGPRFFSSSAWGTSMIVCYEYLKRLCAKVEEV

SEQ ID NO: 31345 - protein, 323 aa, Zea mays subsp. mays
  peptide (1)..(323): Ceres Seq. ID no. 12354377
  misc_feature (1)..(323): NCBI GI NO: 21326111 NR Description: putative mitochondrial carrier protein
  misc_feature (1)..(323): NCBI GI NO: 12061241 NR Description: 36I5.1 [Oryza sativa (japonica cultivar-group)]
  misc_feature (1)..(322): NCBI GI NO: 18496651 NR Description: putative mitochondrial carrier protein
  misc_feature (1)..(322): NCBI GI NO: 12278522 NR Description: putative mitochondrial carrier protein
  misc_feature (1)..(322): NCBI GI NO: 18417739 NR Description: mitochondrial carrier protein family
  misc_feature (1)..(322): NCBI GI NO: 21553961 NR Description: putative mitochondrial carrier protein
  misc_feature (1)..(214): NCBI GI NO: 11358653 NR Description: probable mitochondrial carrier protein -Arabidopsis thaliana
  misc_feature (226)..(322): NCBI GI NO: 11358653 NR Description: probable mitochondrial carrier protein -Arabidopsis thaliana
  misc_feature (1)..(319): NCBI GI NO: 37534064 NR Description: putative Tricarboxylate transport protein
  misc_feature (47)..(321): NCBI GI NO: 34894824 NR Description: P0554D10.15
MDTTSRAAKIPSLHQTEINWDNLDKTKLYVVGAGMFSGVTVALYPVSVVKTRMQVASGDAMGRNALATFKNILKVDGVPGLYRGFPTVIIGAVPTRIIFLTALETTKAASLKLVEPFKLSEPVQAAFANGLAGLSASTCSQAIFVPIDVISQKLMVQGYSGNVRYKGGVDVARKVIKADGIKGLYRGFGLSVMTYAPSSAVWWASYGSSQRIIWSALGHLHNKEEAPSQLKIVGVQASGGIFAGAVTSFVTTPIDTIKTRLQVMDNENKPKAGEVVKRLIAEDGWKGLYRGLGPRFFSSSAWGTSMIVCYEYLKRLCAKVEEV

SEQ ID NO: 31346 - protein, 289 aa, Zea mays subsp. mays
  peptide (1)..(289): Ceres Seq. ID no. 12354378
  misc_feature (1)..(289): NCBI GI NO: 21326111 NR Description: putative mitochondrial carrier protein
  misc_feature (1)..(289): NCBI GI NO: 12061241 NR Description: 36I5.1 [Oryza sativa (japonica cultivar-group)]
  misc_feature (1)..(288): NCBI GI NO: 18496651 NR Description: putative mitochondrial carrier protein
  misc_feature (1)..(288): NCBI GI NO: 12278522 NR Description: putative mitochondrial carrier protein
  misc_feature (1)..(288): NCBI GI NO: 18417739 NR Description: mitochondrial carrier protein family
  misc_feature (1)..(288): NCBI GI NO: 21553961 NR Description: putative mitochondrial carrier protein
  misc_feature (1)..(180): NCBI GI NO: 11358653 NR Description: probable mitochondrial carrier protein -Arabidopsis thaliana
  misc_feature (192)..(288): NCBI GI NO: 11358653 NR Description: probable mitochondrial carrier protein -Arabidopsis thaliana
  misc_feature (1)..(285): NCBI GI NO: 37534064 NR Description: putative Tricarboxylate transport protein
  misc_feature (13)..(287): NCBI GI NO: 34894824 NR Description: P0554D10.15
MFSGVTVALYPVSVVKTRMQVASGDAMGRNALATFKNILKVDGVPGLYRGFPTVIIGAVPTRIIFLTALETTKAASLKLVEPFKLSEPVQAAFANGLAGLSASTCSQAIFVPIDVISQKLMVQGYSGNVRYKGGVDVARKVIKADGIKGLYRGFGLSVMTYAPSSAVWWASYGSSQRIIWSALGHLHNKEEAPSQLKIVGVQASGGIFAGAVTSFVTTPIDTIKTRLQVMDNENKPKAGEVVKRLIAEDGWKGLYRGLGPRFFSSSAWGTSMIVCYEYLKRLCAKVEEV

SEQ ID NO: 31347 - DNA, 1770 bp, Zea mays subsp. mays
  misc_feature (1)..(1770): Ceres Seq. ID no. 12356921
atcatcactacacactacaaacactaccaccatccagcagctagcagaaggcagaagcagctagtgtagatagccggcggctggctgagaccaccacctctccctttcctttcttctctttgctttgctccctctcatctcatcttcccttcccttctccagctaacactacagctttctagggctcacaccgcagcaccgatccagcgccgtccggtcgtcgatccacatcaccattattccatccccctgataacgatcgagccccagccctccctcgctctccgggctgagctagccggacgaattcgggcgtgcggcttcgagctctcgcttatatcagcgccgcgcgcgccggccggcggccggaggagccactatcatccccggcgtttgattcggccagagcagcggccatggtcgaatatatttgatctctctcgatctgatctgagctgagccggctggtggcccgggaaggacgaagtgtgtcgccacctataatttgatgatgtttgtgtcatcatgatcggtggctagcagaataagagatgataagcggcaacctcaacaatgaagagctggggggcggcgggtgcaccaaggccgaggggccgggcgcggccggcggcgccggcgccgtcgtcgcaaagagtcccgtgctgtcgagctcccggcactggccgccgtcgacggagtcgaggatcgtgcgcgtgtcgcgggtcttcggcggcaaggaccggcacagcaaggtgaggacggtcaaggggctgcgcgaccggcgcgtgcggctgtccgtgccgacggcgatccagctctacgacctccaggaccggctgggcctcagccagccgagcaagttggtggactggctgctcgacgccgcgcaggacgagatcgacaagctgcctccgctccagttcccgccgcaagggcaggacctcgtcgcccatctcccgccgtccatggtggcgcccttcgccaacgttgcagccgaccgggccgccgccgccgctgccgccgcagaacgcgtcggccgcgatggccgaaggcggcaaacgccactgccacggaggcatcaaagggctcatgggcatgggcctcaacaattctatcggcctcgccaacgccaccatgccgctggctcacggcttgtactacacgcccggtgagtcttggaccaatggaggcaatgccgccgtccatgatcatcaggtgagccacggcggcacctcgcctcagacggtggctcaccactcgccgttctcgtctctgctgtctcttgctgctccggggccccagctcgtcttctactcgccggaaggcggcggcttcgccatgaaagaagccaccgatcatcagttcgctgtagatagcctcgatcactcgcaaggccagctctcactgagctcagctagaagcttccttcaccccggcaaccagggatgatattaggtcactgatctctactgctccaagaaggtacgtagaacaataaagcttggtgtagtagtaatcaagtactcgtttgaaggctccgtaaagcttgcaactgcagttttgagatgttattgtttggtatgatcgagtagaggggctctagcgtagagagctgctagcatgcatagtaattaaggttaattttgcaggacatgcaatgcaattcgttgcttcttttttatacaaggaagtaaccggtcatggggtttgtggtgtgtgtgtgtgttggcaatgtaataacaattttataattcgttcttgaatttgtgc

SEQ ID NO: 31348 - protein, 206 aa, Zea mays subsp. mays
  peptide (1)..(206): Ceres Seq. ID no. 12356922
  misc_feature (48)..(139): Pfam Name: Pfam Description:  TCP family transcription factor
  misc_feature (19)..(139): NCBI GI NO: 34909780 NR Description: P0512C01.32
  misc_feature (38)..(125): NCBI GI NO: 15239489 NR Description: DNA binding protein - like; protein id: At5g60970
  misc_feature (8)..(134): NCBI GI NO: 18396089 NR Description: expressed protein; protein id: At3g02150
  misc_feature (8)..(134): NCBI GI NO: 30678498 NR Description: TCP family transcription factor TFPD
  misc_feature (34)..(126): NCBI GI NO: 15241512 NR Description: putative helix-loop-helix DNA binding protein
  misc_feature (42)..(199): NCBI GI NO: 18397402 NR Description: expressed protein; protein id: At1g30210
  misc_feature (32)..(182): NCBI GI NO: 7486304 NR Description: hypothetical protein F28J12
  misc_feature (32)..(182): NCBI GI NO: 18415079 NR Description: teosinte branched1 - like protein
  misc_feature (50)..(182): NCBI GI NO: 25369264 NR Description: probable basic helix-loop-helix DNA binding proteinTCP2
  misc_feature (44)..(174): NCBI GI NO: 33146716 NR Description: putative transcription factor PCF6
MISGNLNNEELGGGGCTKAEGPGAAGGAGAVVAKSPVLSSSRHWPPSTESRIVRVSRVFGGKDRHSKVRTVKGLRDRRVRLSVPTAIQLYDLQDRLGLSQPSKLVDWLLDAAQDEIDKLPPLQFPPQGQDLVAHLPPSMVAPFANVAADRAAAAAAAAERVGRDGRRRQTPLPRRHQRAHGHGPQQFYRPRQRHHAAGSRLVLHAR

SEQ ID NO: 31349 - protein, 135 aa, Zea mays subsp. mays
  peptide (1)..(135): Ceres Seq. ID no. 12356923
MAEGGKRHCHGGIKGLMGMGLNNSIGLANATMPLAHGLYYTPGESWTNGGNAAVHDHQVSHGGTSPQTVAHHSPFSSLLSLAAPGPQLVFYSPEGGGFAMKEATDHQFAVDSLDHSQGQLSLSSARSFLHPGNQG

SEQ ID NO: 31350 - protein, 119 aa, Zea mays subsp. mays
  peptide (1)..(119): Ceres Seq. ID no. 12356924
MGMGLNNSIGLANATMPLAHGLYYTPGESWTNGGNAAVHDHQVSHGGTSPQTVAHHSPFSSLLSLAAPGPQLVFYSPEGGGFAMKEATDHQFAVDSLDHSQGQLSLSSARSFLHPGNQG

SEQ ID NO: 31351 - DNA, 1423 bp, Zea mays subsp. mays
  misc_feature (1)..(1423): Ceres Seq. ID no. 13570861
caaccccgcacgcacaactggccgcgccaaggcaaagctagaagaagacaacgcaaagggagaggacagaggaggagcagaggacgatgggcagcggcggcgctaacactgcccccctcctcaccccctacaagatgggaaaattcgatgttacccacagggtagtcctcgcaccactgacgagacagcggtcctacggcaacgttccccagcctcatgccatactgtactatcagcagagggcgactaaaggaggtcttctgatcgctgaggccacgggggtttcagacactgctcaagggtacaaggacactcctggcatttggacccatgagcaagtcgaagcatggaagccgatcgtagacggggttcaccagaaaggagggatatttttctgtcagatttggcacgtagggagagtctccaattccacgtttcagcctaatgggcaggctccaatttcaagcaccgataagccactaaagcctcaagtgagagccaatggtatagacgtggctactttcgcagttcctagacgcttagagactgatgaaatccctttggtcgtcaatgatttcagggtagctgctcgaaatgcgattgaagctggatttgatggtgtcgaaatccatggagctcacggttacctgattgatcagtttctaaaggacggggtcaacgaccgcacagacaaatacggtggcagtctggagaaccgctgccggtttgcactggaagtaactcaagccgtggtcgacgaaattggagctgacaaggtcgggataaggctgtcaccattcgctagctactcggaggcgccggactcggacccggaagctctgggcctgtacatggcgaacgcgctgaacgagttcgggattctctactgccacatcgtggagccgcggatggtgaaactcggtgaaaagttcgaaaccccctacagccttcgcccgataagggacgctttcaggggaacgttcatcgttgccggcggctacggcagggaggatgggaatcgagcgatctccactgggtatgctgatttggtcgcgttcgggcgcttgttcttggctaatcctgacctgcctcggaggttcgaagtagacgctccccttaacaagtacaacagagacacgttttacatccctgatccggttgttggatacactgactacccatttctttcgtcagatgtataaatgttctcttttcagcaatctgctttttagattgtgtagtaactggttggtgtaccagtaaattattagaggaataaaccattggtctgaatgcctcattctcatatatatggacaaaagcaatatgatcgttgtaattgtgcctcaaatcttatagttgtaaaaaatattgtgaagaagctcagtcagttgtcattgtaaaaaatattgtgaagaagctc

SEQ ID NO: 31352 - protein, 371 aa, Zea mays subsp. mays
  peptide (1)..(371): Ceres Seq. ID no. 13570862
  misc_feature (10)..(345): Pfam Name: Pfam Description:  NADH:flavin oxidoreductase / NADH oxidase family
  misc_feature (1)..(369): NCBI GI NO: 15223138 NR Description: 12-oxophytodienoate reductase (OPR1)
  misc_feature (10)..(369): NCBI GI NO: 7449901 NR Description: probable 12-oxophytodienoate reductase (EC1
  misc_feature (1)..(369): NCBI GI NO: 21593388 NR Description: 12-oxophytodienoate reductase (OPR1)
  misc_feature (8)..(369): NCBI GI NO: 15223140 NR Description: 12-oxophytodienoate reductase (OPR2)
  misc_feature (1)..(369): NCBI GI NO: 4894182 NR Description: 12-oxophytodienoate reductase
  misc_feature (8)..(369): NCBI GI NO: 26450549 NR Description: putative 12-oxophytodienoate reductase OPR2
  misc_feature (1)..(369): NCBI GI NO: 2765083 NR Description: 12-oxophytodienoate reductase
  misc_feature (1)..(369): NCBI GI NO: 14277800 NR Description: Chain A
  misc_feature (1)..(370): NCBI GI NO: 13516922 NR Description: 12-oxophytodienoic acid 10, 11-reductase
  misc_feature (10)..(370): NCBI GI NO: 7449902 NR Description: probable 12-oxophytodienoate reductase (EC1
MGSGGANTAPLLTPYKMGKFDVTHRVVLAPLTRQRSYGNVPQPHAILYYQQRATKGGLLIAEATGVSDTAQGYKDTPGIWTHEQVEAWKPIVDGVHQKGGIFFCQIWHVGRVSNSTFQPNGQAPISSTDKPLKPQVRANGIDVATFAVPRRLETDEIPLVVNDFRVAARNAIEAGFDGVEIHGAHGYLIDQFLKDGVNDRTDKYGGSLENRCRFALEVTQAVVDEIGADKVGIRLSPFASYSEAPDSDPEALGLYMANALNEFGILYCHIVEPRMVKLGEKFETPYSLRPIRDAFRGTFIVAGGYGREDGNRAISTGYADLVAFGRLFLANPDLPRRFEVDAPLNKYNRDTFYIPDPVVGYTDYPFLSSDV

SEQ ID NO: 31353 - protein, 355 aa, Zea mays subsp. mays
  peptide (1)..(355): Ceres Seq. ID no. 13570863
  misc_feature (1)..(329): Pfam Name: Pfam Description:  NADH:flavin oxidoreductase / NADH oxidase family
  misc_feature (1)..(353): NCBI GI NO: 15223138 NR Description: 12-oxophytodienoate reductase (OPR1)
  misc_feature (1)..(353): NCBI GI NO: 7449901 NR Description: probable 12-oxophytodienoate reductase (EC1
  misc_feature (1)..(353): NCBI GI NO: 21593388 NR Description: 12-oxophytodienoate reductase (OPR1)
  misc_feature (1)..(353): NCBI GI NO: 15223140 NR Description: 12-oxophytodienoate reductase (OPR2)
  misc_feature (1)..(353): NCBI GI NO: 4894182 NR Description: 12-oxophytodienoate reductase
  misc_feature (1)..(353): NCBI GI NO: 26450549 NR Description: putative 12-oxophytodienoate reductase OPR2
  misc_feature (1)..(353): NCBI GI NO: 2765083 NR Description: 12-oxophytodienoate reductase
  misc_feature (1)..(353): NCBI GI NO: 14277800 NR Description: Chain A
  misc_feature (1)..(354): NCBI GI NO: 13516922 NR Description: 12-oxophytodienoic acid 10, 11-reductase
  misc_feature (1)..(354): NCBI GI NO: 7449902 NR Description: probable 12-oxophytodienoate reductase (EC1
MGKFDVTHRVVLAPLTRQRSYGNVPQPHAILYYQQRATKGGLLIAEATGVSDTAQGYKDTPGIWTHEQVEAWKPIVDGVHQKGGIFFCQIWHVGRVSNSTFQPNGQAPISSTDKPLKPQVRANGIDVATFAVPRRLETDEIPLVVNDFRVAARNAIEAGFDGVEIHGAHGYLIDQFLKDGVNDRTDKYGGSLENRCRFALEVTQAVVDEIGADKVGIRLSPFASYSEAPDSDPEALGLYMANALNEFGILYCHIVEPRMVKLGEKFETPYSLRPIRDAFRGTFIVAGGYGREDGNRAISTGYADLVAFGRLFLANPDLPRRFEVDAPLNKYNRDTFYIPDPVVGYTDYPFLSSDV

SEQ ID NO: 31354 - DNA, 1473 bp, Zea mays subsp. mays
  misc_feature (1)..(1473): Ceres Seq. ID no. 12347344
gcacgagaccattacctataacatcctaatcgaaaagagtagaggtgctactacgccacaagcgcaaccctacaagagcacaaacaaagtggagttttacgggccgctagggctaggcaagcccatggaggagatgctcatggctggaaacgcgaatccaaacccaccgccagctgctgcgccctcggcacccggggcccagacccagagccagaggggtggtggcgctcctcctcccgctgcgggtgcggcagcgcctagcgctggcgcgaccgtaggggcggcgggcacggagcggcgggcgcggccgcacaaggagaaggcgctcaactgcccgcggtgcaactccaccaacaccaagttctgctattacaacaactacagcctgcagcagccgcgctacttctgcaagacctgccgccgctactggaccgagggcggctcgctccgcaacgtcccggtgggcggcggctccaggaagaacaagcgcagctcgtcctcggcggcctccacctccgcggcgatgtccggcacggtctccgtgaagaaccccaagctggtgcacgagggcgcgcaccacgacctcaacctggccttccctcaccacaacaacggccgcgctctgcagccaccggagttcccgtcgtcgttcccgaacctggagagcagcagcgtgtgctaccccggagccgccatgctgggcaacggcgccgccggcaggggcatgggcgcgctctcggctatggagctgctcaggagcaccggctgctacgtccccctgcagcacgttcagctagggatgcccgccgagtacgcagcacccgcgggattcacgcttggcgagttccgcattcccccgccgccgcagtctcagagtgtgctcgggttctcgctggacacgcacggaacggggggttacagcgccggcgggttgcaggagagcgcggtgggcaggatgctcttccccttcgaggacttgaagccggcggtgagcgcagctggcggcggtgcaagcaacgacggagctgatcatcgtcaaaacgaccacaggaaagatcaagctgcaggcgacggcagcagcgtcaccggtggccacgagactccaggcgggttctggagcaatagcttgatcggaaatggcagcagcaatggtggtggaggccattggtaaggcggcgcggcatgcatggctcatgcacgcgcgcgccgttggcagcatgcggagatagggatagagacaaggatccaagttatcaagagggtacggtggaggaggtgattagtgttcacatatatggcgtttgatttttctctggttgtttaatttttctcggatcttcgtgttcttgtgtgtaaatcgacatcgacttggggggctaacacagcaggatatacagattgttaaggcggtggtgaaccggtgatttacagctagcttctcttatccaatggatctcttgtttctgattgtgc

SEQ ID NO: 31355 - protein, 389 aa, Zea mays subsp. mays
  peptide (1)..(389): Ceres Seq. ID no. 12347345
  misc_feature (105)..(166): Pfam Name: Pfam Description:  Dof domain, zinc finger
  misc_feature (31)..(291): NCBI GI NO: 20372847 NR Description: dof zinc finger protein
  misc_feature (31)..(291): NCBI GI NO: 20372895 NR Description: dof zinc finger protein
  misc_feature (289)..(389): NCBI GI NO: 20372847 NR Description: dof zinc finger protein
  misc_feature (289)..(389): NCBI GI NO: 20372895 NR Description: dof zinc finger protein
  misc_feature (36)..(311): NCBI GI NO: 4996642 NR Description: Dof zinc finger protein [Oryza sativa]
  misc_feature (36)..(388): NCBI GI NO: 4996640 NR Description: Dof zinc finger protein [Oryza sativa]
  misc_feature (45)..(388): NCBI GI NO: 38344272 NR Description: OSJNBa0005N02.10
  misc_feature (49)..(387): NCBI GI NO: 4996642 NR Description: Dof zinc finger protein [Oryza sativa]
  misc_feature (140)..(381): NCBI GI NO: 4996640 NR Description: Dof zinc finger protein [Oryza sativa]
  misc_feature (140)..(381): NCBI GI NO: 38344272 NR Description: OSJNBa0005N02.10
HETITYNILIEKSRGATTPQAQPYKSTNKVEFYGPLGLGKPMEEMLMAGNANPNPPPAAAPSAPGAQTQSQRGGGAPPPAAGAAAPSAGATVGAAGTERRARPHKEKALNCPRCNSTNTKFCYYNNYSLQQPRYFCKTCRRYWTEGGSLRNVPVGGGSRKNKRSSSSAASTSAAMSGTVSVKNPKLVHEGAHHDLNLAFPHHNNGRALQPPEFPSSFPNLESSSVCYPGAAMLGNGAAGRGMGALSAMELLRSTGCYVPLQHVQLGMPAEYAAPAGFTLGEFRIPPPPQSQSVLGFSLDTHGTGGYSAGGLQESAVGRMLFPFEDLKPAVSAAGGGASNDGADHRQNDHRKDQAAGDGSSVTGGHETPGGFWSNSLIGNGSSNGGGGHW

SEQ ID NO: 31356 - protein, 348 aa, Zea mays subsp. mays
  peptide (1)..(348): Ceres Seq. ID no. 12347346
  misc_feature (64)..(125): Pfam Name: Pfam Description:  Dof domain, zinc finger
  misc_feature (1)..(250): NCBI GI NO: 20372847 NR Description: dof zinc finger protein
  misc_feature (1)..(250): NCBI GI NO: 20372895 NR Description: dof zinc finger protein
  misc_feature (248)..(348): NCBI GI NO: 20372847 NR Description: dof zinc finger protein
  misc_feature (248)..(348): NCBI GI NO: 20372895 NR Description: dof zinc finger protein
  misc_feature (1)..(270): NCBI GI NO: 4996642 NR Description: Dof zinc finger protein [Oryza sativa]
  misc_feature (1)..(347): NCBI GI NO: 4996640 NR Description: Dof zinc finger protein [Oryza sativa]
  misc_feature (4)..(347): NCBI GI NO: 38344272 NR Description: OSJNBa0005N02.10
  misc_feature (8)..(346): NCBI GI NO: 4996642 NR Description: Dof zinc finger protein [Oryza sativa]
  misc_feature (99)..(340): NCBI GI NO: 4996640 NR Description: Dof zinc finger protein [Oryza sativa]
  misc_feature (99)..(340): NCBI GI NO: 38344272 NR Description: OSJNBa0005N02.10
MEEMLMAGNANPNPPPAAAPSAPGAQTQSQRGGGAPPPAAGAAAPSAGATVGAAGTERRARPHKEKALNCPRCNSTNTKFCYYNNYSLQQPRYFCKTCRRYWTEGGSLRNVPVGGGSRKNKRSSSSAASTSAAMSGTVSVKNPKLVHEGAHHDLNLAFPHHNNGRALQPPEFPSSFPNLESSSVCYPGAAMLGNGAAGRGMGALSAMELLRSTGCYVPLQHVQLGMPAEYAAPAGFTLGEFRIPPPPQSQSVLGFSLDTHGTGGYSAGGLQESAVGRMLFPFEDLKPAVSAAGGGASNDGADHRQNDHRKDQAAGDGSSVTGGHETPGGFWSNSLIGNGSSNGGGGHW

SEQ ID NO: 31357 - protein, 345 aa, Zea mays subsp. mays
  peptide (1)..(345): Ceres Seq. ID no. 12347347
  misc_feature (61)..(122): Pfam Name: Pfam Description:  Dof domain, zinc finger
  misc_feature (1)..(247): NCBI GI NO: 20372847 NR Description: dof zinc finger protein
  misc_feature (1)..(247): NCBI GI NO: 20372895 NR Description: dof zinc finger protein
  misc_feature (245)..(345): NCBI GI NO: 20372847 NR Description: dof zinc finger protein
  misc_feature (245)..(345): NCBI GI NO: 20372895 NR Description: dof zinc finger protein
  misc_feature (1)..(267): NCBI GI NO: 4996642 NR Description: Dof zinc finger protein [Oryza sativa]
  misc_feature (1)..(344): NCBI GI NO: 4996640 NR Description: Dof zinc finger protein [Oryza sativa]
  misc_feature (1)..(344): NCBI GI NO: 38344272 NR Description: OSJNBa0005N02.10
  misc_feature (5)..(343): NCBI GI NO: 4996642 NR Description: Dof zinc finger protein [Oryza sativa]
  misc_feature (96)..(337): NCBI GI NO: 4996640 NR Description: Dof zinc finger protein [Oryza sativa]
  misc_feature (96)..(337): NCBI GI NO: 38344272 NR Description: OSJNBa0005N02.10
MLMAGNANPNPPPAAAPSAPGAQTQSQRGGGAPPPAAGAAAPSAGATVGAAGTERRARPHKEKALNCPRCNSTNTKFCYYNNYSLQQPRYFCKTCRRYWTEGGSLRNVPVGGGSRKNKRSSSSAASTSAAMSGTVSVKNPKLVHEGAHHDLNLAFPHHNNGRALQPPEFPSSFPNLESSSVCYPGAAMLGNGAAGRGMGALSAMELLRSTGCYVPLQHVQLGMPAEYAAPAGFTLGEFRIPPPPQSQSVLGFSLDTHGTGGYSAGGLQESAVGRMLFPFEDLKPAVSAAGGGASNDGADHRQNDHRKDQAAGDGSSVTGGHETPGGFWSNSLIGNGSSNGGGGHW

SEQ ID NO: 31358 - DNA, 1171 bp, Zea mays subsp. mays
  misc_feature (1)..(1171): Ceres Seq. ID no. 12374998
aagatgggtagcagaagcagccagtttccgtcaatggcactggccatggccacggtgctgatggcactggccggggtagccgccacagcgcgagccggcggcggcatcgccatctactggggccagaacggcaacgaggggacgctggcgcagacctgcgccacgggcaactacaggttcgtcaacgtggccttcctccccacgttcggcaaggggcagacgccggcgcttaacctggcgggccactgcgacccagcgagcggcgggtgcacgggcgtgggcgcggacgtcaaggcgtgccagcgcatgggcgtcaaggtcctgctctccatcggcgggggcgtcggcagctacgggctctcgtcccgggccgacgcccggagcgtcgcggcgtacctctgggacaactacctcggcggcggcggcggcggcgggtccgagtccagctccaggcccctcggcgacgccgtcctcgacggcgtcgacttcgacatcgagagcggcgggggcatgtactgggacgacctggcccggttcctcaagtcctactcccggcgcgggcgcgcgcggaggcccgtgtacctgtccgctgcgccgcagtgcccgttcccggacgcgtcgctgggcaccgcgctcgcgcacggggctgttcgactacgtgtgggtgcagttctacaacaacccgccgtgccagtacagcgcgagcgccggcgtgggcagcctggcgaaagcgtgggcgcagtggacgtccatcagggcggggcgggtgttcctcggcctccccgccgcgccccaggccgctggcagcgggttcgtgccggcgagcgacctcgtggcgcaggtgctgccggtggtcaagaactccaccaagtacgggggcatcatgctctggtccaggtactacgacgggctcacggggtacagcgacgcggtcaagtcctacgttgagctagccagcctcgtgtcatgtcgggcgtgcaggagggagtaggactgtaggaggcacatgcttccatgtgcgtgcacgtgcggggcgttatcatacctatgggtatactgggtcgctattcgctaaggaagagaccggaaagaagcaaatcgcaaatacagcttcttagcggtgtttgtttgggattataatccacttagattatataaaaaaaaaaaaaaa

SEQ ID NO: 31359 - protein, 315 aa, Zea mays subsp. mays
  peptide (1)..(315): Ceres Seq. ID no. 12374999
  misc_feature (34)..(215): Pfam Name: Pfam Description:  Glycosyl hydrolases family 18
  misc_feature (6)..(215): NCBI GI NO: 7451375 NR Description: chitinase (EC 3.2.1.14) III C10501 - rice
  misc_feature (19)..(215): NCBI GI NO: 34908482 NR Description: chitinase [Oryza sativa (japonica cultivar-group)]
  misc_feature (6)..(215): NCBI GI NO: 2425170 NR Description: basic class III chitinase OsChib3b
  misc_feature (20)..(215): NCBI GI NO: 27817953 NR Description: putative class III acidic chitinase
  misc_feature (2)..(215): NCBI GI NO: 10954033 NR Description: class III acidic chitinase [Malus x domestica]
  misc_feature (15)..(215): NCBI GI NO: 3451147 NR Description: chitinase [Hevea brasiliensis]
  misc_feature (15)..(215): NCBI GI NO: 20981684 NR Description: Hevamine A precursor
  misc_feature (12)..(215): NCBI GI NO: 4530607 NR Description: chitinase [Fragaria x ananassa]
  misc_feature (2)..(215): NCBI GI NO: 34908480 NR Description: putative chitinase
  misc_feature (12)..(215): NCBI GI NO: 28848952 NR Description: acidic class III chitinase [Rehmannia glutinosa]
KMGSRSSQFPSMALAMATVLMALAGVAATARAGGGIAIYWGQNGNEGTLAQTCATGNYRFVNVAFLPTFGKGQTPALNLAGHCDPASGGCTGVGADVKACQRMGVKVLLSIGGGVGSYGLSSRADARSVAAYLWDNYLGGGGGGGSESSSRPLGDAVLDGVDFDIESGGGMYWDDLARFLKSYSRRGRARRPVYLSAAPQCPFPDASLGTALAHGAVRLRVGAVLQQPAVPVQRERRRGQPGESVGAVDVHQGGAGVPRPPRRAPGRWQRVRAGERPRGAGAAGGQELHQVRGHHALVQVLRRAHGVQRRGQVLR

SEQ ID NO: 31360 - protein, 314 aa, Zea mays subsp. mays
  peptide (1)..(314): Ceres Seq. ID no. 12375000
  misc_feature (33)..(214): Pfam Name: Pfam Description:  Glycosyl hydrolases family 18
  misc_feature (5)..(214): NCBI GI NO: 7451375 NR Description: chitinase (EC 3.2.1.14) III C10501 - rice
  misc_feature (18)..(214): NCBI GI NO: 34908482 NR Description: chitinase [Oryza sativa (japonica cultivar-group)]
  misc_feature (5)..(214): NCBI GI NO: 2425170 NR Description: basic class III chitinase OsChib3b
  misc_feature (19)..(214): NCBI GI NO: 27817953 NR Description: putative class III acidic chitinase
  misc_feature (1)..(214): NCBI GI NO: 10954033 NR Description: class III acidic chitinase [Malus x domestica]
  misc_feature (14)..(214): NCBI GI NO: 3451147 NR Description: chitinase [Hevea brasiliensis]
  misc_feature (14)..(214): NCBI GI NO: 20981684 NR Description: Hevamine A precursor
  misc_feature (11)..(214): NCBI GI NO: 4530607 NR Description: chitinase [Fragaria x ananassa]
  misc_feature (1)..(214): NCBI GI NO: 34908480 NR Description: putative chitinase
  misc_feature (11)..(214): NCBI GI NO: 28848952 NR Description: acidic class III chitinase [Rehmannia glutinosa]
MGSRSSQFPSMALAMATVLMALAGVAATARAGGGIAIYWGQNGNEGTLAQTCATGNYRFVNVAFLPTFGKGQTPALNLAGHCDPASGGCTGVGADVKACQRMGVKVLLSIGGGVGSYGLSSRADARSVAAYLWDNYLGGGGGGGSESSSRPLGDAVLDGVDFDIESGGGMYWDDLARFLKSYSRRGRARRPVYLSAAPQCPFPDASLGTALAHGAVRLRVGAVLQQPAVPVQRERRRGQPGESVGAVDVHQGGAGVPRPPRRAPGRWQRVRAGERPRGAGAAGGQELHQVRGHHALVQVLRRAHGVQRRGQVLR

SEQ ID NO: 31361 - protein, 304 aa, Zea mays subsp. mays
  peptide (1)..(304): Ceres Seq. ID no. 12375001
  misc_feature (23)..(204): Pfam Name: Pfam Description:  Glycosyl hydrolases family 18
  misc_feature (1)..(204): NCBI GI NO: 7451375 NR Description: chitinase (EC 3.2.1.14) III C10501 - rice
  misc_feature (8)..(204): NCBI GI NO: 34908482 NR Description: chitinase [Oryza sativa (japonica cultivar-group)]
  misc_feature (1)..(204): NCBI GI NO: 2425170 NR Description: basic class III chitinase OsChib3b
  misc_feature (9)..(204): NCBI GI NO: 27817953 NR Description: putative class III acidic chitinase
  misc_feature (1)..(204): NCBI GI NO: 10954033 NR Description: class III acidic chitinase [Malus x domestica]
  misc_feature (4)..(204): NCBI GI NO: 3451147 NR Description: chitinase [Hevea brasiliensis]
  misc_feature (4)..(204): NCBI GI NO: 20981684 NR Description: Hevamine A precursor
  misc_feature (1)..(204): NCBI GI NO: 4530607 NR Description: chitinase [Fragaria x ananassa]
  misc_feature (1)..(204): NCBI GI NO: 34908480 NR Description: putative chitinase
  misc_feature (1)..(204): NCBI GI NO: 28848952 NR Description: acidic class III chitinase [Rehmannia glutinosa]
MALAMATVLMALAGVAATARAGGGIAIYWGQNGNEGTLAQTCATGNYRFVNVAFLPTFGKGQTPALNLAGHCDPASGGCTGVGADVKACQRMGVKVLLSIGGGVGSYGLSSRADARSVAAYLWDNYLGGGGGGGSESSSRPLGDAVLDGVDFDIESGGGMYWDDLARFLKSYSRRGRARRPVYLSAAPQCPFPDASLGTALAHGAVRLRVGAVLQQPAVPVQRERRRGQPGESVGAVDVHQGGAGVPRPPRRAPGRWQRVRAGERPRGAGAAGGQELHQVRGHHALVQVLRRAHGVQRRGQVLR

SEQ ID NO: 31362 - DNA, 1768 bp, Zea mays subsp. mays
  misc_feature (1)..(1768): Ceres Seq. ID no. 12354379
aaaatccgcttcaagtccgtcgattgttgttttgtctttcctctttctctatcgaaaacggagcgcctgatacgatagtagcagcacagctagctctcctccccagaatctcgccggattccgccccccgccgcgccctcgcttccgccgcaggttcgcgtctgtgcccgcgcgtgttgtactgccggcggacggcggtgttggtggtggttggtggagttgccgacgacggtaggctatggactaccggccctccgacagcagcggaactgatgatgatcttccacaatttccacataagagtatcagaggcagcggacgtgtcagtggtaatgggcgagctgttgttcctgctggttcatatgctagggcaccaactgatatggtagcacaagttcaacaacttgagcaagaagcatatcgctcagtccttcgtgcattcaaagcccagtctgatgccattacatgggagaaggaaggtctcatgactgaacttaggaaggagctaagagtatctgacaaagcacacagggaactgttaaatagagtcaacaacgataatattatatgtagcataagggaatggagatcaacaggagggcttcaggcaagcttgtctaataacccacaactgattcatgactctgttcccagtcctaccacctctggccgtaagaggcaaaagacatctcaatctgttcctgctttacctgcaccgcctcctgcgatgcattcacaacagctggctacaccaacacagccatcatcttcaactgctaggaaagcagtacccccaggccataaaggcaaaaagatgaaaccaggtcagaaggtaccaggtggctctgcagccaagcctataccatcttcagcaggtcctagtggaagaggaccgcacatgaataggggtggttctgctcctgaagctcaagctcagaatgtcgatccattgattggtcgtaaagtgattagtcggtggcctgaagacaatagtttctatgaagcagtcatatacgaatatgatgctgaaacgggccttcatgcactggtttatgacatcgatacggaagatgaaacctgggagtgggttgatcttaaagagatgggacctgaagacataagatggcaagaggatgactctgggatagaccctgttacatatctgcgcagccggggtggcccaactagtggcgttaggaagccagcaggtcgcggtgggcccatgccaggttctgtaagaggaagaggattacagaaaaacatgcctaagaaagattttccacctccacaaaatggtgttggcaagagaagttccgatgacattgatatccttcataccgagagcctaataaaagaggtggggaaagtttttagcgttagcaatcctgatccacaggaagtagaaaaggcaaagaaagcactgaaggagcaagaacagtcgttgattgacgccatagcaaggcttgctgaggcatcagatggtgaaagtgatgggcacaatcgtgggcgaaggaacttgtatgctgctaaccagcatcaagcaagctacgttggtgccatgcccgtcggtgacagagctggtgccatgtaaacactgcatgaacgcatgcacaacataaaataactgcctgttgtacaatccatcgctaatatttattctggatttaggtctctgtaggctcttttgctttgggatacttgtttttttttacaattgtaattcagaacgctgaccatgtaaagcttgtagatgcgtgtttctgtctcc

SEQ ID NO: 31363 - protein, 450 aa, Zea mays subsp. mays
  peptide (1)..(450): Ceres Seq. ID no. 12354380
  misc_feature (49)..(122): Pfam Name: Pfam Description:  ENT domain
  misc_feature (1)..(445): NCBI GI NO: 38637206 NR Description: unknown protein
  misc_feature (206)..(419): NCBI GI NO: 15229958 NR Description: unknown protein; protein id: At3g12140.1
  misc_feature (49)..(159): NCBI GI NO: 15229958 NR Description: unknown protein; protein id: At3g12140.1
  misc_feature (206)..(427): NCBI GI NO: 9294111 NR Description: emb|CAB88266
  misc_feature (49)..(159): NCBI GI NO: 9294111 NR Description: emb|CAB88266
  misc_feature (236)..(419): NCBI GI NO: 15240146 NR Description: putative protein; protein id: At5g06780
  misc_feature (48)..(184): NCBI GI NO: 15240146 NR Description: putative protein; protein id: At5g06780
  misc_feature (236)..(419): NCBI GI NO: 21553685 NR Description: unknown [Arabidopsis thaliana]
  misc_feature (49)..(184): NCBI GI NO: 21553685 NR Description: unknown [Arabidopsis thaliana]
  misc_feature (1)..(329): NCBI GI NO: 11358228 NR Description: hypothetical protein T24H18
MDYRPSDSSGTDDDLPQFPHKSIRGSGRVSGNGRAVVPAGSYARAPTDMVAQVQQLEQEAYRSVLRAFKAQSDAITWEKEGLMTELRKELRVSDKAHRELLNRVNNDNIICSIREWRSTGGLQASLSNNPQLIHDSVPSPTTSGRKRQKTSQSVPALPAPPPAMHSQQLATPTQPSSSTARKAVPPGHKGKKMKPGQKVPGGSAAKPIPSSAGPSGRGPHMNRGGSAPEAQAQNVDPLIGRKVISRWPEDNSFYEAVIYEYDAETGLHALVYDIDTEDETWEWVDLKEMGPEDIRWQEDDSGIDPVTYLRSRGGPTSGVRKPAGRGGPMPGSVRGRGLQKNMPKKDFPPPQNGVGKRSSDDIDILHTESLIKEVGKVFSVSNPDPQEVEKAKKALKEQEQSLIDAIARLAEASDGESDGHNRGRRNLYAANQHQASYVGAMPVGDRAGAM

SEQ ID NO: 31364 - protein, 402 aa, Zea mays subsp. mays
  peptide (1)..(402): Ceres Seq. ID no. 12354381
  misc_feature (1)..(74): Pfam Name: Pfam Description:  ENT domain
  misc_feature (1)..(397): NCBI GI NO: 38637206 NR Description: unknown protein
  misc_feature (158)..(371): NCBI GI NO: 15229958 NR Description: unknown protein; protein id: At3g12140.1
  misc_feature (1)..(111): NCBI GI NO: 15229958 NR Description: unknown protein; protein id: At3g12140.1
  misc_feature (158)..(379): NCBI GI NO: 9294111 NR Description: emb|CAB88266
  misc_feature (1)..(111): NCBI GI NO: 9294111 NR Description: emb|CAB88266
  misc_feature (188)..(371): NCBI GI NO: 15240146 NR Description: putative protein; protein id: At5g06780
  misc_feature (1)..(136): NCBI GI NO: 15240146 NR Description: putative protein; protein id: At5g06780
  misc_feature (188)..(371): NCBI GI NO: 21553685 NR Description: unknown [Arabidopsis thaliana]
  misc_feature (1)..(136): NCBI GI NO: 21553685 NR Description: unknown [Arabidopsis thaliana]
  misc_feature (1)..(281): NCBI GI NO: 11358228 NR Description: hypothetical protein T24H18
MVAQVQQLEQEAYRSVLRAFKAQSDAITWEKEGLMTELRKELRVSDKAHRELLNRVNNDNIICSIREWRSTGGLQASLSNNPQLIHDSVPSPTTSGRKRQKTSQSVPALPAPPPAMHSQQLATPTQPSSSTARKAVPPGHKGKKMKPGQKVPGGSAAKPIPSSAGPSGRGPHMNRGGSAPEAQAQNVDPLIGRKVISRWPEDNSFYEAVIYEYDAETGLHALVYDIDTEDETWEWVDLKEMGPEDIRWQEDDSGIDPVTYLRSRGGPTSGVRKPAGRGGPMPGSVRGRGLQKNMPKKDFPPPQNGVGKRSSDDIDILHTESLIKEVGKVFSVSNPDPQEVEKAKKALKEQEQSLIDAIARLAEASDGESDGHNRGRRNLYAANQHQASYVGAMPVGDRAGAM

SEQ ID NO: 31365 - protein, 368 aa, Zea mays subsp. mays
  peptide (1)..(368): Ceres Seq. ID no. 12354382
  misc_feature (1)..(363): NCBI GI NO: 38637206 NR Description: unknown protein
  misc_feature (124)..(337): NCBI GI NO: 15229958 NR Description: unknown protein; protein id: At3g12140.1
  misc_feature (1)..(77): NCBI GI NO: 15229958 NR Description: unknown protein; protein id: At3g12140.1
  misc_feature (124)..(345): NCBI GI NO: 9294111 NR Description: emb|CAB88266
  misc_feature (1)..(77): NCBI GI NO: 9294111 NR Description: emb|CAB88266
  misc_feature (154)..(337): NCBI GI NO: 15240146 NR Description: putative protein; protein id: At5g06780
  misc_feature (1)..(102): NCBI GI NO: 15240146 NR Description: putative protein; protein id: At5g06780
  misc_feature (154)..(337): NCBI GI NO: 21553685 NR Description: unknown [Arabidopsis thaliana]
  misc_feature (1)..(102): NCBI GI NO: 21553685 NR Description: unknown [Arabidopsis thaliana]
  misc_feature (1)..(247): NCBI GI NO: 11358228 NR Description: hypothetical protein T24H18
MTELRKELRVSDKAHRELLNRVNNDNIICSIREWRSTGGLQASLSNNPQLIHDSVPSPTTSGRKRQKTSQSVPALPAPPPAMHSQQLATPTQPSSSTARKAVPPGHKGKKMKPGQKVPGGSAAKPIPSSAGPSGRGPHMNRGGSAPEAQAQNVDPLIGRKVISRWPEDNSFYEAVIYEYDAETGLHALVYDIDTEDETWEWVDLKEMGPEDIRWQEDDSGIDPVTYLRSRGGPTSGVRKPAGRGGPMPGSVRGRGLQKNMPKKDFPPPQNGVGKRSSDDIDILHTESLIKEVGKVFSVSNPDPQEVEKAKKALKEQEQSLIDAIARLAEASDGESDGHNRGRRNLYAANQHQASYVGAMPVGDRAGAM

SEQ ID NO: 31366 - DNA, 1632 bp, Zea mays subsp. mays
  misc_feature (1)..(1632): Ceres Seq. ID no. 12391417
gcacgagaccattacctagaacatcctaatcgaaaaaacaacatacttctagattctggtcgatcgtcgatgaggccggcgccggagacaagcacgcggcggccgcagctgcgtcgccgtcgtccagtgccattggtgacggtggccgtgtctttggcgctcatctcgctggcgtgccttcctgtcttcgcggatgcaagcagagcgctgcaccgcgaccgggaggagcaccggaggcagcaccaccgcacggaggacaagaagagccgcgtctcgctccctcccgacgctgacggcgactctccgcccgagcctccggactccggcggcgcgccgccgcctgccgacgacagcgactgcggcaacgtgttcgacgtgagggcgttcggcgcgtcgggcgacggctcgtgcgtcgacgacgacacggccgcgttccgcgcggtgtggaaggcggcgtgctcctccgactccgccgcggccacgctgctggtgccgtcggacggcgtgttcaccatcgcctccaccatcttctccgggccgtgcaagcccgacctcaccttccaaatcgatggcgtcctcatgccgccggacggcccggcgagctggccggcgacggacagccggaaacagtggatagtcttctacaaggccgatcgcttgacgctggcgggggaaggcaccatcgaaggcaacggtgaggagtggtgggatctgccgtgcaagcctcacaggggtccaaacggatcgacgctgcgcggaccatgtgacagccccgcgctcatacgattcttctcgagcaatgacgtgacggtatgcggcctgcggatcgagaacagcccgcagttccacctcaggttcgacgactgcgagcgcgtgcgcgtcgacggcctcttcgtcagctcgccggcgtccagccccaacacggacggcgtccacgtcgagaacaccaagtccgtccagatcctcaactctaggatctacaacggcgacgactgcgtctccatcggcgccggatgctccgatgtccacgtcgagaacataacatgcggccacggccatggaattagcatcggcagcctgggtgtccacaacacccacgcctgcgtgtccaacgtcacggtccggaacgtgcggatactcgactccgacaacggcgtccggatcaagacgtggcagggcggcgccggcgcggtgtcggcggtcgagttcaccggcgtgcagatgcagaacgtgaagaactgcatcgtcatcgaccagtactactgcctcggccacgggtgcgccaaccagacctccgcggtgcgcgtggccggcgtcgcgtacagggacatccacggcacgtacaacccgcaggccggcgcgcccatccgcctcgcgtgcagcgacgccgtcgcctgcacggacatcaccatgtctggcgtcgagctgctgccggccggcggggacgacggagcactgctcgccgacccctactgctggaacgcgtacggggtcatggagacgctcacgctgccaccggtgtactgcttgctggagggcagcccggagtctctccaggatccgctcaccagttgctgagatgagatcgttttctttactaacaaagatttctctcctgagacagtcaacgcg

SEQ ID NO: 31367 - protein, 525 aa, Zea mays subsp. mays
  peptide (1)..(525): Ceres Seq. ID no. 12391418
  misc_feature (153)..(476): Pfam Name: Pfam Description:  Glycosyl hydrolases family 28
  misc_feature (92)..(525): NCBI GI NO: 34894822 NR Description: putative polygalacturonase PG2
  misc_feature (54)..(525): NCBI GI NO: 15221078 NR Description: polygalacturonase, putative; protein id:At1g48100
  misc_feature (54)..(525): NCBI GI NO: 15294256 NR Description: At1g48100/F21D18_17 [Arabidopsis thaliana]
  misc_feature (54)..(525): NCBI GI NO: 25405916 NR Description: protein F21D18.18
  misc_feature (64)..(522): NCBI GI NO: 18378969 NR Description: polygalacturonase, putative; protein id:At1g02460
  misc_feature (79)..(525): NCBI GI NO: 34894418 NR Description: putative polygalacturonase-like protein
  misc_feature (111)..(516): NCBI GI NO: 15223598 NR Description: polygalacturonase, putative; protein id:At1g56710
  misc_feature (101)..(482): NCBI GI NO: 15234359 NR Description: polygalacturonase, putative; protein id:At4g01890
  misc_feature (252)..(515): NCBI GI NO: 18406803 NR Description: polygalacturonase, putative; protein id:At1g60590
  misc_feature (252)..(515): NCBI GI NO: 25404278 NR Description: probable polygalacturonase F8A5.12
ARDHYLEHPNRKNNILLDSGRSSMRPAPETSTRRPQLRRRRPVPLVTVAVSLALISLACLPVFADASRALHRDREEHRRQHHRTEDKKSRVSLPPDADGDSPPEPPDSGGAPPPADDSDCGNVFDVRAFGASGDGSCVDDDTAAFRAVWKAACSSDSAAATLLVPSDGVFTIASTIFSGPCKPDLTFQIDGVLMPPDGPASWPATDSRKQWIVFYKADRLTLAGEGTIEGNGEEWWDLPCKPHRGPNGSTLRGPCDSPALIRFFSSNDVTVCGLRIENSPQFHLRFDDCERVRVDGLFVSSPASSPNTDGVHVENTKSVQILNSRIYNGDDCVSIGAGCSDVHVENITCGHGHGISIGSLGVHNTHACVSNVTVRNVRILDSDNGVRIKTWQGGAGAVSAVEFTGVQMQNVKNCIVIDQYYCLGHGCANQTSAVRVAGVAYRDIHGTYNPQAGAPIRLACSDAVACTDITMSGVELLPAGGDDGALLADPYCWNAYGVMETLTLPPVYCLLEGSPESLQDPLTSC

SEQ ID NO: 31368 - protein, 502 aa, Zea mays subsp. mays
  peptide (1)..(502): Ceres Seq. ID no. 12391419
  misc_feature (130)..(453): Pfam Name: Pfam Description:  Glycosyl hydrolases family 28
  misc_feature (69)..(502): NCBI GI NO: 34894822 NR Description: putative polygalacturonase PG2
  misc_feature (31)..(502): NCBI GI NO: 15221078 NR Description: polygalacturonase, putative; protein id:At1g48100
  misc_feature (31)..(502): NCBI GI NO: 15294256 NR Description: At1g48100/F21D18_17 [Arabidopsis thaliana]
  misc_feature (31)..(502): NCBI GI NO: 25405916 NR Description: protein F21D18.18
  misc_feature (41)..(499): NCBI GI NO: 18378969 NR Description: polygalacturonase, putative; protein id:At1g02460
  misc_feature (56)..(502): NCBI GI NO: 34894418 NR Description: putative polygalacturonase-like protein
  misc_feature (88)..(493): NCBI GI NO: 15223598 NR Description: polygalacturonase, putative; protein id:At1g56710
  misc_feature (78)..(459): NCBI GI NO: 15234359 NR Description: polygalacturonase, putative; protein id:At4g01890
  misc_feature (229)..(492): NCBI GI NO: 18406803 NR Description: polygalacturonase, putative; protein id:At1g60590
  misc_feature (229)..(492): NCBI GI NO: 25404278 NR Description: probable polygalacturonase F8A5.12
MRPAPETSTRRPQLRRRRPVPLVTVAVSLALISLACLPVFADASRALHRDREEHRRQHHRTEDKKSRVSLPPDADGDSPPEPPDSGGAPPPADDSDCGNVFDVRAFGASGDGSCVDDDTAAFRAVWKAACSSDSAAATLLVPSDGVFTIASTIFSGPCKPDLTFQIDGVLMPPDGPASWPATDSRKQWIVFYKADRLTLAGEGTIEGNGEEWWDLPCKPHRGPNGSTLRGPCDSPALIRFFSSNDVTVCGLRIENSPQFHLRFDDCERVRVDGLFVSSPASSPNTDGVHVENTKSVQILNSRIYNGDDCVSIGAGCSDVHVENITCGHGHGISIGSLGVHNTHACVSNVTVRNVRILDSDNGVRIKTWQGGAGAVSAVEFTGVQMQNVKNCIVIDQYYCLGHGCANQTSAVRVAGVAYRDIHGTYNPQAGAPIRLACSDAVACTDITMSGVELLPAGGDDGALLADPYCWNAYGVMETLTLPPVYCLLEGSPESLQDPLTSC

SEQ ID NO: 31369 - protein, 332 aa, Zea mays subsp. mays
  peptide (1)..(332): Ceres Seq. ID no. 12391420
  misc_feature (1)..(283): Pfam Name: Pfam Description:  Glycosyl hydrolases family 28
  misc_feature (1)..(332): NCBI GI NO: 34894822 NR Description: putative polygalacturonase PG2
  misc_feature (1)..(332): NCBI GI NO: 15221078 NR Description: polygalacturonase, putative; protein id:At1g48100
  misc_feature (1)..(332): NCBI GI NO: 15294256 NR Description: At1g48100/F21D18_17 [Arabidopsis thaliana]
  misc_feature (1)..(332): NCBI GI NO: 25405916 NR Description: protein F21D18.18
  misc_feature (1)..(329): NCBI GI NO: 18378969 NR Description: polygalacturonase, putative; protein id:At1g02460
  misc_feature (1)..(332): NCBI GI NO: 34894418 NR Description: putative polygalacturonase-like protein
  misc_feature (1)..(323): NCBI GI NO: 15223598 NR Description: polygalacturonase, putative; protein id:At1g56710
  misc_feature (1)..(289): NCBI GI NO: 15234359 NR Description: polygalacturonase, putative; protein id:At4g01890
  misc_feature (59)..(322): NCBI GI NO: 18406803 NR Description: polygalacturonase, putative; protein id:At1g60590
  misc_feature (59)..(322): NCBI GI NO: 25404278 NR Description: probable polygalacturonase F8A5.12
MPPDGPASWPATDSRKQWIVFYKADRLTLAGEGTIEGNGEEWWDLPCKPHRGPNGSTLRGPCDSPALIRFFSSNDVTVCGLRIENSPQFHLRFDDCERVRVDGLFVSSPASSPNTDGVHVENTKSVQILNSRIYNGDDCVSIGAGCSDVHVENITCGHGHGISIGSLGVHNTHACVSNVTVRNVRILDSDNGVRIKTWQGGAGAVSAVEFTGVQMQNVKNCIVIDQYYCLGHGCANQTSAVRVAGVAYRDIHGTYNPQAGAPIRLACSDAVACTDITMSGVELLPAGGDDGALLADPYCWNAYGVMETLTLPPVYCLLEGSPESLQDPLTSC

SEQ ID NO: 31370 - DNA, 1273 bp, Zea mays subsp. mays
  misc_feature (1)..(1273): Ceres Seq. ID no. 12350633
agattcatcggagatcatcgggaggagagcactaactgggcgacgcacaggcacagcatggggcagcggttcaatctgaccatgtcgctcctcgccgtcgtcgtcctagcgcttctcgccgcgcccgtgtgcctccgccgcgcaggtcaagacgaccgacacgcgctggagcttccagctccctttacccagcggggtcagcggcgccgagagcctcgcgttcgacggcaagggcgaggggccctacgccggcgtctcagacggccgtgtcctcaagtggggcggcagcgccgtcggctggaccacgttcgcgcacagcgccaactacaggaagatccccctgtgcacggccggcgtagtgccgtcggcggagaccgagagcatgtgcggccgccccctgggcctccagttccacgccaagaccggcgacctctacatcgccgacgcctacctggggctcacgcgggtcggcccgggaggcggcgaggccgaggtgctggcgaccggtgcggacgacggcgtcccgttcaacttcgtcaacggcctcgacgtcgacgaggccaccggcgacgtctacttcaccgactcgagcgcgacgtacccgaggaggttcaacacagagatcatgatgaacgcggacgcgacggggcggctgctcaggtacgacgcgcgcacgaggagcgtctccgtgctcaaggccggactgccgtacccgaacggcgtggcggtcagccccgacggcgagcaggtcgtggtcgcgcacaccgtgccctgccaggcgttcaggtacttcctccggggcgcccggaaggggcagtacgagctgctggcggacctgccgggctacccggacaacgtgaggcgggatggcaggggtggctactgggtggcgctgaaccaggagaagcagcggctggacgcgactccggcgacgggccccgtgaagcacctcgtcggggtccgcctggacgcccacggcgtggaggtggaggagcttacggcggccaagggtgtcacgctgagcgacgtggcggagacgaaggggaagctgtggctgggctccatcgagctcgagtacgtcggactcgttgcttgagcggctgcgtaccacactagcaacgttagctatggtcatgttatgttaggaattaggattaggaattaggattaggaattggattagcaagtacgagcgagtagcctttagtttcatgtcttcgcgtgacaaacatcgttattttaccgattatcaataaatttcatttattgcttg

SEQ ID NO: 31371 - protein, 371 aa, Zea mays subsp. mays
  peptide (1)..(371): Ceres Seq. ID no. 12350634
  misc_feature (278)..(336): Pfam Name: 20 copies Pfam Description: Collagen triple helix repeat
  misc_feature (46)..(343): NCBI GI NO: 11362193 NR Description: hypothetical protein
  misc_feature (69)..(363): NCBI GI NO: 11362193 NR Description: hypothetical protein
RFIGDHREESTNWATHRHSMGQRFNLTMSLLAVVVLALLAAPVCLRRAGQDDRHALELPAPFTQRGQRRREPRVRRQGRGALRRRLRRPCPQVGRQRRRLDHVRAQRQLQEDPPVHGRRSAVGGDREHVRPPPGPPVPRQDRRPLHRRRLPGAHAGRPGRRRGRGAGDRCGRRRPVQLRQRPRRRRGHRRRLLHRLERDVPEEVQHRDHDERGRDGAAAQVRRAHEERLRAQGRTAVPERRGGQPRRRAGRGRAHRALPGVQVLPPGRPEGAVRAAGGPAGLPGQREAGWQGWLLGGAEPGEAAAGRDSGDGPREAPRRGPPGRPRRGGGGAYGGQGCHAERRGGDEGEAVAGLHRARVRRTRCLSGCVPH

SEQ ID NO: 31372 - protein, 352 aa, Zea mays subsp. mays
  peptide (1)..(352): Ceres Seq. ID no. 12350635
  misc_feature (259)..(317): Pfam Name: 20 copies Pfam Description: Collagen triple helix repeat
  misc_feature (27)..(324): NCBI GI NO: 11362193 NR Description: hypothetical protein
  misc_feature (50)..(344): NCBI GI NO: 11362193 NR Description: hypothetical protein
MGQRFNLTMSLLAVVVLALLAAPVCLRRAGQDDRHALELPAPFTQRGQRRREPRVRRQGRGALRRRLRRPCPQVGRQRRRLDHVRAQRQLQEDPPVHGRRSAVGGDREHVRPPPGPPVPRQDRRPLHRRRLPGAHAGRPGRRRGRGAGDRCGRRRPVQLRQRPRRRRGHRRRLLHRLERDVPEEVQHRDHDERGRDGAAAQVRRAHEERLRAQGRTAVPERRGGQPRRRAGRGRAHRALPGVQVLPPGRPEGAVRAAGGPAGLPGQREAGWQGWLLGGAEPGEAAAGRDSGDGPREAPRRGPPGRPRRGGGGAYGGQGCHAERRGGDEGEAVAGLHRARVRRTRCLSGCVPH

SEQ ID NO: 31373 - protein, 344 aa, Zea mays subsp. mays
  peptide (1)..(344): Ceres Seq. ID no. 12350636
  misc_feature (251)..(309): Pfam Name: 20 copies Pfam Description: Collagen triple helix repeat
  misc_feature (19)..(316): NCBI GI NO: 11362193 NR Description: hypothetical protein
  misc_feature (42)..(336): NCBI GI NO: 11362193 NR Description: hypothetical protein
MSLLAVVVLALLAAPVCLRRAGQDDRHALELPAPFTQRGQRRREPRVRRQGRGALRRRLRRPCPQVGRQRRRLDHVRAQRQLQEDPPVHGRRSAVGGDREHVRPPPGPPVPRQDRRPLHRRRLPGAHAGRPGRRRGRGAGDRCGRRRPVQLRQRPRRRRGHRRRLLHRLERDVPEEVQHRDHDERGRDGAAAQVRRAHEERLRAQGRTAVPERRGGQPRRRAGRGRAHRALPGVQVLPPGRPEGAVRAAGGPAGLPGQREAGWQGWLLGGAEPGEAAAGRDSGDGPREAPRRGPPGRPRRGGGGAYGGQGCHAERRGGDEGEAVAGLHRARVRRTRCLSGCVPH

SEQ ID NO: 31374 - DNA, 1409 bp, Zea mays subsp. mays
  misc_feature (1)..(1409): Ceres Seq. ID no. 12415269
gcacgagaccattacctagaacatcctaatcgaaaagtttacaccgagggttctctctttgtctgttcactgttctactgggacgaccccaaatccccaaatcgaaaggggccgtccggctcagggtttctcgacggctccttgccctctccgccatggacgcacagcgagccctccttgacgagctcatgggcacagctcgcaacctaacggaggaggagaagaaggggcacaaagagctgaagtgggacgatccggacgtgtgcggcccttacatggttcgattctgtcctcacgaccttttcgtcaacaccaagagcaatatcgggccgtgctcgaggatccacgatccgaagctcaaggaaagctttgagaagtctcctaggcacgatacttatatgcaaaggtttgaggcagagcttgcacaacaatgtgagaaattggtaatggacttagatagaaagataaggcgtggtcgagaaaggctggctcacgattctgctgtgccaatgccaatccctggaaattagctgagctgctttcagtgcgaaaagaacaggtgaagaagctgctggatcaaattgaggagcttggtgaggctggtaaagtggatgaagctgaggcacttatgagaagggttgacattttaaacgctgagaagacagctttagctaacgaagcagacaacaaagtagctatgcttgagaagaagatggaactttgtgaaacatgtggatcattcttagttgctgatgatgctcttgagagaacgcagtcccatgtgactgggaaacaacacattggttatggcatggttagggatttcctggcagaatacaaggcagcaaaagagaagacaaaagaggaagagcggcttgcaagggagcagaaagcagaggagcatcggaaacagaggggaaaagagtatgatagtgggggcagggatagagataccagaagggagaggtctggggagcgtgactttgaccgtgatcgtcagtatgagcgaagcagaggaagagatagggtttatgattacagggacagaggatcagaacaccgaagcaatcgctacagaaatgggagggattctgaaagaggtggacacagatacaggagtggtggtatgacaaatgaccgagggagaatgaggagcagatcacgttctccaaccaggcatggctatggaagatctagaagtccagatcattagctgcctagctggacatttagatagttttattcacagttgggactcatgaggtagacagttcccttctgctatttattactgtacaatgggttttattgaagtgtcgcacttttttaagtctctgatctgttgtaacagctctgttggaaccctacagtctccctattttgcatggggaaaaattcccaggtcggtg

SEQ ID NO: 31375 - protein, 194 aa, Zea mays subsp. mays
  peptide (1)..(194): Ceres Seq. ID no. 12415270
  misc_feature (1)..(94): Pfam Name: Pfam Description:  LUC7 N_terminus
  misc_feature (1)..(185): NCBI GI NO: 28411928 NR Description: OSJNBa0027N13.9
  misc_feature (1)..(188): NCBI GI NO: 30524685 NR Description: salt tolerance protein 3 [Beta vulgaris]
  misc_feature (1)..(161): NCBI GI NO: 15242081 NR Description: arginine-aspartate-rich RNA binding protein-like
  misc_feature (1)..(193): NCBI GI NO: 19923485 NR Description: cisplatin resistance-associated overexpressed
  misc_feature (1)..(193): NCBI GI NO: 23956166 NR Description: RIKEN cDNA 3300001P08 [Mus musculus]
  misc_feature (1)..(193): NCBI GI NO: 7023491 NR Description: unnamed protein product [Homo sapiens]
  misc_feature (1)..(161): NCBI GI NO: 1699053 NR Description: putative aspartate-arginine-rich mRNA bindingprotein
  misc_feature (1)..(88): NCBI GI NO: 12852160 NR Description: unnamed protein product [Mus musculus]
  misc_feature (1)..(88): NCBI GI NO: 28422640 NR Description: Similar to cisplatin resistance-associatedoverexpressed protein
  misc_feature (1)..(154): NCBI GI NO: 21536228 NR Description: Luc7 homolog (S
MRRVDILNAEKTALANEADNKVAMLEKKMELCETCGSFLVADDALERTQSHVTGKQHIGYGMVRDFLAEYKAAKEKTKEEERLAREQKAEEHRKQRGKEYDSGGRDRDTRRERSGERDFDRDRQYERSRGRDRVYDYRDRGSEHRSNRYRNGRDSERGGHRYRSGGMTNDRGRMRSRSRSPTRHGYGRSRSPDH

SEQ ID NO: 31376 - protein, 171 aa, Zea mays subsp. mays
  peptide (1)..(171): Ceres Seq. ID no. 12415271
  misc_feature (1)..(71): Pfam Name: Pfam Description:  LUC7 N_terminus
  misc_feature (1)..(162): NCBI GI NO: 28411928 NR Description: OSJNBa0027N13.9
  misc_feature (1)..(165): NCBI GI NO: 30524685 NR Description: salt tolerance protein 3 [Beta vulgaris]
  misc_feature (1)..(138): NCBI GI NO: 15242081 NR Description: arginine-aspartate-rich RNA binding protein-like
  misc_feature (1)..(170): NCBI GI NO: 19923485 NR Description: cisplatin resistance-associated overexpressed
  misc_feature (1)..(170): NCBI GI NO: 23956166 NR Description: RIKEN cDNA 3300001P08 [Mus musculus]
  misc_feature (1)..(170): NCBI GI NO: 7023491 NR Description: unnamed protein product [Homo sapiens]
  misc_feature (1)..(138): NCBI GI NO: 1699053 NR Description: putative aspartate-arginine-rich mRNA bindingprotein
  misc_feature (1)..(65): NCBI GI NO: 12852160 NR Description: unnamed protein product [Mus musculus]
  misc_feature (1)..(65): NCBI GI NO: 28422640 NR Description: Similar to cisplatin resistance-associatedoverexpressed protein
  misc_feature (1)..(131): NCBI GI NO: 21536228 NR Description: Luc7 homolog (S
MLEKKMELCETCGSFLVADDALERTQSHVTGKQHIGYGMVRDFLAEYKAAKEKTKEEERLAREQKAEEHRKQRGKEYDSGGRDRDTRRERSGERDFDRDRQYERSRGRDRVYDYRDRGSEHRSNRYRNGRDSERGGHRYRSGGMTNDRGRMRSRSRSPTRHGYGRSRSPDH

SEQ ID NO: 31377 - protein, 166 aa, Zea mays subsp. mays
  peptide (1)..(166): Ceres Seq. ID no. 12415272
  misc_feature (1)..(66): Pfam Name: Pfam Description:  LUC7 N_terminus
  misc_feature (1)..(157): NCBI GI NO: 28411928 NR Description: OSJNBa0027N13.9
  misc_feature (1)..(160): NCBI GI NO: 30524685 NR Description: salt tolerance protein 3 [Beta vulgaris]
  misc_feature (1)..(133): NCBI GI NO: 15242081 NR Description: arginine-aspartate-rich RNA binding protein-like
  misc_feature (1)..(165): NCBI GI NO: 19923485 NR Description: cisplatin resistance-associated overexpressed
  misc_feature (1)..(165): NCBI GI NO: 23956166 NR Description: RIKEN cDNA 3300001P08 [Mus musculus]
  misc_feature (1)..(165): NCBI GI NO: 7023491 NR Description: unnamed protein product [Homo sapiens]
  misc_feature (1)..(133): NCBI GI NO: 1699053 NR Description: putative aspartate-arginine-rich mRNA bindingprotein
  misc_feature (1)..(60): NCBI GI NO: 12852160 NR Description: unnamed protein product [Mus musculus]
  misc_feature (1)..(60): NCBI GI NO: 28422640 NR Description: Similar to cisplatin resistance-associatedoverexpressed protein
  misc_feature (1)..(126): NCBI GI NO: 21536228 NR Description: Luc7 homolog (S
MELCETCGSFLVADDALERTQSHVTGKQHIGYGMVRDFLAEYKAAKEKTKEEERLAREQKAEEHRKQRGKEYDSGGRDRDTRRERSGERDFDRDRQYERSRGRDRVYDYRDRGSEHRSNRYRNGRDSERGGHRYRSGGMTNDRGRMRSRSRSPTRHGYGRSRSPDH

SEQ ID NO: 31378 - DNA, 1129 bp, Zea mays subsp. mays
  misc_feature (1)..(1129): Ceres Seq. ID no. 12416011
caaaataatgattctactgacctggttgctctaatggatagcctaggccgcacctgcccgaacttgaggaacatgcacatctcatcagaccgcttgtgcaacgaagctgtgtttgctctagagagtgctaacctcaggggcatgtgcatgctctccttggttctaggttcaaaaataacagatgcagctgtcgcatcgattgttcgttcttacgcgagcttggagctgctcgatttaagcgggtctggcatcactgacaatgggcttgggatgatcagcaacacgttccctaacaccctaacacgtctgctccttgctctgtgcccaaacatcaccccatgcgggattcaggtggctgcagccacagctgccgctccttcgcctcatggactgtggcaagagcatatgtgctaccccccagcctgaagctgggagatcatactctggcgatctaactgatgggatcaaattctgctccaaattacctgtccagagaaagcagcaggctacttgccagaagctgatcataaagcatagcgccctgaagaagctcagcctgtggggctgttcagggatcgatgccctgtacgtgagctgcccggagctggtcgagctgaacctcaactcctgcacgaaccttcatccagagcggctgctgttccagtgccccaagctggaagacgtgcacgtcaacgggtgccgtgacatgctggtcggagccatcaggaaccaggtccttaacgagttcgcggccgcggcgccccgggtgccctgcaagcggctggccgacgggtccaagcgcgtgcacgtgccccactacatggtagagcagctggaggaacatgagaaatggggcagcaggccgcggaagagccagtgcaccgttcatctcacctaggctaggcgcctgttaagtgagaggccctggtgatcgccggcgtcaggagcttgcggcgtcgatacagcgagactagatggaaatggtacggatatttttcgatatccgtcggttatgaaatggtcaaaactttatatggataatctatatctaaatccaaatatttgaaatctgactttctgaatccagctactcaaaatcgtcagatttgaagacaaatatagccattcg

SEQ ID NO: 31379 - protein, 170 aa, Zea mays subsp. mays
  peptide (1)..(170): Ceres Seq. ID no. 12416012
  misc_feature (1)..(167): NCBI GI NO: 18087570 NR Description: AT3g54650/T5N23_10 [Arabidopsis thaliana]
  misc_feature (1)..(118): NCBI GI NO: 18410106 NR Description: F-box protein family, AtFBL17
MDCGKSICATPQPEAGRSYSGDLTDGIKFCSKLPVQRKQQATCQKLIIKHSALKKLSLWGCSGIDALYVSCPELVELNLNSCTNLHPERLLFQCPKLEDVHVNGCRDMLVGAIRNQVLNEFAAAAPRVPCKRLADGSKRVHVPHYMVEQLEEHEKWGSRPRKSQCTVHLT

SEQ ID NO: 31380 - protein, 141 aa, Zea mays subsp. mays
  peptide (1)..(141): Ceres Seq. ID no. 12416013
  misc_feature (1)..(121): NCBI GI NO: 18087570 NR Description: AT3g54650/T5N23_10 [Arabidopsis thaliana]
  misc_feature (1)..(121): NCBI GI NO: 18410106 NR Description: F-box protein family, AtFBL17
QNNDSTDLVALMDSLGRTCPNLRNMHISSDRLCNEAVFALESANLRGMCMLSLVLGSKITDAAVASIVRSYASLELLDLSGSGITDNGLGMISNTFPNTLTRLLLALCPNITPCGIQVAAATAAAPSPHGLWQEHMCYPPA

SEQ ID NO: 31381 - protein, 130 aa, Zea mays subsp. mays
  peptide (1)..(130): Ceres Seq. ID no. 12416014
  misc_feature (1)..(110): NCBI GI NO: 18087570 NR Description: AT3g54650/T5N23_10 [Arabidopsis thaliana]
  misc_feature (1)..(110): NCBI GI NO: 18410106 NR Description: F-box protein family, AtFBL17
MDSLGRTCPNLRNMHISSDRLCNEAVFALESANLRGMCMLSLVLGSKITDAAVASIVRSYASLELLDLSGSGITDNGLGMISNTFPNTLTRLLLALCPNITPCGIQVAAATAAAPSPHGLWQEHMCYPPA

SEQ ID NO: 31382 - DNA, 1173 bp, Zea mays subsp. mays
  misc_feature (1)..(1173): Ceres Seq. ID no. 12365916
agtagtcctctcctctcctcccatccatgcttcggtccacgcacccacccagccccaccagcggcagctccgcggcgccggcgtccagctccgacgccgcggcgatggtcgggggcggcgcggcggcgggcagcggcggcgcaccgagcggcgccaagctgctgcagatcctcaacgtgcgggtcgtgggcagcggcgaccgcgtggtggtgctgtcccacgggttcggcacggaccagtcggcgtggagccgcgtgctcccctacctcacccgcgaccaccgcgtggtgctctacgacctcgtctgcgccggcagcgtcaacccggagcacttcgacttccgccgctacgacacgctcgactcgtacgtcgacgacctcctcgccatcctcgacgcgctccgcatcgcgcgctgcgccttcgtcggccactccgtctccgccatgatcggcatcctcgcctccatccgccgccccgagctcttcgccaagctcgtactcatcggcgcgtcgcccaggttcctgaacgaccacgactaccacggcgggttcgagctgccggagatccagcaggtgttcgacgcgatggcggccaactactcggcgtgggcgaccgggtacgccccgctggcggtgggcgcggacgtgccggcggcggtgcaggagttcagccgcaccctgttcaacatgcggccggacatctccctccacgtgtgccgcaccgtgttcaacaccgacctccgcggcgtgctgggcatggtgcggtccccctgcgtggtggtgcagaccacccgcgacgtctccgtcccggcctccgtcgccgcctacctcaaggcccacctcggcggccgcaccgccgtcgagttcctccagaccgagggccacctcccgcacctcagcgcccccggcctcctcgcgcaggtgctccgccgcgcgctcgcccggtactagcggagcgcctgccacctacggtcctggtggtcatcggtattttttaccgcctcgatttaccctgtgccgagaccggggacggggatcagataatgtggcgacccgcgccgtttgctgtgcgcgccatgactgtagactgtagtacgagtgtacgacttgttctggacttctggtacccgatttttttactgctttttaatggagagccgagcagtagcactgg

SEQ ID NO: 31383 - protein, 390 aa, Zea mays subsp. mays
  peptide (1)..(390): Ceres Seq. ID no. 12365917
  misc_feature (9)..(321): NCBI GI NO: 22960097 NR Description: hypothetical protein [Rhodobacter sphaeroides]
  misc_feature (15)..(312): NCBI GI NO: 29247944 NR Description: GLP_26_54603_52153 [Giardia lamblia ATCC 50803]
  misc_feature (41)..(302): NCBI GI NO: 79833 NR Description: hypothetical 119
  misc_feature (3)..(321): NCBI GI NO: 23018788 NR Description: hypothetical protein [Thermobifida fusca]
  misc_feature (31)..(318): NCBI GI NO: 29247944 NR Description: GLP_26_54603_52153 [Giardia lamblia ATCC 50803]
  misc_feature (84)..(359): NCBI GI NO: 23018788 NR Description: hypothetical protein [Thermobifida fusca]
VVLSSPPIHASVHAPTQPHQRQLRGAGVQLRRRGDGRGRRGGGQRRRTERRQAAADPQRAGRGQRRPRGGAVPRVRHGPVGVEPRAPLPHPRPPRGALRPRLRRQRQPGALRLPPLRHARLVRRRPPRHPRRAPHRALRLRRPLRLRHDRHPRLHPPPRALRQARTHRRVAQVPERPRLPRRVRAAGDPAGVRRDGGQLLGVGDRVRPAGGGRGRAGGGAGVQPHPVQHAAGHLPPRVPHRVQHRPPRRAGHGAVPLRGGADHPRRLRPGLRRRLPQGPPRRPHRRRVPPDRGPPPAPQRPRPPRAGAPPRARPVLAERLPPTVLVVIGIFYRLDLPCAETGDGDQIMWRPAPFAVRAMTVDCSTSVRLVLDFWYPIFLLLFNGEPSSST

SEQ ID NO: 31384 - protein, 307 aa, Zea mays subsp. mays; identical to SEQ ID NO: 30122
  peptide (1)..(307): Ceres Seq. ID no. 12365918
  misc_feature (85)..(302): Pfam Name: Pfam Description:  alpha/beta hydrolase fold
  misc_feature (45)..(306): NCBI GI NO: 21593927 NR Description: unknown [Arabidopsis thaliana]
  misc_feature (45)..(306): NCBI GI NO: 18396732 NR Description: expressed protein; protein id: At3g03990
  misc_feature (165)..(302): NCBI GI NO: 40736991 NR Description: putative hydrolases
  misc_feature (50)..(166): NCBI GI NO: 40736991 NR Description: putative hydrolases
  misc_feature (50)..(302): NCBI GI NO: 15235567 NR Description: putative protein; protein id: At4g37470
  misc_feature (50)..(301): NCBI GI NO: 24216360 NR Description: Predicted hydrolases or acyltransferases
  misc_feature (45)..(304): NCBI GI NO: 15230110 NR Description: unknown protein; protein id: At3g24420.1
  misc_feature (49)..(305): NCBI GI NO: 34912326 NR Description: P0451D05.26
  misc_feature (51)..(305): NCBI GI NO: 22298700 NR Description: ORF_ID:tlr1157~hypothetical protein
  misc_feature (50)..(300): NCBI GI NO: 16080463 NR Description: similar to hydrolase [Bacillus subtilis]

SEQ ID NO: 31385 - protein, 281 aa, Zea mays subsp. mays
  peptide (1)..(281): Ceres Seq. ID no. 12365919
  misc_feature (59)..(276): Pfam Name: Pfam Description:  alpha/beta hydrolase fold
  misc_feature (19)..(280): NCBI GI NO: 21593927 NR Description: unknown [Arabidopsis thaliana]
  misc_feature (19)..(280): NCBI GI NO: 18396732 NR Description: expressed protein; protein id: At3g03990
  misc_feature (139)..(276): NCBI GI NO: 40736991 NR Description: putative hydrolases
  misc_feature (24)..(140): NCBI GI NO: 40736991 NR Description: putative hydrolases
  misc_feature (24)..(276): NCBI GI NO: 15235567 NR Description: putative protein; protein id: At4g37470
  misc_feature (24)..(275): NCBI GI NO: 24216360 NR Description: Predicted hydrolases or acyltransferases
  misc_feature (19)..(278): NCBI GI NO: 15230110 NR Description: unknown protein; protein id: At3g24420.1
  misc_feature (23)..(279): NCBI GI NO: 34912326 NR Description: P0451D05.26
  misc_feature (25)..(279): NCBI GI NO: 22298700 NR Description: ORF_ID:tlr1157~hypothetical protein
  misc_feature (24)..(274): NCBI GI NO: 16080463 NR Description: similar to hydrolase [Bacillus subtilis]
MVGGGAAAGSGGAPSGAKLLQILNVRVVGSGDRVVVLSHGFGTDQSAWSRVLPYLTRDHRVVLYDLVCAGSVNPEHFDFRRYDTLDSYVDDLLAILDALRIARCAFVGHSVSAMIGILASIRRPELFAKLVLIGASPRFLNDHDYHGGFELPEIQQVFDAMAANYSAWATGYAPLAVGADVPAAVQEFSRTLFNMRPDISLHVCRTVFNTDLRGVLGMVRSPCVVVQTTRDVSVPASVAAYLKAHLGGRTAVEFLQTEGHLPHLSAPGLLAQVLRRALARY

SEQ ID NO: 31386 - DNA, 1537 bp, Zea mays subsp. mays
  misc_feature (1)..(1537): Ceres Seq. ID no. 12361456
gcacgagaccattacctagaacatcctaatcgaaaaagctattcgcgggaccgtatccgagcaggacagcaggttgttcagcgatcactcgagcggtcgagccctcgcgccgcggagagtgtctccagtctcaagtacagcggaggatggagagcggcttgcttgacaccgccgcggctgccggtctctgcccggtggcggccgggcgccgccgcgtcgggagcacgggcacggcgaggtgcttcctcagctgctcctgcgcttccagagactgcagggtgagcgcgtcctactcccactccatcagccggatgctgagcggggtgcggtcggcggcgcgcaagaggctcttcaggagcgacccggccgagctgctgggcgtcgccaactggtcggagacgggcggcggcggcgccgggggccaccagcactggtggacggcgctggagaacaacttcgtgctggaggccaccgacgacgagtacggcggggtcgtcgtcgacgccgatcggctgccggccgacagggccgccttcgcgcgctccctcgcggcgtcgctctcctactggaagtccgtggggaagaaaggggtgtggttgaaattaccggtggatctagccgagttcgtccctttagcagtgaaggaaggcttcaagtaccaccacgcggaggaagcgtatttgatgatgacgtactggatccccgatgaaccgaatatgctcccagcaaatgcttctcatcaggttggggttgggggttttgtgatcaacgaccaaatggaggttctagtggtgcaagagaagtaccgcggatcgtcgctggatggcgtatggaaactccccacaggcttcattcttgcgtctgaggaaatctacacgggggccagcagagaggtgaaggaggaaaccggggtcgacaccgagttcgttgacgtcgttgctttcaggcatgcccacaacgtggcgtttcacaagtccgacctcttcttcatctgcatgctgaggcctgtgtcgagtgagatcaagattgacgagacagagattcaggcagcgaagtggatggcgctggaggagttcgtgaagcagcccttcatccaggaagaccacatcttccagaagatcatggacatctgcatccagcgcctccgcaagtgctactgtgggctgacgccgcaccacgtcgtctccaagttcgacgacagaacgtccacgctctactacaatgtcgccgagcccgaggacgtgaactgcagcgccgcctgatgtaatatgatgtgagggggagggggagccaccccagcatctactagtctaatttttgctgcgcagaagtttcatgatgcagcagtgttagtcgtgcgattactgagagtgaaatactagtggcagactgcgcgaggcaatagagttgccgagcctgtacatatacgtgtagggcatatgcataaccagagagctgtatatcccggggcggatccccgggcaggaggaaaattttcattgccgccgtaaattacaatttaactttagctcgccct

SEQ ID NO: 31387 - protein, 371 aa, Zea mays subsp. mays
  peptide (1)..(371): Ceres Seq. ID no. 12361457
  misc_feature (198)..(329): Pfam Name: Pfam Description:  NUDIX domain
  misc_feature (1)..(371): NCBI GI NO: 38346172 NR Description: OSJNBa0079A21.19
  misc_feature (98)..(369): NCBI GI NO: 21928133 NR Description: AT5g47240/MQL5_10 [Arabidopsis thaliana]
  misc_feature (98)..(369): NCBI GI NO: 8809607 NR Description: mutT domain protein-like [Arabidopsis thaliana]
  misc_feature (98)..(369): NCBI GI NO: 18422772 NR Description: mutT domain protein-like; protein id: At5g47240
  misc_feature (98)..(369): NCBI GI NO: 21593371 NR Description: mutT domain protein-like [Arabidopsis thaliana]
  misc_feature (105)..(362): NCBI GI NO: 18422823 NR Description: MutT domain protein-like; protein id: At5g47650
  misc_feature (105)..(362): NCBI GI NO: 9758793 NR Description: MutT domain protein-like [Arabidopsis thaliana]
  misc_feature (105)..(362): NCBI GI NO: 38564312 NR Description: At4g25434 [Arabidopsis thaliana]
  misc_feature (105)..(256): NCBI GI NO: 30686884 NR Description: MutT/nudix family protein [Arabidopsis thaliana]
  misc_feature (256)..(362): NCBI GI NO: 30686884 NR Description: MutT/nudix family protein [Arabidopsis thaliana]
MESGLLDTAAAAGLCPVAAGRRRVGSTGTARCFLSCSCASRDCRVSASYSHSISRMLSGVRSAARKRLFRSDPAELLGVANWSETGGGGAGGHQHWWTALENNFVLEATDDEYGGVVVDADRLPADRAAFARSLAASLSYWKSVGKKGVWLKLPVDLAEFVPLAVKEGFKYHHAEEAYLMMTYWIPDEPNMLPANASHQVGVGGFVINDQMEVLVVQEKYRGSSLDGVWKLPTGFILASEEIYTGASREVKEETGVDTEFVDVVAFRHAHNVAFHKSDLFFICMLRPVSSEIKIDETEIQAAKWMALEEFVKQPFIQEDHIFQKIMDICIQRLRKCYCGLTPHHVVSKFDDRTSTLYYNVAEPEDVNCSAA

SEQ ID NO: 31388 - protein, 316 aa, Zea mays subsp. mays
  peptide (1)..(316): Ceres Seq. ID no. 12361458
  misc_feature (143)..(274): Pfam Name: Pfam Description:  NUDIX domain
  misc_feature (1)..(316): NCBI GI NO: 38346172 NR Description: OSJNBa0079A21.19
  misc_feature (43)..(314): NCBI GI NO: 21928133 NR Description: AT5g47240/MQL5_10 [Arabidopsis thaliana]
  misc_feature (43)..(314): NCBI GI NO: 8809607 NR Description: mutT domain protein-like [Arabidopsis thaliana]
  misc_feature (43)..(314): NCBI GI NO: 21593371 NR Description: mutT domain protein-like [Arabidopsis thaliana]
  misc_feature (43)..(314): NCBI GI NO: 18422772 NR Description: mutT domain protein-like; protein id: At5g47240
  misc_feature (50)..(307): NCBI GI NO: 18422823 NR Description: MutT domain protein-like; protein id: At5g47650
  misc_feature (50)..(307): NCBI GI NO: 9758793 NR Description: MutT domain protein-like [Arabidopsis thaliana]
  misc_feature (50)..(307): NCBI GI NO: 38564312 NR Description: At4g25434 [Arabidopsis thaliana]
  misc_feature (50)..(201): NCBI GI NO: 30686884 NR Description: MutT/nudix family protein [Arabidopsis thaliana]
  misc_feature (201)..(307): NCBI GI NO: 30686884 NR Description: MutT/nudix family protein [Arabidopsis thaliana]
MLSGVRSAARKRLFRSDPAELLGVANWSETGGGGAGGHQHWWTALENNFVLEATDDEYGGVVVDADRLPADRAAFARSLAASLSYWKSVGKKGVWLKLPVDLAEFVPLAVKEGFKYHHAEEAYLMMTYWIPDEPNMLPANASHQVGVGGFVINDQMEVLVVQEKYRGSSLDGVWKLPTGFILASEEIYTGASREVKEETGVDTEFVDVVAFRHAHNVAFHKSDLFFICMLRPVSSEIKIDETEIQAAKWMALEEFVKQPFIQEDHIFQKIMDICIQRLRKCYCGLTPHHVVSKFDDRTSTLYYNVAEPEDVNCSAA

SEQ ID NO: 31389 - protein, 192 aa, Zea mays subsp. mays
  peptide (1)..(192): Ceres Seq. ID no. 12361459
  misc_feature (19)..(150): Pfam Name: Pfam Description:  NUDIX domain
  misc_feature (1)..(192): NCBI GI NO: 38346172 NR Description: OSJNBa0079A21.19
  misc_feature (1)..(190): NCBI GI NO: 21928133 NR Description: AT5g47240/MQL5_10 [Arabidopsis thaliana]
  misc_feature (1)..(190): NCBI GI NO: 8809607 NR Description: mutT domain protein-like [Arabidopsis thaliana]
  misc_feature (1)..(190): NCBI GI NO: 21593371 NR Description: mutT domain protein-like [Arabidopsis thaliana]
  misc_feature (1)..(190): NCBI GI NO: 18422772 NR Description: mutT domain protein-like; protein id: At5g47240
  misc_feature (1)..(183): NCBI GI NO: 18422823 NR Description: MutT domain protein-like; protein id: At5g47650
  misc_feature (1)..(183): NCBI GI NO: 9758793 NR Description: MutT domain protein-like [Arabidopsis thaliana]
  misc_feature (1)..(183): NCBI GI NO: 38564312 NR Description: At4g25434 [Arabidopsis thaliana]
  misc_feature (1)..(77): NCBI GI NO: 30686884 NR Description: MutT/nudix family protein [Arabidopsis thaliana]
  misc_feature (77)..(183): NCBI GI NO: 30686884 NR Description: MutT/nudix family protein [Arabidopsis thaliana]
MMTYWIPDEPNMLPANASHQVGVGGFVINDQMEVLVVQEKYRGSSLDGVWKLPTGFILASEEIYTGASREVKEETGVDTEFVDVVAFRHAHNVAFHKSDLFFICMLRPVSSEIKIDETEIQAAKWMALEEFVKQPFIQEDHIFQKIMDICIQRLRKCYCGLTPHHVVSKFDDRTSTLYYNVAEPEDVNCSAA

SEQ ID NO: 31390 - DNA, 1159 bp, Zea mays subsp. mays
  misc_feature (1)..(1159): Ceres Seq. ID no. 12365990
atattggtagctcatcatcgatccagcagcacacagacgagccgacacaagcagttagctatagctgctagcctgatcgccaatggccaccgccggcagcaagcaaggaggaggctcgtccaagccgcctgcggctggtcaggagttggacccgaggtacgagtgggaggagaacgccagcagcttcatcctccgcatccacctctcaggcttcaggaaacaagatttcagggtgcaagtcgacggcgccggccgcctcaccgtccgtggccagcgctccgacgccgccgccaacgccaggcactcccgcttcaacaaggtcttccagctgccctccacctccaacctcgacgacatcgccggccgcttcgaccttggagtcctcacgctcaccgtgcccaagcgcctgcccgcgcccgcaaaggaagaccagcagcaggccaagaagcccgaggatgccgctgccgctgccgccaccaagcaggtggcgggagccaagggcgccaaatcggagccggagcagcagcacaaggaggaggcggcggcaaaggaagataagcccaagacgaccgccgcagcacctgcaccggcagccgacacgacggcaaaggaagataagcccaaggccgccgccgcagcacctgcaccggcagccgacacgaagaagcagcccgagacgcaggccaacgcagagagcaaggcgacggatccgaccgaaagcctggcggagcggcgcaccgaggaagagcgggccaatgcaaatgctgcagctgcggcggagcaccagagaaaggcatgccgtggcttcaaggagcgcgtggcggaggagctccaggggctggcgggctccgagtgggcggagggccttgtggagacgatcaagaggaacagggaggtggtcgccgtcgccgtcgccgccttctccctcggcgtcttcgtctccagcaggctcttctccaggtccagcaggaactagaagccaaccatgcatgcatctctcttttgtgacaatcgtaatagcgcttgtcaccaccacaaactacgtatactgacacatacagtccatgatgtggatatatacatgcactgcacagacacaagtgaattgtaaacatgtttataaatgtatcagaaacaagtttatacatgtaacagtgtc

SEQ ID NO: 31391 - protein, 297 aa, Zea mays subsp. mays
  peptide (1)..(297): Ceres Seq. ID no. 12365991
  misc_feature (116)..(203): Pfam Name: Pfam Description:  MARCKS family
  misc_feature (76)..(295): NCBI GI NO: 34912188 NR Description: P0700A11.20
  misc_feature (21)..(254): NCBI GI NO: 34912188 NR Description: P0700A11.20
  misc_feature (6)..(172): NCBI GI NO: 34912180 NR Description: P0700A11.16
  misc_feature (20)..(253): NCBI GI NO: 18483234 NR Description: small heat shock-like protein [Sorghum bicolor]
  misc_feature (35)..(154): NCBI GI NO: 21397266 NR Description: Putative small heat shock protein
  misc_feature (20)..(223): NCBI GI NO: 18414724 NR Description: expressed protein; protein id: At5g04890
  misc_feature (28)..(171): NCBI GI NO: 34912184 NR Description: P0700A11.18
MATAGSKQGGGSSKPPAAGQELDPRYEWEENASSFILRIHLSGFRKQDFRVQVDGAGRLTVRGQRSDAAANARHSRFNKVFQLPSTSNLDDIAGRFDLGVLTLTVPKRLPAPAKEDQQQAKKPEDAAAAAATKQVAGAKGAKSEPEQQHKEEAAAKEDKPKTTAAAPAPAADTTAKEDKPKAAAAAPAPAADTKKQPETQANAESKATDPTESLAERRTEEERANANAAAAAEHQRKACRGFKERVAEELQGLAGSEWAEGLVETIKRNREVVAVAVAAFSLGVFVSSRLFSRSSRN

SEQ ID NO: 31392 - protein, 198 aa, Zea mays subsp. mays
  peptide (1)..(198): Ceres Seq. ID no. 12365992
  misc_feature (1)..(67): Pfam Name: Pfam Description:  Extensin-like region
  misc_feature (1)..(177): NCBI GI NO: 34872074 NR Description: similar to Ser/Arg-related nuclear matrix protein
  misc_feature (1)..(163): NCBI GI NO: 15219287 NR Description: arginine/serine-rich protein, putative
  misc_feature (1)..(177): NCBI GI NO: 5032119 NR Description: Ser/Arg-related nuclear matrix protein
  misc_feature (1)..(177): NCBI GI NO: 23274133 NR Description: Similar to serine/arginine repetitive matrix 1
  misc_feature (1)..(176): NCBI GI NO: 11360318 NR Description: probable mucin DKFZp434C196.1 - human (fragment)
  misc_feature (1)..(99): NCBI GI NO: 25989119 NR Description: unknown [Streptomyces aureofaciens]
  misc_feature (1)..(175): NCBI GI NO: 25143299 NR Description: pre-mRNA splicing SR protein related RSR-1 (68
  misc_feature (1)..(182): NCBI GI NO: 7949115 NR Description: Ser/Arg-related nuclear matrix protein
  misc_feature (1)..(175): NCBI GI NO: 7949115 NR Description: Ser/Arg-related nuclear matrix protein
  misc_feature (1)..(133): NCBI GI NO: 25143299 NR Description: pre-mRNA splicing SR protein related RSR-1 (68
MPLPLPPPSRWREPRAPNRSRSSSTRRRRRQRKISPRRPPQHLHRQPTRRQRKISPRPPPQHLHRQPTRRSSPRRRPTQRARRRIRPKAWRSGAPRKSGPMQMLQLRRSTRERHAVASRSAWRRSSRGWRAPSGRRALWRRSRGTGRWSPSPSPPSPSASSSPAGSSPGPAGTRSQPCMHLSFVTIVIALVTTTNYVY

SEQ ID NO: 31393 - protein, 185 aa, Zea mays subsp. mays
  peptide (1)..(185): Ceres Seq. ID no. 12365993
ILVAHHRSSSTQTSRHKQLAIAASLIANGHRRQQARRRLVQAACGWSGVGPEVRVGGERQQLHPPHPPLRLQETRFQGASRRRRPPHRPWPALRRRRQRQALPLQQGLPAALHLQPRRHRRPLRPWSPHAHRAQAPARARKGRPAAGQEARGCRCRCRHQAGGGSQGRQIGAGAAAQGGGGGKGR

SEQ ID NO: 31394 - DNA, 1302 bp, Zea mays subsp. mays
  misc_feature (1)..(1302): Ceres Seq. ID no. 12349766
gtgggcgtggacacgttgactttttcaactgtctgcccctgatgtccgttggctcccgacggaggccgccgccgccgcatcaccaccgtcgcgccatgacacctgcctcctccgtctccgtccccgcgccggttcccgcgccccctaagcctctctacctccggggcccggtcatcgcaggcgccgtcgcgctggccgcgtttctcctcctcgccgccgcctacgccaccaggcgagcagggtccccgccggccgccctcctctcccacccagctgtttccaccaggttcttctccttcgacctggtgcgcgagtaccctcacgacccggccgccttcacccagggtatcttgtacgcgggaaatgacacgcttttcgagtccactggcctctacggcaggtcttcagttcgaaaggttgagcttcagaccggaaaagttttggttaaccaccaaatggacggagatgtgtttggagaaggtttaactcttcttggtgacagattgtttcaggttacctggttgaagaacgacgggtttatatatgaccggcataacttctccaaatgcacgagttttacccataaaatgcgagatggttggggtctggcgactgatggaaaagttctttttggcagtgatggcacctcaatgctgtataagctggattcaaagtcacttgaagtcatgaaagtggtgactgtcaagtatcacggtaatcaagtcccctatcttaatgagctggaatatatagatggtgaagtctgggcaaatgtctggcagacagattgcatagctagagtgtcccctgaagatggcctagtggtgtgttggatctttcttcatgagctgaggcggcagttgtggaactcaggcaacacgaatattgacgtcttaaacgggatagcttgggatgaaagaaggcacagattatttgtgacagggaaactgtggccaaagctatatgagatcaagctacgggcagtagatggtccagcagatggatctgtagaaaagctttgtccaaaagccagcttctatcgctgaagagtgtagaaccgcatatacactgggtgtgctaacatgggccttcatttgtttaaacgcacgatgcgaaggatgtggagatgtgagtacgtacatgtttgatctggtaccactgtcatatatatatacacccatgagttagtagatgtagctgtacattgttgtgacctgtatgaattttgatgatggctgtgttgtttgtgttaagagtgaattgcaacagattttgatgcattcaatgcaacttaatagcttg

SEQ ID NO: 31395 - protein, 347 aa, Zea mays subsp. mays
  peptide (1)..(347): Ceres Seq. ID no. 12349767
  misc_feature (54)..(333): Pfam Name: Pfam Description:  Glutamine cyclotransferase
  misc_feature (32)..(347): NCBI GI NO: 24413973 NR Description: putative glutaminyl-peptide cyclotransferase
  misc_feature (92)..(340): NCBI GI NO: 18416607 NR Description: glutamine cyclotransferase precursor - likeprotein
  misc_feature (92)..(340): NCBI GI NO: 21536884 NR Description: glutamine cyclotransferase precursor-like protein
  misc_feature (93)..(340): NCBI GI NO: 7484740 NR Description: glutaminyl-peptide cyclotransferase (EC 2
  misc_feature (92)..(340): NCBI GI NO: 7484984 NR Description: glutaminyl-peptide cyclotransferase homologL73G19
  misc_feature (83)..(334): NCBI GI NO: 21231655 NR Description: glutamine cyclotransferase
  misc_feature (87)..(325): NCBI GI NO: 21243055 NR Description: glutamine cyclotransferase
  misc_feature (65)..(325): NCBI GI NO: 31790364 NR Description: putative glutamine cyclotransferase
  misc_feature (39)..(325): NCBI GI NO: 22970826 NR Description: hypothetical protein [Chloroflexus aurantiacus]
  misc_feature (97)..(324): NCBI GI NO: 16124007 NR Description: putative exported protein [Yersinia pestis]
GRGHVDFFNCLPLMSVGSRRRPPPPHHHRRAMTPASSVSVPAPVPAPPKPLYLRGPVIAGAVALAAFLLLAAAYATRRAGSPPAALLSHPAVSTRFFSFDLVREYPHDPAAFTQGILYAGNDTLFESTGLYGRSSVRKVELQTGKVLVNHQMDGDVFGEGLTLLGDRLFQVTWLKNDGFIYDRHNFSKCTSFTHKMRDGWGLATDGKVLFGSDGTSMLYKLDSKSLEVMKVVTVKYHGNQVPYLNELEYIDGEVWANVWQTDCIARVSPEDGLVVCWIFLHELRRQLWNSGNTNIDVLNGIAWDERRHRLFVTGKLWPKLYEIKLRAVDGPADGSVEKLCPKASFYR

SEQ ID NO: 31396 - protein, 334 aa, Zea mays subsp. mays
  peptide (1)..(334): Ceres Seq. ID no. 12349768
  misc_feature (41)..(320): Pfam Name: Pfam Description:  Glutamine cyclotransferase
  misc_feature (19)..(334): NCBI GI NO: 24413973 NR Description: putative glutaminyl-peptide cyclotransferase
  misc_feature (79)..(327): NCBI GI NO: 18416607 NR Description: glutamine cyclotransferase precursor - likeprotein
  misc_feature (79)..(327): NCBI GI NO: 21536884 NR Description: glutamine cyclotransferase precursor-like protein
  misc_feature (80)..(327): NCBI GI NO: 7484740 NR Description: glutaminyl-peptide cyclotransferase (EC 2
  misc_feature (79)..(327): NCBI GI NO: 7484984 NR Description: glutaminyl-peptide cyclotransferase homologL73G19
  misc_feature (70)..(321): NCBI GI NO: 21231655 NR Description: glutamine cyclotransferase
  misc_feature (74)..(312): NCBI GI NO: 21243055 NR Description: glutamine cyclotransferase
  misc_feature (52)..(312): NCBI GI NO: 31790364 NR Description: putative glutamine cyclotransferase
  misc_feature (26)..(312): NCBI GI NO: 22970826 NR Description: hypothetical protein [Chloroflexus aurantiacus]
  misc_feature (84)..(311): NCBI GI NO: 16124007 NR Description: putative exported protein [Yersinia pestis]
MSVGSRRRPPPPHHHRRAMTPASSVSVPAPVPAPPKPLYLRGPVIAGAVALAAFLLLAAAYATRRAGSPPAALLSHPAVSTRFFSFDLVREYPHDPAAFTQGILYAGNDTLFESTGLYGRSSVRKVELQTGKVLVNHQMDGDVFGEGLTLLGDRLFQVTWLKNDGFIYDRHNFSKCTSFTHKMRDGWGLATDGKVLFGSDGTSMLYKLDSKSLEVMKVVTVKYHGNQVPYLNELEYIDGEVWANVWQTDCIARVSPEDGLVVCWIFLHELRRQLWNSGNTNIDVLNGIAWDERRHRLFVTGKLWPKLYEIKLRAVDGPADGSVEKLCPKASFYR

SEQ ID NO: 31397 - protein, 316 aa, Zea mays subsp. mays
  peptide (1)..(316): Ceres Seq. ID no. 12349769
  misc_feature (23)..(302): Pfam Name: Pfam Description:  Glutamine cyclotransferase
  misc_feature (1)..(316): NCBI GI NO: 24413973 NR Description: putative glutaminyl-peptide cyclotransferase
  misc_feature (61)..(309): NCBI GI NO: 18416607 NR Description: glutamine cyclotransferase precursor - likeprotein
  misc_feature (61)..(309): NCBI GI NO: 21536884 NR Description: glutamine cyclotransferase precursor-like protein
  misc_feature (62)..(309): NCBI GI NO: 7484740 NR Description: glutaminyl-peptide cyclotransferase (EC 2
  misc_feature (61)..(309): NCBI GI NO: 7484984 NR Description: glutaminyl-peptide cyclotransferase homologL73G19
  misc_feature (52)..(303): NCBI GI NO: 21231655 NR Description: glutamine cyclotransferase
  misc_feature (56)..(294): NCBI GI NO: 21243055 NR Description: glutamine cyclotransferase
  misc_feature (34)..(294): NCBI GI NO: 31790364 NR Description: putative glutamine cyclotransferase
  misc_feature (8)..(294): NCBI GI NO: 22970826 NR Description: hypothetical protein [Chloroflexus aurantiacus]
  misc_feature (66)..(293): NCBI GI NO: 16124007 NR Description: putative exported protein [Yersinia pestis]
MTPASSVSVPAPVPAPPKPLYLRGPVIAGAVALAAFLLLAAAYATRRAGSPPAALLSHPAVSTRFFSFDLVREYPHDPAAFTQGILYAGNDTLFESTGLYGRSSVRKVELQTGKVLVNHQMDGDVFGEGLTLLGDRLFQVTWLKNDGFIYDRHNFSKCTSFTHKMRDGWGLATDGKVLFGSDGTSMLYKLDSKSLEVMKVVTVKYHGNQVPYLNELEYIDGEVWANVWQTDCIARVSPEDGLVVCWIFLHELRRQLWNSGNTNIDVLNGIAWDERRHRLFVTGKLWPKLYEIKLRAVDGPADGSVEKLCPKASFYR

SEQ ID NO: 31398 - DNA, 1519 bp, Zea mays subsp. mays
  misc_feature (1)..(1519): Ceres Seq. ID no. 12354390
agacgtgaatccaagcgtgcaagcaagcggcggtaatggcggcggctctgcaagccacgccgctcaaaaccctatccatctcccgccggcgcgtcggcggcgcgggggcgcggccgcgtccgatggcggcgagcttccgatgctccgcggcggcgaggagctacaatatcacgctcctccccggagacggcatcggccctgaggtggtcgccgtcgccaaggacgtgctgtccctcgccggcgccctcgaaggcgtcgagctccggttccaggagaagcttgtgggtggctcggccctggacgccaccggcgtgccgctccccgacgagacactcgacgcggccaagggttccgacgccgtcctcctcggcgccattggaggctataagtgggataacaatgagaagcacctcaagcctgagaccgggctgctgcagctccgtgccggacttggggtctttgccaatctgcgaccagctgcagtattgccgcagttggtagatgcatccactctgaagaaagaggtagctgaaggtgttgacatcatggttgtcagagagcttactggaggcatctacttcggcaaacccaggggttttggaacaaatgacaatggagatgacattgggttcaacacagaagtttatccagcttctgagattgatcgtatcgcacgagtcgcatttgaggttgctcgcaagagaagagggagactatgctcggttgacaaagcaaatgtcttggaggcatctatgctttggaggaaaagggtgactgcactagcttcggaattccctgatattgagctctcacacatgtatgttgataatgctgcgatgcagcttgttaggaatcctaagcagtttgacacaattgtcacaaacaatatttttggtgacatattatctgatgaagcatcaatgattacgggaagtattggaatgctcccatctgccagtgttggtgaatcgggacctggtctttttgaacctattcatggctctgcccctgatattgctggacaggacaaggccaatccattggctacaattcttagtgcagcgatgctattgagatatggcctaggagaagaaaatgctgcgaacagaattgaagctgcagttactgaaacactgaaccatgggttccgaactggggacatatattctcctggaacaacattggttggatgcaagcggatgggggaagaagtcctgaagacagtgaactcactgaaggaagtggctgctgtaaactgatgcatgttggtacttaatttataaccctacaggatgagatggttgaaagggacttgcattttattagaagttgagcctggtgaaagagagcactgcgtctggttttgaatcgcaactgtagcggctgaaccgacggtcttttttcatttctggtgtttgttggccttcctgtaactcaattttgtacaaggaaggataagcatatgtatgataaaatgggatagtttatgccagttgaataaaatatgttctataacttc

SEQ ID NO: 31399 - protein, 407 aa, Zea mays subsp. mays
  peptide (1)..(407): Ceres Seq. ID no. 12354391
  misc_feature (45)..(393): Pfam Name: Pfam Description:  Isocitrate/isopropylmalate dehydrogenase
  misc_feature (1)..(399): NCBI GI NO: 126201 NR Description: 3-isopropylmalate dehydrogenase
  misc_feature (1)..(399): NCBI GI NO: 15220167 NR Description: putative 3-isopropylmalate dehydrogenase
  misc_feature (1)..(399): NCBI GI NO: 17064730 NR Description: putative 3-isopropylmalate dehydrogenase
  misc_feature (1)..(399): NCBI GI NO: 21553584 NR Description: putative 3-isopropylmalate dehydrogenase
  misc_feature (35)..(399): NCBI GI NO: 15221631 NR Description: 3-methyladenine DNA glycosylase, putative
  misc_feature (35)..(399): NCBI GI NO: 21592944 NR Description: 3-methyladenine DNA glycosylase, putative
  misc_feature (35)..(399): NCBI GI NO: 21759267 NR Description: 3-isopropylmalate dehydrogenase 1
  misc_feature (35)..(399): NCBI GI NO: 15241338 NR Description: 3-isopropylmalate dehydrogenase
  misc_feature (35)..(399): NCBI GI NO: 18377879 NR Description: AT5g14200/MUA22_20 [Arabidopsis thaliana]
  misc_feature (84)..(399): NCBI GI NO: 26451517 NR Description: putative 3-isopropylmalate dehydrogenase
MAAALQATPLKTLSISRRRVGGAGARPRPMAASFRCSAAARSYNITLLPGDGIGPEVVAVAKDVLSLAGALEGVELRFQEKLVGGSALDATGVPLPDETLDAAKGSDAVLLGAIGGYKWDNNEKHLKPETGLLQLRAGLGVFANLRPAAVLPQLVDASTLKKEVAEGVDIMVVRELTGGIYFGKPRGFGTNDNGDDIGFNTEVYPASEIDRIARVAFEVARKRRGRLCSVDKANVLEASMLWRKRVTALASEFPDIELSHMYVDNAAMQLVRNPKQFDTIVTNNIFGDILSDEASMITGSIGMLPSASVGESGPGLFEPIHGSAPDIAGQDKANPLATILSAAMLLRYGLGEENAANRIEAAVTETLNHGFRTGDIYSPGTTLVGCKRMGEEVLKTVNSLKEVAAVN

SEQ ID NO: 31400 - protein, 378 aa, Zea mays subsp. mays
  peptide (1)..(378): Ceres Seq. ID no. 12354392
  misc_feature (16)..(364): Pfam Name: Pfam Description:  Isocitrate/isopropylmalate dehydrogenase
  misc_feature (1)..(370): NCBI GI NO: 126201 NR Description: 3-isopropylmalate dehydrogenase
  misc_feature (1)..(370): NCBI GI NO: 15220167 NR Description: putative 3-isopropylmalate dehydrogenase
  misc_feature (1)..(370): NCBI GI NO: 17064730 NR Description: putative 3-isopropylmalate dehydrogenase
  misc_feature (1)..(370): NCBI GI NO: 21553584 NR Description: putative 3-isopropylmalate dehydrogenase
  misc_feature (6)..(370): NCBI GI NO: 15221631 NR Description: 3-methyladenine DNA glycosylase, putative
  misc_feature (6)..(370): NCBI GI NO: 21592944 NR Description: 3-methyladenine DNA glycosylase, putative
  misc_feature (6)..(370): NCBI GI NO: 21759267 NR Description: 3-isopropylmalate dehydrogenase 1
  misc_feature (6)..(370): NCBI GI NO: 15241338 NR Description: 3-isopropylmalate dehydrogenase
  misc_feature (6)..(370): NCBI GI NO: 18377879 NR Description: AT5g14200/MUA22_20 [Arabidopsis thaliana]
  misc_feature (55)..(370): NCBI GI NO: 26451517 NR Description: putative 3-isopropylmalate dehydrogenase
MAASFRCSAAARSYNITLLPGDGIGPEVVAVAKDVLSLAGALEGVELRFQEKLVGGSALDATGVPLPDETLDAAKGSDAVLLGAIGGYKWDNNEKHLKPETGLLQLRAGLGVFANLRPAAVLPQLVDASTLKKEVAEGVDIMVVRELTGGIYFGKPRGFGTNDNGDDIGFNTEVYPASEIDRIARVAFEVARKRRGRLCSVDKANVLEASMLWRKRVTALASEFPDIELSHMYVDNAAMQLVRNPKQFDTIVTNNIFGDILSDEASMITGSIGMLPSASVGESGPGLFEPIHGSAPDIAGQDKANPLATILSAAMLLRYGLGEENAANRIEAAVTETLNHGFRTGDIYSPGTTLVGCKRMGEEVLKTVNSLKEVAAVN

SEQ ID NO: 31401 - protein, 237 aa, Zea mays subsp. mays
  peptide (1)..(237): Ceres Seq. ID no. 12354393
  misc_feature (1)..(223): Pfam Name: Pfam Description:  Isocitrate/isopropylmalate dehydrogenase
  misc_feature (1)..(229): NCBI GI NO: 126201 NR Description: 3-isopropylmalate dehydrogenase
  misc_feature (1)..(229): NCBI GI NO: 15220167 NR Description: putative 3-isopropylmalate dehydrogenase
  misc_feature (1)..(229): NCBI GI NO: 17064730 NR Description: putative 3-isopropylmalate dehydrogenase
  misc_feature (1)..(229): NCBI GI NO: 21553584 NR Description: putative 3-isopropylmalate dehydrogenase
  misc_feature (1)..(229): NCBI GI NO: 15221631 NR Description: 3-methyladenine DNA glycosylase, putative
  misc_feature (1)..(229): NCBI GI NO: 21592944 NR Description: 3-methyladenine DNA glycosylase, putative
  misc_feature (1)..(229): NCBI GI NO: 21759267 NR Description: 3-isopropylmalate dehydrogenase 1
  misc_feature (1)..(229): NCBI GI NO: 15241338 NR Description: 3-isopropylmalate dehydrogenase
  misc_feature (1)..(229): NCBI GI NO: 18377879 NR Description: AT5g14200/MUA22_20 [Arabidopsis thaliana]
  misc_feature (1)..(229): NCBI GI NO: 26451517 NR Description: putative 3-isopropylmalate dehydrogenase
MVVRELTGGIYFGKPRGFGTNDNGDDIGFNTEVYPASEIDRIARVAFEVARKRRGRLCSVDKANVLEASMLWRKRVTALASEFPDIELSHMYVDNAAMQLVRNPKQFDTIVTNNIFGDILSDEASMITGSIGMLPSASVGESGPGLFEPIHGSAPDIAGQDKANPLATILSAAMLLRYGLGEENAANRIEAAVTETLNHGFRTGDIYSPGTTLVGCKRMGEEVLKTVNSLKEVAAVN

SEQ ID NO: 31402 - DNA, 1470 bp, Zea mays subsp. mays
  misc_feature (1)..(1470): Ceres Seq. ID no. 12365924
gcttggtacgtgcccacacacgtaccaaataaacgtacactgaccgacgtcgtcgtttcacgttgcaagattgcatcttgccgatcatcgcaacgtcggctagctctgtgacaatggcgaagagcagacgggagatctcgtttggtttggccgtcgtcctgtccctaacggccgccgcactcgtgcgaaccggacacggcgccgacgccgccttcgcgagggcgagcgggacacgtttcacgatcggtgggcggccgttctactcgaacggcttcaacgcgtactggctcatgtacatggcgtcggacccggccgaccggagcaaggcgacggccgcgctggacgaggcggcccgcctcggcggccacgctcgtgcggacgtgggcgttcagcgacggcggctaccgcgcgctgcaggtgtcgcccggggtgtacgacgaggaggtgttcaggggtctagactatgtgatatccgaagcaaagaagcgcgggatccatttaatcctgagcctggtgaacaactgggacgggtacggcgggaagaagcagtacgtgcagtgggcaagaacccaggggcacagcctgaattctgatgacgacttcttcacggacagcgtgaccaaagggttctacaagaaccatgtcaaggcagtcctcacgagagtgaacaagatgacgggagtggcgtacaaggacgagcctgccatcttcgcgtgggagctcatgaacgagcctcgctgccagaggcgacctctccgggaagacgctgcaggcctggattacggagatggccggctacgtcaagtccgtggatcccaaccacatggtagagatcgggctcgagggcttctacggcgagtccacgcccgaccgcaagcgccagttcaacccgggagggtacaccgtcggcaccgacttcatctccaacaacctgatccccggcgtcgacttcgccacgatccactcctaccccgaccaatgggtgcccggcgcgagcgacggcgcgcaggtggcgttcatgcggcggtggatggcgtcgcacgccggcgacgccgcggcggtgctgcggaagccgctgctggtggcggagttcggctggtccgcgcgctccaacagctacacggtgtccatgcgggacgcctacttccgcatggtgtacgaggcgatctacgcgtcggcgagagcgggagggccgctcgcggggggcctcttctggcaggtcatggtgcccgggatggagagctggaccgacggctacgacgtcgtgctcgaccgtagcccatccacggctgccgtcgtcggccaggagtgctcccggatgaccggactcaactaggtgtcctagctagtagccagtagcggtggactgattcgtgctggttcaaatgttcaaggcagccacggagagccggagacatgaccaatggatgtgctctaataatttaaagtaataacaaaaaaaatatcttt

SEQ ID NO: 31403 - protein, 201 aa, Zea mays subsp. mays
  peptide (1)..(201): Ceres Seq. ID no. 12365925
  misc_feature (1)..(24): NCBI GI NO: 10178872 NR Description: (1-4)-beta-mannan endohydrolase [Coffea arabica]
  misc_feature (1)..(24): NCBI GI NO: 34912090 NR Description: putative mannan endo-1,4-beta-mannosidase
  misc_feature (1)..(24): NCBI GI NO: 29786430 NR Description: endo-beta-1,4-mannanase [Lactuca sativa]
  misc_feature (1)..(24): NCBI GI NO: 10129675 NR Description: (1-4)-beta-mannan endohydrolase [Coffea arabica]
  misc_feature (1)..(27): NCBI GI NO: 15239973 NR Description: glycosyl hydrolase family 5/cellulase
  misc_feature (1)..(24): NCBI GI NO: 37544517 NR Description: mannan endo-1,4-beta-mannosidase precursor
  misc_feature (1)..(23): NCBI GI NO: 15529113 NR Description: endo-beta-mannanase [Lycopersicon esculentum]
  misc_feature (1)..(23): NCBI GI NO: 21307619 NR Description: mannan endo-1,4-beta-mannosidase
  misc_feature (1)..(23): NCBI GI NO: 22382040 NR Description: inactive endo-beta-mannanase
  misc_feature (1)..(24): NCBI GI NO: 9836826 NR Description: (1-4)-beta-mannan endohydrolase precursor
MTGVAYKDEPAIFAWELMNEPRCQRRPLREDAAGLDYGDGRLRQVRGSQPHGRDRARGLLRRVHARPQAPVQPGRVHRRHRLHLQQPDPRRRLRHDPLLPRPMGARRERRRAGGVHAAVDGVARRRRRGGAAEAAAGGGVRLVRALQQLHGVHAGRLLPHGVRGDLRVGESGRAARGGPLLAGHGARDGELDRRLRRRARP

SEQ ID NO: 31404 - protein, 184 aa, Zea mays subsp. mays
  peptide (1)..(184): Ceres Seq. ID no. 12365926
  misc_feature (1)..(34): NCBI GI NO: 3834388 NR Description: beta-1,4-mannanase
  misc_feature (1)..(18): NCBI GI NO: 23028336 NR Description: hypothetical protein
MNEPRCQRRPLREDAAGLDYGDGRLRQVRGSQPHGRDRARGLLRRVHARPQAPVQPGRVHRRHRLHLQQPDPRRRLRHDPLLPRPMGARRERRRAGGVHAAVDGVARRRRRGGAAEAAAGGGVRLVRALQQLHGVHAGRLLPHGVRGDLRVGESGRAARGGPLLAGHGARDGELDRRLRRRARP

SEQ ID NO: 31405 - protein, 182 aa, Zea mays subsp. mays
  peptide (1)..(182): Ceres Seq. ID no. 12365927
  misc_feature (1)..(139): Pfam Name: glycosyl hydrolase family 5 Pfam Description: Cellulase
  misc_feature (1)..(181): NCBI GI NO: 10178872 NR Description: (1-4)-beta-mannan endohydrolase [Coffea arabica]
  misc_feature (1)..(182): NCBI GI NO: 34912090 NR Description: putative mannan endo-1,4-beta-mannosidase
  misc_feature (1)..(182): NCBI GI NO: 29786430 NR Description: endo-beta-1,4-mannanase [Lactuca sativa]
  misc_feature (1)..(182): NCBI GI NO: 10129675 NR Description: (1-4)-beta-mannan endohydrolase [Coffea arabica]
  misc_feature (1)..(179): NCBI GI NO: 15239973 NR Description: glycosyl hydrolase family 5/cellulase
  misc_feature (1)..(181): NCBI GI NO: 37544517 NR Description: mannan endo-1,4-beta-mannosidase precursor
  misc_feature (1)..(182): NCBI GI NO: 15529113 NR Description: endo-beta-mannanase [Lycopersicon esculentum]
  misc_feature (1)..(171): NCBI GI NO: 21307619 NR Description: mannan endo-1,4-beta-mannosidase
  misc_feature (1)..(171): NCBI GI NO: 22382040 NR Description: inactive endo-beta-mannanase
  misc_feature (1)..(181): NCBI GI NO: 9836826 NR Description: (1-4)-beta-mannan endohydrolase precursor
MAGYVKSVDPNHMVEIGLEGFYGESTPDRKRQFNPGGYTVGTDFISNNLIPGVDFATIHSYPDQWVPGASDGAQVAFMRRWMASHAGDAAAVLRKPLLVAEFGWSARSNSYTVSMRDAYFRMVYEAIYASARAGGPLAGGLFWQVMVPGMESWTDGYDVVLDRSPSTAAVVGQECSRMTGLN

SEQ ID NO: 31406 - DNA, 1954 bp, Zea mays subsp. mays
  misc_feature (1)..(1954): Ceres Seq. ID no. 12366011
cccaatcccaagatgaatgctacgtaggtagacagtgttcttgtggtgacgtgacctccacagagtgcagagatgggagaagctgaagaagcgccaggagacagcaatggtgaggcactggagctcctcatgtccatggcgtcctcttcgctggcctgctctgtctcgcagttcccagccaagtggcagtccatcaaggacaagctccagctgctctgctgcagcctcaattcactctgcggcggcggcggtgaccacgacgacgacgacgacaaggagcatcctgtgttggctgagcttctgcggctggcttcagcaaccgtgaggagcatccaggtcgttgcttctcagtgcagcgacgggtcatacaagggtggaaggcttcgtctgaggagcgacctggacaacctgagctgcaagctcgatgcgcacatgaagcagctcaaggagatggccgtctcgtccggggcgccgtcgccgtccaaggccattgtcgccgtcaggcccagcgccgaggccagcgtgggtgagaaggccttctacctcaaggatctcttttccaggatcaggatcggcggcaccgtccagaggagccaggcactggccgccatcagggagctgttggtggaagacgagctctgtgcgaaggttgtcgccctcgacgtcgacgacggcgtcgccctgctcacggggttcctcgagtccaccgacgcgcgcatccaagaagaggctgccggcgccgtcgccgtcgtcgcgagctccgagcgttacaggggaatgctggtgaaggcaggggtgatcgccccgctcgtccagctgctggagaacgcggacaccgccagcgagctgggcaagcagagggcggcgcacgcgctgagggagctgacggagaactccgacaacgtgtgggccgtctgcgcgcacggcggcctcaccacgctgctgcacgcctgcgcccacgccggcagcagcagcaagctcgtcagctcctcttttgcagtgctgaggaacctcagtcggatggaggaagtgaagatgttcatggtggagcaaggggtggtcacggagctggtgaagctctcccagaagaaggaggaggtccgcaagctcggcgccgtcgaattgctccacgccatggctctggatgacgccgacgtcagggaggaagccgtcggcatgggggtgatccagtccctcctccagttgatataccccgaccttccctactcgtacaaggccagggaggttgctcttgctgccatctggttcttctgcttctcttctgcaaactccttggatgacctcatcagctcggatgttcttggctggctgctcttctacctgaacaacggcgactacgccgtcctcgaatgtacgctcaagattctgaggcatctctccgaggtttctgaggagtacaaccggatgatgggcagagcagggtatttgagcgccctgtcaggcttgcttggagcgaaatcctgtcgagtccgggaaatggcggcgcaggttctttccagcttgctgatgcttcaccccaaccgtgccatcttcatccaagacggcgacaatctgaacaggctgctgcagctccttgatccagccgagggcaagttgatggcgaaggacttgatcctctctgctatcatgtccctggctgagaccaacagcggaaggaagaagattgtgacgtcggaaaatttctgcagcctgaaagaactggcagaatctggtgacttcgacgccaagaagatcgtcaggaaactatctactaacagactgcaaaccatcttcagcaaaatatggagtgtctagattattcctgactcccctttttcactgaggcttagctctagtctatttgatgtccatagtattttttctctggctttgcttgtaatctcggcgcatccatcattttgattcctttgtgatatatattgcaacttcggtt

SEQ ID NO: 31407 - protein, 580 aa, Zea mays subsp. mays
  peptide (1)..(580): Ceres Seq. ID no. 12366012
  misc_feature (1)..(580): NCBI GI NO: 34394021 NR Description: arm repeat containing protein-like
  misc_feature (1)..(578): NCBI GI NO: 18407140 NR Description: expressed protein; protein id: At1g61350
  misc_feature (1)..(578): NCBI GI NO: 16209658 NR Description: At1g61350/T1F9_16 [Arabidopsis thaliana]
  misc_feature (1)..(578): NCBI GI NO: 15224987 NR Description: hypothetical protein; protein id: At2g05810
  misc_feature (87)..(576): NCBI GI NO: 37536190 NR Description: putative arm repeat containing protein
  misc_feature (75)..(576): NCBI GI NO: 15241309 NR Description: putative protein; protein id: At5g50900
  misc_feature (75)..(576): NCBI GI NO: 14532770 NR Description: unknown protein [Arabidopsis thaliana]
  misc_feature (147)..(576): NCBI GI NO: 18378889 NR Description: expressed protein; protein id: At1g01830
  misc_feature (147)..(576): NCBI GI NO: 25518344 NR Description: hypothetical protein T1N6.25
  misc_feature (144)..(576): NCBI GI NO: 15225552 NR Description: unknown protein; protein id: At2g45720.1
MGEAEEAPGDSNGEALELLMSMASSSLACSVSQFPAKWQSIKDKLQLLCCSLNSLCGGGGDHDDDDDKEHPVLAELLRLASATVRSIQVVASQCSDGSYKGGRLRLRSDLDNLSCKLDAHMKQLKEMAVSSGAPSPSKAIVAVRPSAEASVGEKAFYLKDLFSRIRIGGTVQRSQALAAIRELLVEDELCAKVVALDVDDGVALLTGFLESTDARIQEEAAGAVAVVASSERYRGMLVKAGVIAPLVQLLENADTASELGKQRAAHALRELTENSDNVWAVCAHGGLTTLLHACAHAGSSSKLVSSSFAVLRNLSRMEEVKMFMVEQGVVTELVKLSQKKEEVRKLGAVELLHAMALDDADVREEAVGMGVIQSLLQLIYPDLPYSYKAREVALAAIWFFCFSSANSLDDLISSDVLGWLLFYLNNGDYAVLECTLKILRHLSEVSEEYNRMMGRAGYLSALSGLLGAKSCRVREMAAQVLSSLLMLHPNRAIFIQDGDNLNRLLQLLDPAEGKLMAKDLILSAIMSLAETNSGRKKIVTSENFCSLKELAESGDFDAKKIVRKLSTNRLQTIFSKIWSV

SEQ ID NO: 31408 - protein, 561 aa, Zea mays subsp. mays
  peptide (1)..(561): Ceres Seq. ID no. 12366013
  misc_feature (1)..(561): NCBI GI NO: 34394021 NR Description: arm repeat containing protein-like
  misc_feature (1)..(559): NCBI GI NO: 18407140 NR Description: expressed protein; protein id: At1g61350
  misc_feature (1)..(559): NCBI GI NO: 16209658 NR Description: At1g61350/T1F9_16 [Arabidopsis thaliana]
  misc_feature (1)..(559): NCBI GI NO: 15224987 NR Description: hypothetical protein; protein id: At2g05810
  misc_feature (68)..(557): NCBI GI NO: 37536190 NR Description: putative arm repeat containing protein
  misc_feature (56)..(557): NCBI GI NO: 15241309 NR Description: putative protein; protein id: At5g50900
  misc_feature (56)..(557): NCBI GI NO: 14532770 NR Description: unknown protein [Arabidopsis thaliana]
  misc_feature (128)..(557): NCBI GI NO: 18378889 NR Description: expressed protein; protein id: At1g01830
  misc_feature (128)..(557): NCBI GI NO: 25518344 NR Description: hypothetical protein T1N6.25
  misc_feature (125)..(557): NCBI GI NO: 15225552 NR Description: unknown protein; protein id: At2g45720.1
MSMASSSLACSVSQFPAKWQSIKDKLQLLCCSLNSLCGGGGDHDDDDDKEHPVLAELLRLASATVRSIQVVASQCSDGSYKGGRLRLRSDLDNLSCKLDAHMKQLKEMAVSSGAPSPSKAIVAVRPSAEASVGEKAFYLKDLFSRIRIGGTVQRSQALAAIRELLVEDELCAKVVALDVDDGVALLTGFLESTDARIQEEAAGAVAVVASSERYRGMLVKAGVIAPLVQLLENADTASELGKQRAAHALRELTENSDNVWAVCAHGGLTTLLHACAHAGSSSKLVSSSFAVLRNLSRMEEVKMFMVEQGVVTELVKLSQKKEEVRKLGAVELLHAMALDDADVREEAVGMGVIQSLLQLIYPDLPYSYKAREVALAAIWFFCFSSANSLDDLISSDVLGWLLFYLNNGDYAVLECTLKILRHLSEVSEEYNRMMGRAGYLSALSGLLGAKSCRVREMAAQVLSSLLMLHPNRAIFIQDGDNLNRLLQLLDPAEGKLMAKDLILSAIMSLAETNSGRKKIVTSENFCSLKELAESGDFDAKKIVRKLSTNRLQTIFSKIWSV

SEQ ID NO: 31409 - protein, 559 aa, Zea mays subsp. mays
  peptide (1)..(559): Ceres Seq. ID no. 12366014
  misc_feature (1)..(559): NCBI GI NO: 34394021 NR Description: arm repeat containing protein-like
  misc_feature (1)..(557): NCBI GI NO: 18407140 NR Description: expressed protein; protein id: At1g61350
  misc_feature (1)..(557): NCBI GI NO: 16209658 NR Description: At1g61350/T1F9_16 [Arabidopsis thaliana]
  misc_feature (1)..(557): NCBI GI NO: 15224987 NR Description: hypothetical protein; protein id: At2g05810
  misc_feature (66)..(555): NCBI GI NO: 37536190 NR Description: putative arm repeat containing protein
  misc_feature (54)..(555): NCBI GI NO: 15241309 NR Description: putative protein; protein id: At5g50900
  misc_feature (54)..(555): NCBI GI NO: 14532770 NR Description: unknown protein [Arabidopsis thaliana]
  misc_feature (126)..(555): NCBI GI NO: 18378889 NR Description: expressed protein; protein id: At1g01830
  misc_feature (126)..(555): NCBI GI NO: 25518344 NR Description: hypothetical protein T1N6.25
  misc_feature (123)..(555): NCBI GI NO: 15225552 NR Description: unknown protein; protein id: At2g45720.1
MASSSLACSVSQFPAKWQSIKDKLQLLCCSLNSLCGGGGDHDDDDDKEHPVLAELLRLASATVRSIQVVASQCSDGSYKGGRLRLRSDLDNLSCKLDAHMKQLKEMAVSSGAPSPSKAIVAVRPSAEASVGEKAFYLKDLFSRIRIGGTVQRSQALAAIRELLVEDELCAKVVALDVDDGVALLTGFLESTDARIQEEAAGAVAVVASSERYRGMLVKAGVIAPLVQLLENADTASELGKQRAAHALRELTENSDNVWAVCAHGGLTTLLHACAHAGSSSKLVSSSFAVLRNLSRMEEVKMFMVEQGVVTELVKLSQKKEEVRKLGAVELLHAMALDDADVREEAVGMGVIQSLLQLIYPDLPYSYKAREVALAAIWFFCFSSANSLDDLISSDVLGWLLFYLNNGDYAVLECTLKILRHLSEVSEEYNRMMGRAGYLSALSGLLGAKSCRVREMAAQVLSSLLMLHPNRAIFIQDGDNLNRLLQLLDPAEGKLMAKDLILSAIMSLAETNSGRKKIVTSENFCSLKELAESGDFDAKKIVRKLSTNRLQTIFSKIWSV

SEQ ID NO: 31410 - DNA, 2131 bp, Zea mays subsp. mays
  misc_feature (1)..(2131): Ceres Seq. ID no. 12367699
ataacacaacaatctctctcccctcactccctctctgcagcgcgcagctttcaaagcgttgggagagatggcagaggagacgcaaccagaggccgcagccgccgccgcgcccgccgcggccgaggtagtcgtgaccgaagctgcgccggcggaggcggaggtgcctgcggcggcggaagctgaagccgaggccaaggatgagaagaaaggtgacgaggcggagctcaccgccgatgacgcgggggtggggaccggctcgttcaaggaggaaagcaacctggtggaagacctgcccgacccggagaagaaggcgctcgacgagttcaagcagctgatcgctgctgccctcgccgccggtgagttcaacctgcctcccccgccgccgccgccgaaggccaaggaaacaaaggtggaggaagccaaggccgaggagcccgccaaagaagagcccgcggccgaggcggaggaagccaaggcccaggtggctgcggatgccccggttgaggaggtcaagacggaggtgccgccggccgaggaggccaaggctgagacactggctgaggaagccaagccttccgagcccgagccgcaggagaagaccgtcgtggtcactgaggaggagactgccaccaagacggtggaagcaatcgaggaaaccgtcgtgtccgcccccgccgccatcccggaggaagcagcggcgccggaggcggtggtcgaggctcaggcgaccgcgcctgaacccgtgctgatttggggcgtgccgctgggtcggcgacgacgagcgcacggacacggttctgctcaagttcctgcgtgcgcgggagttcaaggtgaaggaggccatggcgatgctcaagtccgcggtgctgtggcgcaagcgcttcggcatcacctcgctcctcgacgccgaccttggcctgacggagctggagaacgtggtgttctaccgcggcacggaccgcgaaggccaccccgtgtgctacaacgtctacggcgagttccaggacaaggatctctacgagaaggccttcggcgacgatgagaagagggagcgcttcctcaagtggcgcatccagctgctggagcgcggcattctgtcgaagctggacttctcgcccagcggcatctgctccatggttcaggttaccgacctcaagaactcgccgcccatgctcggcaagcaccgcgccgtcacccgccaggctgtcacgctgctccaggacaactaccccgagttcattgccaagaaggtgttcatcaatgtgccgtggtggtatctagccgccaacaagatgatgagcccgttcctcacacagcgcaccaagagcaagttcgtctttgctagcccagccaaatcagcagcgactctattcagatacatcgcaccggaacaagttcctgtccaatttggaggcctcttcaaggaggatgatcctgagttcaccacctctgacactgtctccgagctcactatcaaaccatcctcaaaagaaaccgttgagatccctgtcaccgagaactccacaattgtatgggaactccgggtgctgagttgggaagtgagctatggcgccgagttcacccccgacgcggagggtgggtacaccgtcattgtacagaagacaaggaaggtgcctgctaacgaggaaccgatcatgaagggaagcttcaaggcaggcgagcctggaaaacttgtgctaactgtgaacaaccctgcatccaagaagaagactctactttacagatcgaaggtgaagagcgccagcgagtgagtgtgaggtcacgccgctagctgcctgggccctacagttaaaacgatctacagcatgatagaagagagaaggaaccttttggtttggttcgttaatttactgggatttgctgggttttttattttttgggttcgcattctacattttgtttggttgaaaccaaagtgagcttgtttttgtgacagtagatgggagaagtataatggcattgtgtgatggatggttgttgatgagggcagggaggacgaaaatgaggggaaggaaaggctggagaatgtctgttcctctgtagatgtgtgttctgtacattgcatctcttggattctcattgatatgttaaaatttaggagtacttggtc

SEQ ID NO: 31411 - protein, 324 aa, Zea mays subsp. mays
  peptide (1)..(324): Ceres Seq. ID no. 12367700
  misc_feature (165)..(233): Pfam Name: Pfam Description:  CRAL/TRIO, N-terminus
  misc_feature (1)..(223): NCBI GI NO: 34907288 NR Description: contains ESTsAU093915
  misc_feature (1)..(233): NCBI GI NO: 34907288 NR Description: contains ESTsAU093915
  misc_feature (1)..(82): NCBI GI NO: 34907288 NR Description: contains ESTsAU093915
  misc_feature (105)..(233): NCBI GI NO: 8894548 NR Description: hypothetical protein [Cicer arietinum]
  misc_feature (3)..(239): NCBI GI NO: 15218382 NR Description: cytosolic factor, putative; protein id:At1g72150
  misc_feature (1)..(102): NCBI GI NO: 15218383 NR Description: cytosolic factor, putative; protein id:At1g72160
  misc_feature (1)..(90): NCBI GI NO: 30680992 NR Description: expressed protein [Arabidopsis thaliana]
  misc_feature (63)..(102): NCBI GI NO: 15081614 NR Description: At1g72160/T9N14_8 [Arabidopsis thaliana]
  misc_feature (1)..(90): NCBI GI NO: 25407487 NR Description: hypothetical protein AT4g09160
  misc_feature (5)..(226): NCBI GI NO: 15219901 NR Description: unknown protein; protein id: At1g22530.1
MAEETQPEAAAAAAPAAAEVVVTEAAPAEAEVPAAAEAEAEAKDEKKGDEAELTADDAGVGTGSFKEESNLVEDLPDPEKKALDEFKQLIAAALAAGEFNLPPPPPPPKAKETKVEEAKAEEPAKEEPAAEAEEAKAQVAADAPVEEVKTEVPPAEEAKAETLAEEAKPSEPEPQEKTVVVTEEETATKTVEAIEETVVSAPAAIPEEAAAPEAVVEAQATAPEPVLIWGVPLGRRRRAHGHGSAQVPACAGVQGEGGHGDAQVRGAVAQALRHHLAPRRRPWPDGAGERGVLPRHGPRRPPRVLQRLRRVPGQGSLREGLRRR

SEQ ID NO: 31412 - protein, 309 aa, Zea mays subsp. mays
  peptide (1)..(309): Ceres Seq. ID no. 12367701
  misc_feature (34)..(204): Pfam Name: Pfam Description:  CRAL/TRIO domain
  misc_feature (1)..(309): NCBI GI NO: 34907288 NR Description: contains ESTsAU093915
  misc_feature (1)..(309): NCBI GI NO: 8894548 NR Description: hypothetical protein [Cicer arietinum]
  misc_feature (1)..(305): NCBI GI NO: 15218382 NR Description: cytosolic factor, putative; protein id:At1g72150
  misc_feature (1)..(305): NCBI GI NO: 15218383 NR Description: cytosolic factor, putative; protein id:At1g72160
  misc_feature (1)..(305): NCBI GI NO: 30680992 NR Description: expressed protein [Arabidopsis thaliana]
  misc_feature (1)..(305): NCBI GI NO: 15081614 NR Description: At1g72160/T9N14_8 [Arabidopsis thaliana]
  misc_feature (1)..(225): NCBI GI NO: 25407487 NR Description: hypothetical protein AT4g09160
  misc_feature (225)..(305): NCBI GI NO: 25407487 NR Description: hypothetical protein AT4g09160
  misc_feature (1)..(306): NCBI GI NO: 15219901 NR Description: unknown protein; protein id: At1g22530.1
  misc_feature (1)..(308): NCBI GI NO: 18397616 NR Description: expressed protein; protein id: At1g30690
MAMLKSAVLWRKRFGITSLLDADLGLTELENVVFYRGTDREGHPVCYNVYGEFQDKDLYEKAFGDDEKRERFLKWRIQLLERGILSKLDFSPSGICSMVQVTDLKNSPPMLGKHRAVTRQAVTLLQDNYPEFIAKKVFINVPWWYLAANKMMSPFLTQRTKSKFVFASPAKSAATLFRYIAPEQVPVQFGGLFKEDDPEFTTSDTVSELTIKPSSKETVEIPVTENSTIVWELRVLSWEVSYGAEFTPDAEGGYTVIVQKTRKVPANEEPIMKGSFKAGEPGKLVLTVNNPASKKKTLLYRSKVKSASE

SEQ ID NO: 31413 - protein, 307 aa, Zea mays subsp. mays
  peptide (1)..(307): Ceres Seq. ID no. 12367702
  misc_feature (32)..(202): Pfam Name: Pfam Description:  CRAL/TRIO domain
  misc_feature (1)..(307): NCBI GI NO: 34907288 NR Description: contains ESTsAU093915
  misc_feature (1)..(307): NCBI GI NO: 8894548 NR Description: hypothetical protein [Cicer arietinum]
  misc_feature (1)..(303): NCBI GI NO: 15218382 NR Description: cytosolic factor, putative; protein id:At1g72150
  misc_feature (1)..(303): NCBI GI NO: 15218383 NR Description: cytosolic factor, putative; protein id:At1g72160
  misc_feature (1)..(303): NCBI GI NO: 30680992 NR Description: expressed protein [Arabidopsis thaliana]
  misc_feature (1)..(303): NCBI GI NO: 15081614 NR Description: At1g72160/T9N14_8 [Arabidopsis thaliana]
  misc_feature (1)..(223): NCBI GI NO: 25407487 NR Description: hypothetical protein AT4g09160
  misc_feature (223)..(303): NCBI GI NO: 25407487 NR Description: hypothetical protein AT4g09160
  misc_feature (1)..(304): NCBI GI NO: 15219901 NR Description: unknown protein; protein id: At1g22530.1
  misc_feature (1)..(306): NCBI GI NO: 18397616 NR Description: expressed protein; protein id: At1g30690
MLKSAVLWRKRFGITSLLDADLGLTELENVVFYRGTDREGHPVCYNVYGEFQDKDLYEKAFGDDEKRERFLKWRIQLLERGILSKLDFSPSGICSMVQVTDLKNSPPMLGKHRAVTRQAVTLLQDNYPEFIAKKVFINVPWWYLAANKMMSPFLTQRTKSKFVFASPAKSAATLFRYIAPEQVPVQFGGLFKEDDPEFTTSDTVSELTIKPSSKETVEIPVTENSTIVWELRVLSWEVSYGAEFTPDAEGGYTVIVQKTRKVPANEEPIMKGSFKAGEPGKLVLTVNNPASKKKTLLYRSKVKSASE

SEQ ID NO: 31414 - DNA, 1295 bp, Zea mays subsp. mays
  misc_feature (1)..(1295): Ceres Seq. ID no. 12354202
aggaaatgactcgtcaacgcaactaccccaagtcgccgctgagccactctctccgtccgcgaatccgtaaatggaaggggacgaaatgctcagggttaagctcggcaggcagggccttgaggtgtccaagcttggcttcgggtgcatgggcctcactggagtgtacaacgcccctgttcctgaccaagctgggatcgacataatcaagcacgcgtttgaggccggcatcaccttcttcgacaccgctgatgcctatgggccacacaccaacgaggtcctgctcggaaaggcattgaaacattttcctcgtgagaaggtgcaaattgccaccaaatgtggcattgcaggatttgatgcaagtggcatgcgtgtgaagggcactccagattatgttcgagcttgttgtgaagcaagccttcagcgccttgctactgactacattgatatatactaccaacatcgcattgatcagtcagtgcctatagaggaaactatgggagagctcaagaagttggttgaagaagggaaagtgaggtatgttggcttatcagaggctagtgccgataccattcgacgggcacatgctgtccatccaattactgcggtgcagttggagtggtcactatggaccagagatatagaggaagatataattccagtctgcagggagcttggtattggaatagttccatatagcccacttggccgtggcttctttgctggcagggcagctgtagaacgtgttccatcagaaagtctattgtctaaacatccaagatattctggggaaaacttggagaagaataaagttctgtatacacgacttgaaatgttgtccaagaagtatgggtgcacacctgctcaactcgctctctcctgggttcttcatcaaggagaagatgtggtccccatccctggaacaacaaaagccaagaaccttgacgaaaatatcggtgctgtaaaggtaaggctgagcaaggaagacctcgaagaaatctcaggcgcattccctgctggtgaggtggctgggtctagactccttggagtcttggagcctttttcctggaggctcgcaaataccccgcctccaaaatagcgagttcagatgcaaattcttggccatcctaccatttaggtcatgttatgttagatcatatctacatgatgcaaatgattgttcctgtgctcgcgcgtgaaaatgcatgtacctgaaacaaagagatgtaacagttggttctctgtgtggaacgtgctgattgctatagttgatcaaagaaatacgttggaattaagtt

SEQ ID NO: 31415 - protein, 341 aa, Zea mays subsp. mays
  peptide (1)..(341): Ceres Seq. ID no. 12354203
  misc_feature (1)..(341): NCBI GI NO: 37534402 NR Description: putative polyprotein
  misc_feature (2)..(339): NCBI GI NO: 15219786 NR Description: auxin-induced protein, putative
  misc_feature (8)..(339): NCBI GI NO: 18406861 NR Description: auxin-induced protein, putative
  misc_feature (8)..(339): NCBI GI NO: 38344997 NR Description: OSJNBa0008A08.11
  misc_feature (8)..(339): NCBI GI NO: 6562980 NR Description: auxin-induced atb2 [Arabidopsis thaliana]
  misc_feature (8)..(339): NCBI GI NO: 30696459 NR Description: aldo/keto reductase family [Arabidopsis thaliana]
  misc_feature (8)..(339): NCBI GI NO: 25316216 NR Description: hypothetical protein F8A5.24
  misc_feature (2)..(339): NCBI GI NO: 30102704 NR Description: At1g60680 [Arabidopsis thaliana]
  misc_feature (8)..(309): NCBI GI NO: 7447933 NR Description: auxin-induced protein - common sunflower
  misc_feature (2)..(339): NCBI GI NO: 30696451 NR Description: aldo/keto reductase family [Arabidopsis thaliana]
MEGDEMLRVKLGRQGLEVSKLGFGCMGLTGVYNAPVPDQAGIDIIKHAFEAGITFFDTADAYGPHTNEVLLGKALKHFPREKVQIATKCGIAGFDASGMRVKGTPDYVRACCEASLQRLATDYIDIYYQHRIDQSVPIEETMGELKKLVEEGKVRYVGLSEASADTIRRAHAVHPITAVQLEWSLWTRDIEEDIIPVCRELGIGIVPYSPLGRGFFAGRAAVERVPSESLLSKHPRYSGENLEKNKVLYTRLEMLSKKYGCTPAQLALSWVLHQGEDVVPIPGTTKAKNLDENIGAVKVRLSKEDLEEISGAFPAGEVAGSRLLGVLEPFSWRLANTPPPK

SEQ ID NO: 31416 - protein, 336 aa, Zea mays subsp. mays
  peptide (1)..(336): Ceres Seq. ID no. 12354204
  misc_feature (1)..(336): NCBI GI NO: 37534402 NR Description: putative polyprotein
  misc_feature (1)..(334): NCBI GI NO: 15219786 NR Description: auxin-induced protein, putative
  misc_feature (3)..(334): NCBI GI NO: 18406861 NR Description: auxin-induced protein, putative
  misc_feature (3)..(334): NCBI GI NO: 38344997 NR Description: OSJNBa0008A08.11
  misc_feature (3)..(334): NCBI GI NO: 6562980 NR Description: auxin-induced atb2 [Arabidopsis thaliana]
  misc_feature (3)..(334): NCBI GI NO: 30696459 NR Description: aldo/keto reductase family [Arabidopsis thaliana]
  misc_feature (3)..(334): NCBI GI NO: 25316216 NR Description: hypothetical protein F8A5.24
  misc_feature (1)..(334): NCBI GI NO: 30102704 NR Description: At1g60680 [Arabidopsis thaliana]
  misc_feature (3)..(304): NCBI GI NO: 7447933 NR Description: auxin-induced protein - common sunflower
  misc_feature (1)..(334): NCBI GI NO: 30696451 NR Description: aldo/keto reductase family [Arabidopsis thaliana]
MLRVKLGRQGLEVSKLGFGCMGLTGVYNAPVPDQAGIDIIKHAFEAGITFFDTADAYGPHTNEVLLGKALKHFPREKVQIATKCGIAGFDASGMRVKGTPDYVRACCEASLQRLATDYIDIYYQHRIDQSVPIEETMGELKKLVEEGKVRYVGLSEASADTIRRAHAVHPITAVQLEWSLWTRDIEEDIIPVCRELGIGIVPYSPLGRGFFAGRAAVERVPSESLLSKHPRYSGENLEKNKVLYTRLEMLSKKYGCTPAQLALSWVLHQGEDVVPIPGTTKAKNLDENIGAVKVRLSKEDLEEISGAFPAGEVAGSRLLGVLEPFSWRLANTPPPK

SEQ ID NO: 31417 - protein, 316 aa, Zea mays subsp. mays
  peptide (1)..(316): Ceres Seq. ID no. 12354205
  misc_feature (1)..(316): NCBI GI NO: 37534402 NR Description: putative polyprotein
  misc_feature (1)..(314): NCBI GI NO: 15219786 NR Description: auxin-induced protein, putative
  misc_feature (1)..(314): NCBI GI NO: 18406861 NR Description: auxin-induced protein, putative
  misc_feature (1)..(314): NCBI GI NO: 38344997 NR Description: OSJNBa0008A08.11
  misc_feature (1)..(314): NCBI GI NO: 6562980 NR Description: auxin-induced atb2 [Arabidopsis thaliana]
  misc_feature (1)..(314): NCBI GI NO: 30696459 NR Description: aldo/keto reductase family [Arabidopsis thaliana]
  misc_feature (1)..(314): NCBI GI NO: 25316216 NR Description: hypothetical protein F8A5.24
  misc_feature (1)..(314): NCBI GI NO: 30102704 NR Description: At1g60680 [Arabidopsis thaliana]
  misc_feature (1)..(284): NCBI GI NO: 7447933 NR Description: auxin-induced protein - common sunflower
  misc_feature (1)..(314): NCBI GI NO: 30696451 NR Description: aldo/keto reductase family [Arabidopsis thaliana]
MGLTGVYNAPVPDQAGIDIIKHAFEAGITFFDTADAYGPHTNEVLLGKALKHFPREKVQIATKCGIAGFDASGMRVKGTPDYVRACCEASLQRLATDYIDIYYQHRIDQSVPIEETMGELKKLVEEGKVRYVGLSEASADTIRRAHAVHPITAVQLEWSLWTRDIEEDIIPVCRELGIGIVPYSPLGRGFFAGRAAVERVPSESLLSKHPRYSGENLEKNKVLYTRLEMLSKKYGCTPAQLALSWVLHQGEDVVPIPGTTKAKNLDENIGAVKVRLSKEDLEEISGAFPAGEVAGSRLLGVLEPFSWRLANTPPPK

SEQ ID NO: 31418 - DNA, 1346 bp, Zea mays subsp. mays
  misc_feature (1)..(1346): Ceres Seq. ID no. 12369832
cgtctttgtatccatttgtttggttcttacttcttagttgtgtgccatagagattctaccatccccacgtccagctccccgcctcttccctgctgcatctgcacttgcacgccgctcacacatgctatttttgttcacttgttcttgcttcttgctgtggttgttaaactgacttggtcctgataatcctccgcgttctaatgatgtgctgtcgctgcaccatgcgcgtgttgtcgtcagagcctagggctggtgaagcccatggaggagatgctgatggcggccagcgcgggcgctgcaaatccgagccaaggctcgaatccgaacccgccgccgccggcggcgcccctgacgggcgcgggtagcaccgagcggcgcgcgcggccgcagaaggagaaggcgctcaactgcccgcggtgcaactccaccaacaccaaattctgctactacaacaactacagcctccagcagccacgctacttctgcaagacgtgccgccgctactggacggagggcggatccctccgcagcgtccccgtgggcggcggctcccgcaagaacaagcgctcctcgtcgtcatcgtcgtcggcggcggcggcgtccgcttccacctcctcctcggccacgagctcgtccatggccagcacactgggggcggcgtccaagagtccggagctggcgcacgacctcaacctagcgttcccgcaccatggtggccagcacgccgccgagttcccggcgttcccgagcctgcagagcagcaacgacatgtgcgaccccggtggcgggatgacgagcaacggccggggcggcggcgcggggcccgcggtcggcgcgctctcggcaacggagctctggcggagctccggctgctacatgccgctgcagatgccaggagattacacggcagcagggttcgcgctcggggagttccgcacgccgctgctgcctgacgcgcacgggccggggtcgtccggtgctgccgcagcggcggggtacggttgcagcgcggggctgccgcagggcgtgccggacaacgcgggcaggttattgttccctttcgaggacttgaagccgccggttagccctggaggtggtggtgtggccggaggtggtgcaagtgcaaccggtggcgccggcgacggaaatagcagccacgatcagtttgaccacaacaaggagcaaggcggaggcggcagccccggtgccggtgccgggcacgacacggcggggttctggagcagggtttacaatttcggacggaaatttccgaaattttcttgatttgggtggtatccgaaaaatatatgtttttgaaattgacattttaatataaatttttgttt

SEQ ID NO: 31419 - protein, 340 aa, Zea mays subsp. mays
  peptide (1)..(340): Ceres Seq. ID no. 12369833
  misc_feature (43)..(105): Pfam Name: Pfam Description:  Dof domain, zinc finger
  misc_feature (1)..(333): NCBI GI NO: 4996640 NR Description: Dof zinc finger protein [Oryza sativa]
  misc_feature (4)..(333): NCBI GI NO: 38344272 NR Description: OSJNBa0005N02.10
  misc_feature (21)..(228): NCBI GI NO: 20372847 NR Description: dof zinc finger protein
  misc_feature (21)..(228): NCBI GI NO: 20372895 NR Description: dof zinc finger protein
  misc_feature (237)..(312): NCBI GI NO: 20372847 NR Description: dof zinc finger protein
  misc_feature (237)..(312): NCBI GI NO: 20372895 NR Description: dof zinc finger protein
  misc_feature (36)..(168): NCBI GI NO: 7489130 NR Description: finger protein Dof - common tobacco (fragment)
  misc_feature (1)..(325): NCBI GI NO: 29124139 NR Description: putative DNA-binding protein
  misc_feature (36)..(168): NCBI GI NO: 7489124 NR Description: finger protein BBF1.1 - common tobacco (fragment)
  misc_feature (1)..(151): NCBI GI NO: 7487175 NR Description: hypothetical protein T19F6
MEEMLMAASAGAANPSQGSNPNPPPPAAPLTGAGSTERRARPQKEKALNCPRCNSTNTKFCYYNNYSLQQPRYFCKTCRRYWTEGGSLRSVPVGGGSRKNKRSSSSSSSAAAASASTSSSATSSSMASTLGAASKSPELAHDLNLAFPHHGGQHAAEFPAFPSLQSSNDMCDPGGGMTSNGRGGGAGPAVGALSATELWRSSGCYMPLQMPGDYTAAGFALGEFRTPLLPDAHGPGSSGAAAAAGYGCSAGLPQGVPDNAGRLLFPFEDLKPPVSPGGGGVAGGGASATGGAGDGNSSHDQFDHNKEQGGGGSPGAGAGHDTAGFWSRVYNFGRKFPKFS

SEQ ID NO: 31420 - protein, 337 aa, Zea mays subsp. mays
  peptide (1)..(337): Ceres Seq. ID no. 12369834
  misc_feature (40)..(102): Pfam Name: Pfam Description:  Dof domain, zinc finger
  misc_feature (1)..(330): NCBI GI NO: 4996640 NR Description: Dof zinc finger protein [Oryza sativa]
  misc_feature (1)..(330): NCBI GI NO: 38344272 NR Description: OSJNBa0005N02.10
  misc_feature (18)..(225): NCBI GI NO: 20372847 NR Description: dof zinc finger protein
  misc_feature (18)..(225): NCBI GI NO: 20372895 NR Description: dof zinc finger protein
  misc_feature (234)..(309): NCBI GI NO: 20372847 NR Description: dof zinc finger protein
  misc_feature (234)..(309): NCBI GI NO: 20372895 NR Description: dof zinc finger protein
  misc_feature (33)..(165): NCBI GI NO: 7489130 NR Description: finger protein Dof - common tobacco (fragment)
  misc_feature (1)..(322): NCBI GI NO: 29124139 NR Description: putative DNA-binding protein
  misc_feature (33)..(165): NCBI GI NO: 7489124 NR Description: finger protein BBF1.1 - common tobacco (fragment)
  misc_feature (1)..(148): NCBI GI NO: 7487175 NR Description: hypothetical protein T19F6
MLMAASAGAANPSQGSNPNPPPPAAPLTGAGSTERRARPQKEKALNCPRCNSTNTKFCYYNNYSLQQPRYFCKTCRRYWTEGGSLRSVPVGGGSRKNKRSSSSSSSAAAASASTSSSATSSSMASTLGAASKSPELAHDLNLAFPHHGGQHAAEFPAFPSLQSSNDMCDPGGGMTSNGRGGGAGPAVGALSATELWRSSGCYMPLQMPGDYTAAGFALGEFRTPLLPDAHGPGSSGAAAAAGYGCSAGLPQGVPDNAGRLLFPFEDLKPPVSPGGGGVAGGGASATGGAGDGNSSHDQFDHNKEQGGGGSPGAGAGHDTAGFWSRVYNFGRKFPKFS

SEQ ID NO: 31421 - protein, 335 aa, Zea mays subsp. mays
  peptide (1)..(335): Ceres Seq. ID no. 12369835
  misc_feature (38)..(100): Pfam Name: Pfam Description:  Dof domain, zinc finger
  misc_feature (1)..(328): NCBI GI NO: 4996640 NR Description: Dof zinc finger protein [Oryza sativa]
  misc_feature (1)..(328): NCBI GI NO: 38344272 NR Description: OSJNBa0005N02.10
  misc_feature (16)..(223): NCBI GI NO: 20372847 NR Description: dof zinc finger protein
  misc_feature (16)..(223): NCBI GI NO: 20372895 NR Description: dof zinc finger protein
  misc_feature (232)..(307): NCBI GI NO: 20372847 NR Description: dof zinc finger protein
  misc_feature (232)..(307): NCBI GI NO: 20372895 NR Description: dof zinc finger protein
  misc_feature (31)..(163): NCBI GI NO: 7489130 NR Description: finger protein Dof - common tobacco (fragment)
  misc_feature (1)..(320): NCBI GI NO: 29124139 NR Description: putative DNA-binding protein
  misc_feature (31)..(163): NCBI GI NO: 7489124 NR Description: finger protein BBF1.1 - common tobacco (fragment)
  misc_feature (1)..(146): NCBI GI NO: 7487175 NR Description: hypothetical protein T19F6
MAASAGAANPSQGSNPNPPPPAAPLTGAGSTERRARPQKEKALNCPRCNSTNTKFCYYNNYSLQQPRYFCKTCRRYWTEGGSLRSVPVGGGSRKNKRSSSSSSSAAAASASTSSSATSSSMASTLGAASKSPELAHDLNLAFPHHGGQHAAEFPAFPSLQSSNDMCDPGGGMTSNGRGGGAGPAVGALSATELWRSSGCYMPLQMPGDYTAAGFALGEFRTPLLPDAHGPGSSGAAAAAGYGCSAGLPQGVPDNAGRLLFPFEDLKPPVSPGGGGVAGGGASATGGAGDGNSSHDQFDHNKEQGGGGSPGAGAGHDTAGFWSRVYNFGRKFPKFS

SEQ ID NO: 31422 - DNA, 1028 bp, Zea mays subsp. mays
  misc_feature (1)..(1028): Ceres Seq. ID no. 12349386
gcgtggtttgagtgtttgaccacggcagcaagagcagcccgctccgctcctcctcccctgccgaagcaccacacagcagaagcgaaaacggcaggaaggccaatcgggcctgccaggcatgcttgcccgctgccgcaggtgaggcgacccgcagccgtccgagacgcaccccggcgcaagcgcgcatccgccatggatccggcgtccgaggagctcgagcgccgcagccgctatctcaactcgctcatccgccgtactaagctcagcgccaccccggctccccctcctcagccggagccggagcacgaggtagcgccaccgaatccggagccggagccggagaccgcggttgggaagcgcgaggaggccaaggcggatccagtggtcgttgaggaggagaaccgggaggccaaagtggcgggggacgggaaggggaaagagatcaaggggaaggacgacgggggtcccaaggaggacaacagcaggaaggtgtcagtgcgggtgcgcgcggccgacatgcccttaccgctgcagcgccgcgcggtccggctcgcctacgaagccatcgccgccatgccgcgcctcgacagcaagcgcctcgccctcgcgctcaagaaggaatttgatacggcatatggtgccagcttggcattgcattgttggaacaagctttggttcctatgtcactcactctctgggcggtttcttgtacttctccgtcgacaaggcctatattctcctcttcagaaccgctgtcgagccattagcccatccgcgatgaggggccatgaaacagtctactagctagcgcattctgtattcgacatttaactgtagaagggtaaggagagtagaacgatcatcgcccccaccccccaatgcaaatatgtagaactaatctgctgtagctagttttttccatgtactgtgcactaatcggccatgtggaccttaccattagcttccagagttgtagcttgactcaactcagttcttccgcacgaggggaatttactttcgcatcttgt

SEQ ID NO: 31423 - protein, 267 aa, Zea mays subsp. mays
  peptide (1)..(267): Ceres Seq. ID no. 12349387
  misc_feature (165)..(220): Pfam Name: Pfam Description:  Dynein light chain type 1
  misc_feature (65)..(236): NCBI GI NO: 38567715 NR Description: B1358B12.13
  misc_feature (157)..(220): NCBI GI NO: 15220678 NR Description: dynein light subunit lc6, flagellar outer arm
  misc_feature (164)..(220): NCBI GI NO: 34913978 NR Description: dynein light chain - like protein
  misc_feature (168)..(213): NCBI GI NO: 34909728 NR Description: putative dynein light chain
  misc_feature (167)..(214): NCBI GI NO: 15233288 NR Description: putative dynein light chain protein
AWFECLTTAARAARSAPPPLPKHHTAEAKTAGRPIGPARHACPLPQVRRPAAVRDAPRRKRASAMDPASEELERRSRYLNSLIRRTKLSATPAPPPQPEPEHEVAPPNPEPEPETAVGKREEAKADPVVVEEENREAKVAGDGKGKEIKGKDDGGPKEDNSRKVSVRVRAADMPLPLQRRAVRLAYEAIAAMPRLDSKRLALALKKEFDTAYGASLALHCWNKLWFLCHSLSGRFLVLLRRQGLYSPLQNRCRAISPSAMRGHETVY

SEQ ID NO: 31424 - protein, 203 aa, Zea mays subsp. mays
  peptide (1)..(203): Ceres Seq. ID no. 12349388
  misc_feature (101)..(156): Pfam Name: Pfam Description:  Dynein light chain type 1
  misc_feature (1)..(172): NCBI GI NO: 38567715 NR Description: B1358B12.13
  misc_feature (93)..(156): NCBI GI NO: 15220678 NR Description: dynein light subunit lc6, flagellar outer arm
  misc_feature (100)..(156): NCBI GI NO: 34913978 NR Description: dynein light chain - like protein
  misc_feature (104)..(149): NCBI GI NO: 34909728 NR Description: putative dynein light chain
  misc_feature (103)..(150): NCBI GI NO: 15233288 NR Description: putative dynein light chain protein
MDPASEELERRSRYLNSLIRRTKLSATPAPPPQPEPEHEVAPPNPEPEPETAVGKREEAKADPVVVEEENREAKVAGDGKGKEIKGKDDGGPKEDNSRKVSVRVRAADMPLPLQRRAVRLAYEAIAAMPRLDSKRLALALKKEFDTAYGASLALHCWNKLWFLCHSLSGRFLVLLRRQGLYSPLQNRCRAISPSAMRGHETVY

SEQ ID NO: 31425 - DNA, 1389 bp, Zea mays subsp. mays
  misc_feature (1)..(1389): Ceres Seq. ID no. 12416088
gcacgagaccattacctagaacatcctaatcgaaaaatatacggcgaaagccctattcgtgcccgcggccgtggatagataggtcagtgacgattgagaaacccgtagtcggagcagaggaggggtagaagatggtgttcggtcaggtggtgatcggcccgccgggctccggcaagaccacctactgcaacggcatgtcgcagttcctctccctcctcggcaggaaggttgcgtttgtcaatttggaccctgcaaatgacgcattgccatatgagtgtgccataaacatcgaggacctcataaaactcagtgatgtcatgtctgagcattcgcttggccctaatggagggcttgtgtattgcatggattacttggagaagaatattgattggcttgaagaaaaactgaagccttttattgaagatcactatctgttatttgattttcctggtcaagtggaattgttcttccttcactcaaatgcaagaagtgttattaataaactcatcaaaaagatggacttgaggcttactgctgttcaccttattgatgcccatttatgctgtgatcctggaaagtatgtcagtgctttgcttctttcactatcaacgatgctacacttggaattgccacatatcaatgtcttgtcaaagattgacctcattgagaactatggaaatttagcattcaaccttgacttctacactgatgtccaagatctttcttatttgcaatatcatcttgagcaggatccccgctcagccaagtacaggaaactgactaaggagctctgtgatgtgattgatgattttggtttagtcaatttttcaactttggacatccaggacaaggaaagtgttggcaatcttgtgaagctgattgacaagagcaacggatatatattttcttctattgacagtagtgctgttgagttcagcaaaattgcagcggcgcctcttgattgggactactacagaacagcggaagtgcaggagaagtacatgaaagatgatgagttcgcgcaactgacaagcaggatgcaatgaggctggcggtgccgtcccgcacccccactttggtagcacaacgggtgaacggtgaaccacgacagtgtggcacgtcgaacttcggttgccagaacgatgtgaaacctgtctaaattcatgtagctcagttgtaggtgtttactgaagctaattgctatagttgcctgatcttctgggagtaccctttgggcagtaaaaaaatgcacttgtcacctgtgaccaaccggtcaggtcctgttttgtttgttcgcttcaacttcgaactgcatcagctacaatctttagagacaaaatattgtagtgtttggactactgcagttgtaatctttaaagacaacattgc

SEQ ID NO: 31426 - protein, 304 aa, Zea mays subsp. mays
  peptide (1)..(304): Ceres Seq. ID no. 12416089
  misc_feature (7)..(256): Pfam Name: Pfam Description:  Conserved hypothetical ATP binding protein
  misc_feature (1)..(282): NCBI GI NO: 15242226 NR Description: putative protein; protein id: At5g22370.1
  misc_feature (3)..(298): NCBI GI NO: 34871770 NR Description: similar to expressed sequence AI838661
  misc_feature (3)..(304): NCBI GI NO: 19527098 NR Description: expressed sequence AI838661 [Mus musculus]
  misc_feature (3)..(291): NCBI GI NO: 33303753 NR Description: hypothetical protein FLJ10349
  misc_feature (3)..(291): NCBI GI NO: 40254895 NR Description: hypothetical protein FLJ10349 [Homo sapiens]
  misc_feature (3)..(291): NCBI GI NO: 7981259 NR Description: dJ50O24
  misc_feature (3)..(291): NCBI GI NO: 14250403 NR Description: Unknown (protein for MGC:9656) [Homo sapiens]
  misc_feature (3)..(291): NCBI GI NO: 7022323 NR Description: unnamed protein product [Homo sapiens]
  misc_feature (1)..(295): NCBI GI NO: 6324836 NR Description: Protein required for cell viability; Yor262wp
  misc_feature (1)..(294): NCBI GI NO: 27735409 NR Description: Similar to expressed sequence AI838661
MVFGQVVIGPPGSGKTTYCNGMSQFLSLLGRKVAFVNLDPANDALPYECAINIEDLIKLSDVMSEHSLGPNGGLVYCMDYLEKNIDWLEEKLKPFIEDHYLLFDFPGQVELFFLHSNARSVINKLIKKMDLRLTAVHLIDAHLCCDPGKYVSALLLSLSTMLHLELPHINVLSKIDLIENYGNLAFNLDFYTDVQDLSYLQYHLEQDPRSAKYRKLTKELCDVIDDFGLVNFSTLDIQDKESVGNLVKLIDKSNGYIFSSIDSSAVEFSKIAAAPLDWDYYRTAEVQEKYMKDDEFAQLTSRMQ

SEQ ID NO: 31427 - protein, 283 aa, Zea mays subsp. mays
  peptide (1)..(283): Ceres Seq. ID no. 12416090
  misc_feature (1)..(235): Pfam Name: Pfam Description:  Conserved hypothetical ATP binding protein
  misc_feature (1)..(261): NCBI GI NO: 15242226 NR Description: putative protein; protein id: At5g22370.1
  misc_feature (1)..(277): NCBI GI NO: 34871770 NR Description: similar to expressed sequence AI838661
  misc_feature (1)..(283): NCBI GI NO: 19527098 NR Description: expressed sequence AI838661 [Mus musculus]
  misc_feature (1)..(270): NCBI GI NO: 33303753 NR Description: hypothetical protein FLJ10349
  misc_feature (1)..(270): NCBI GI NO: 40254895 NR Description: hypothetical protein FLJ10349 [Homo sapiens]
  misc_feature (1)..(270): NCBI GI NO: 7981259 NR Description: dJ50O24
  misc_feature (1)..(270): NCBI GI NO: 14250403 NR Description: Unknown (protein for MGC:9656) [Homo sapiens]
  misc_feature (1)..(270): NCBI GI NO: 7022323 NR Description: unnamed protein product [Homo sapiens]
  misc_feature (1)..(274): NCBI GI NO: 6324836 NR Description: Protein required for cell viability; Yor262wp
  misc_feature (1)..(273): NCBI GI NO: 27735409 NR Description: Similar to expressed sequence AI838661
MSQFLSLLGRKVAFVNLDPANDALPYECAINIEDLIKLSDVMSEHSLGPNGGLVYCMDYLEKNIDWLEEKLKPFIEDHYLLFDFPGQVELFFLHSNARSVINKLIKKMDLRLTAVHLIDAHLCCDPGKYVSALLLSLSTMLHLELPHINVLSKIDLIENYGNLAFNLDFYTDVQDLSYLQYHLEQDPRSAKYRKLTKELCDVIDDFGLVNFSTLDIQDKESVGNLVKLIDKSNGYIFSSIDSSAVEFSKIAAAPLDWDYYRTAEVQEKYMKDDEFAQLTSRMQ

SEQ ID NO: 31428 - protein, 242 aa, Zea mays subsp. mays
  peptide (1)..(242): Ceres Seq. ID no. 12416091
  misc_feature (1)..(194): Pfam Name: Pfam Description:  Conserved hypothetical ATP binding protein
  misc_feature (1)..(220): NCBI GI NO: 15242226 NR Description: putative protein; protein id: At5g22370.1
  misc_feature (1)..(236): NCBI GI NO: 34871770 NR Description: similar to expressed sequence AI838661
  misc_feature (1)..(242): NCBI GI NO: 19527098 NR Description: expressed sequence AI838661 [Mus musculus]
  misc_feature (1)..(229): NCBI GI NO: 33303753 NR Description: hypothetical protein FLJ10349
  misc_feature (1)..(229): NCBI GI NO: 40254895 NR Description: hypothetical protein FLJ10349 [Homo sapiens]
  misc_feature (1)..(229): NCBI GI NO: 7981259 NR Description: dJ50O24
  misc_feature (1)..(229): NCBI GI NO: 14250403 NR Description: Unknown (protein for MGC:9656) [Homo sapiens]
  misc_feature (1)..(229): NCBI GI NO: 7022323 NR Description: unnamed protein product [Homo sapiens]
  misc_feature (1)..(233): NCBI GI NO: 6324836 NR Description: Protein required for cell viability; Yor262wp
  misc_feature (1)..(232): NCBI GI NO: 27735409 NR Description: Similar to expressed sequence AI838661
MSEHSLGPNGGLVYCMDYLEKNIDWLEEKLKPFIEDHYLLFDFPGQVELFFLHSNARSVINKLIKKMDLRLTAVHLIDAHLCCDPGKYVSALLLSLSTMLHLELPHINVLSKIDLIENYGNLAFNLDFYTDVQDLSYLQYHLEQDPRSAKYRKLTKELCDVIDDFGLVNFSTLDIQDKESVGNLVKLIDKSNGYIFSSIDSSAVEFSKIAAAPLDWDYYRTAEVQEKYMKDDEFAQLTSRMQ

SEQ ID NO: 31429 - DNA, 1986 bp, Zea mays subsp. mays
  misc_feature (1)..(1986): Ceres Seq. ID no. 12358713
attgggtgcagtcgagtagttgccacctaaccgtggcggaggcgcagtgctgttgcgagatgtggctgtgatcgagcgagataactaaaagcctccccacataaatgcaagggcgacgagacggcaagcaagcggacgcgaacaaacccccttattccatagcgagcgcgagcagcggcgccgggaggactgctgcgatggggggagacgccagcaccatcgaggggggcccgctcccgcatctcggcggccggccggcctcccgcgtgcccgacaccccgctggtgcgcacggcgggggacgccgcgcgcatggtctgggacgagtccaagcgcctctggggcatcgggctgcccatcggcgtgggcatgcctgagcatgtacgccatcagctccatcacccagatattcatcggccacctcggcaacctcccgctggccgccgcctccatcggcctctccgtgttcgccaccttcgcgctcggcttcctcctcggcatgggcagcgcgctcgagacgctctgcggccaggccttcggcgccggcgaggtcgccatgctcggcgtctacctgcagcggtcttggatcatcctcgtcgccgcctgcgtcgtcatgacgcccgtcttcgtcttcgccgagtcgctgctcctgctcatcggccaggacgccgacgtcgcgcgggagtccgccaggttcgccacctacatcgtcccctccatctacgccatgggcatcaacttcgccgccagcaagttcctccaggcgcagagcaaggtcaccgtacccgcctggatcggcttcggggcgctcctcgcctgtgccctcctcaactacctgttcgtcagcgtgctcggctggggcctccccggcgccgccgccgcctacgacatcgcgcactggatcatcgcgctcggccaggtcgtctacatcatcggatggtgcaaggacggatggaaaggatggtccgtagccgccttccacgaaatctggccattcgtcaggctctccctcgagtccgccgtcatgctctgcctcgaggtatggtacatgagcctgatcaccgtgctcaccggcgacctggaggacgcccagattgccgtggactcactaggcatatgcatgaacataaacggatgggaggccatgatcttcatcggcctcaatgccgctatcagtgtccgagtctccaacgagcttggctccggccgtccgagggccgcgtggaacgccgtcatggtcgtcgtcggcgaggcgctggtgatcgggattctgtgcatggcactcatcctcatcttcagagacagcttctccatcattttcaccagcgacaccaccctgcagcgagccgtcgccaggatcgccggcctgctcggcctcaccatggtgctcaacagcgtgcagcccgtggtttcaggggtcgcggttgggggcggatggcagggcctcgtcgcctacatcaacctcggctgctactatatcttcggcctgcccctgggctacttgctcggatacaagttcagctttggagttggggggatttggtccggcatgctttgtggtatcacccttcagacgctcatcttgctaggtgtggtttggaggacagattggaaagcagaggccgcacaagcttcaggccgtgtgcaaaagtggggcggcaaaggcaccgatgaagtcaagcctctcctggaatagaattagtgtagtactatcacgcacgaagctcgtttcatttgaataaacaactgggcaatacgccttatccctttcagaagcacagctcatttgctttcccatcgaatctgatagcttccctttcccctcctccgtgtagttaaattgatgtctctgtatgaacactgtttgaggcgactagtatgaaccctgtttgcggcgactagacgtattgaacatactttttttttcttccagttgactcagcatgacttgaacagtctcaaattgtgtgtaaaggatttactcgct

SEQ ID NO: 31430 - protein, 522 aa, Zea mays subsp. mays
  peptide (1)..(522): Ceres Seq. ID no. 12358714
MQGRRDGKQADANKPPYSIASASSGAGRTAAMGGDASTIEGGPLPHLGGRPASRVPDTPLVRTAGDAARMVWDESKRLWGIGLPIGVGMPEHVRHQLHHPDIHRPPRQPPAGRRLHRPLRVRHLRARLPPRHGQRARDALRPGLRRRRGRHARRLPAAVLDHPRRRLRRHDARLRLRRVAAPAHRPGRRRRAGVRQVRHLHRPLHLRHGHQLRRQQVPPGAEQGHRTRLDRLRGAPRLCPPQLPVRQRARLGPPRRRRRLRHRALDHRARPGRLHHRMVQGRMERMVRSRLPRNLAIRQALPRVRRHALPRGMVHEPDHRAHRRPGGRPDCRGLTRHMHEHKRMGGHDLHRPQCRYQCPSLQRAWLRPSEGRVERRHGRRRRGAGDRDSVHGTHPHLQRQLLHHFHQRHHPAASRRQDRRPARPHHGAQQRAARGFRGRGWGRMAGPRRLHQPRLLLYLRPAPGLLARIQVQLWSWGDLVRHALWYHPSDAHLARCGLEDRLESRGRTSFRPCAKVGRQRHR

SEQ ID NO: 31431 - protein, 491 aa, Zea mays subsp. mays
  peptide (1)..(491): Ceres Seq. ID no. 12358715
MGGDASTIEGGPLPHLGGRPASRVPDTPLVRTAGDAARMVWDESKRLWGIGLPIGVGMPEHVRHQLHHPDIHRPPRQPPAGRRLHRPLRVRHLRARLPPRHGQRARDALRPGLRRRRGRHARRLPAAVLDHPRRRLRRHDARLRLRRVAAPAHRPGRRRRAGVRQVRHLHRPLHLRHGHQLRRQQVPPGAEQGHRTRLDRLRGAPRLCPPQLPVRQRARLGPPRRRRRLRHRALDHRARPGRLHHRMVQGRMERMVRSRLPRNLAIRQALPRVRRHALPRGMVHEPDHRAHRRPGGRPDCRGLTRHMHEHKRMGGHDLHRPQCRYQCPSLQRAWLRPSEGRVERRHGRRRRGAGDRDSVHGTHPHLQRQLLHHFHQRHHPAASRRQDRRPARPHHGAQQRAARGFRGRGWGRMAGPRRLHQPRLLLYLRPAPGLLARIQVQLWSWGDLVRHALWYHPSDAHLARCGLEDRLESRGRTSFRPCAKVGRQRHR

SEQ ID NO: 31432 - protein, 453 aa, Zea mays subsp. mays
  peptide (1)..(453): Ceres Seq. ID no. 12358716
MVWDESKRLWGIGLPIGVGMPEHVRHQLHHPDIHRPPRQPPAGRRLHRPLRVRHLRARLPPRHGQRARDALRPGLRRRRGRHARRLPAAVLDHPRRRLRRHDARLRLRRVAAPAHRPGRRRRAGVRQVRHLHRPLHLRHGHQLRRQQVPPGAEQGHRTRLDRLRGAPRLCPPQLPVRQRARLGPPRRRRRLRHRALDHRARPGRLHHRMVQGRMERMVRSRLPRNLAIRQALPRVRRHALPRGMVHEPDHRAHRRPGGRPDCRGLTRHMHEHKRMGGHDLHRPQCRYQCPSLQRAWLRPSEGRVERRHGRRRRGAGDRDSVHGTHPHLQRQLLHHFHQRHHPAASRRQDRRPARPHHGAQQRAARGFRGRGWGRMAGPRRLHQPRLLLYLRPAPGLLARIQVQLWSWGDLVRHALWYHPSDAHLARCGLEDRLESRGRTSFRPCAKVGRQRHR

SEQ ID NO: 31433 - protein, 438 aa, Zea mays subsp. mays
  peptide (1)..(438): Ceres Seq. ID no. 12358717
  misc_feature (1)..(430): NCBI GI NO: 30686958 NR Description: MATE efflux protein family [Arabidopsis thaliana]
  misc_feature (1)..(434): NCBI GI NO: 33867697 NR Description: putative anthocyanin permease
  misc_feature (22)..(436): NCBI GI NO: 28393585 NR Description: unknown protein [Arabidopsis thaliana]
  misc_feature (1)..(246): NCBI GI NO: 30678614 NR Description: MATE efflux protein family [Arabidopsis thaliana]
  misc_feature (264)..(436): NCBI GI NO: 30678614 NR Description: MATE efflux protein family [Arabidopsis thaliana]
  misc_feature (1)..(384): NCBI GI NO: 7486770 NR Description: hypothetical protein L73G19
  misc_feature (1)..(246): NCBI GI NO: 7485264 NR Description: hypothetical protein A_IG005I10
  misc_feature (264)..(414): NCBI GI NO: 7485264 NR Description: hypothetical protein A_IG005I10
  misc_feature (1)..(427): NCBI GI NO: 15220246 NR Description: unknown protein; protein id: At1g47530
  misc_feature (1)..(427): NCBI GI NO: 16604505 NR Description: At1g47530/F16N3_20 [Arabidopsis thaliana]
MYAISSITQIFIGHLGNLPLAAASIGLSVFATFALGFLLGMGSALETLCGQAFGAGEVAMLGVYLQRSWIILVAACVVMTPVFVFAESLLLLIGQDADVARESARFATYIVPSIYAMGINFAASKFLQAQSKVTVPAWIGFGALLACALLNYLFVSVLGWGLPGAAAAYDIAHWIIALGQVVYIIGWCKDGWKGWSVAAFHEIWPFVRLSLESAVMLCLEVWYMSLITVLTGDLEDAQIAVDSLGICMNINGWEAMIFIGLNAAISVRVSNELGSGRPRAAWNAVMVVVGEALVIGILCMALILIFRDSFSIIFTSDTTLQRAVARIAGLLGLTMVLNSVQPVVSGVAVGGGWQGLVAYINLGCYYIFGLPLGYLLGYKFSFGVGGIWSGMLCGITLQTLILLGVVWRTDWKAEAAQASGRVQKWGGKGTDEVKPLLE

SEQ ID NO: 31434 - DNA, 1837 bp, Zea mays subsp. mays
  misc_feature (1)..(1837): Ceres Seq. ID no. 12416371
  misc_feature (827)..(827): n is a, c, t, g, unknown, or other
  misc_feature (235)..(235): n is a, c, t, g, unknown, or other
  misc_feature (220)..(220): n is a, c, t, g, unknown, or other
  misc_feature (774)..(774): n is a, c, t, g, unknown, or other
agtcccctcatctctcgtctctcctcctgcctcctcgtcctcgccttcccattcccccgccccaaacccccagctcgattcccagtcgtctcgccccgtgatgtcgccggctgctggtggccccgcgcccgcgccaggccagcgcaatcagcggccgccgttccgcaggcgatcgcggtaccgccggagtccggccgttcggcgcccgaggctcccgcangatccaccggcccancccgagggggccgatcccaccaatgcggcggcaaggaagacaacgtggagcgtgctggcgcagacccccgccgccgcggcggaggcgaccccagagggcggcggcatcatcggcggggacgcctcgtggccggcgctcgtggagtcgacgcgcgcgtgccccaagtcgggctcgtccgactccctcaatgccctctccgatgtttccggcccgcctccgcaggaggatacaattgctgcttcatcggtacttccacatccagttgtgggggctaatccgattcccactgcccaaaaccctacctccatacctcctcgcacgcctgcggcttcctctcagcagaacggtgccacaacccagacatttccagttcggcgcagtggcaaccgtggaaatggtagcaatggtggcgtcagggctgccaatagtagcggaggtgacgggagcagtggcagtggtggtgatggtaactggaatgatggaagccttggtactgacagcggttgcaacagcagcaatggcgatggtcccatcaattnggatgataatgtccctggcactcgttgtgcccgtgggaatgacaatgacagcngcagaaatccttctggcaatggccactggaaccacaacatacgaggtggtggtggtggtggtgatgggaacaatagaaatagcagtggtagcagcaaccactggaataataatccccgaaatagtagtagtagcaatggcgttggaggtcgtggtggttaccgggggtcgccgtgaccatgagagagggggctaatttctcccctaggaacttcccaagagttccggtaatgccatatcaacagcagcagcagcctggcatctaccagcctgggccctttcaccgaccaccaccaccggctgcccatttcatggtgccacagcatttttatgtcccatcatttccctaccttgctgatgtgcaaccttatcctgtctacctcccaccagtagaacagtttcagaacatgcatcttcttcggccacccatgcagcctgcttgggttcctcctcatcaggatcaaccaaatctccaagatagtattaggaatcagatagagttctattttagcacaaataatctatgccatgacacattcttgaggagacatatgaacaatcaaggatgggtacctattgacctaatcttagggttcaaccggatgagggcgtttacaggtttggtggacaccaactacatactagatgctatccgtggttctgagttattggaagtgcagggagataatgtccggaggcgcaatgattggatggaatggctgcttcattaaggccgtccactagtaaatcagatgccaagatgcagctgcatgccatattgggggaactgaatgaatagaagtcttgatcacggcgtgatggactgatgtacagcgagcgggtctattggaatcgggatgatttttgtttgacgtgatggctgcacgtgaaggcacattattcaaagggaaaataattttacttagggctagcaaatgtttttatggcagtctgtatagttgtccgaaaagaagtgaccaccctgccttctcattatggattattattatt

SEQ ID NO: 31435 - protein, 333 aa, Zea mays subsp. mays
  peptide (1)..(333): Ceres Seq. ID no. 12416372
  misc_feature (141)..(240): Pfam Name: Pfam Description:  GRASP55/65 family
  misc_feature (7)..(235): NCBI GI NO: 18419738 NR Description: putative protein; protein id: At4g35890
  misc_feature (7)..(235): NCBI GI NO: 7486390 NR Description: hypothetical protein F4B14
  misc_feature (205)..(332): NCBI GI NO: 6899836 NR Description: N66 matrix protein [Pinctada maxima]
  misc_feature (205)..(332): NCBI GI NO: 11362266 NR Description: molluscan shell matrix protein N66
  misc_feature (205)..(332): NCBI GI NO: 21398347 NR Description: hypothetical protein predicted by GeneMark
  misc_feature (205)..(332): NCBI GI NO: 30260564 NR Description: LPXTG-motif cell wall anchor domain protein
  misc_feature (205)..(332): NCBI GI NO: 30018648 NR Description: surface protein [Bacillus cereus ATCC 14579]
  misc_feature (3)..(213): NCBI GI NO: 34809533 NR Description: Epa5p [Candida glabrata]
  misc_feature (185)..(331): NCBI GI NO: 34809533 NR Description: Epa5p [Candida glabrata]
  misc_feature (205)..(332): NCBI GI NO: 30018648 NR Description: surface protein [Bacillus cereus ATCC 14579]
  misc_feature (73)..(73): Xaa is any aa, unknown or other
  misc_feature (78)..(78): Xaa is any aa, unknown or other
  misc_feature (258)..(258): Xaa is any aa, unknown or other
  misc_feature (276)..(276): Xaa is any aa, unknown or other
VPSSLVSPPASSSSPSHSPAPNPQLDSQSSRPVMSPAAGGPAPAPGQRNQRPPFRRRSRYRRSPAVRRPRLPXDPPAXPEGADPTNAAARKTTWSVLAQTPAAAAEATPEGGGIIGGDASWPALVESTRACPKSGSSDSLNALSDVSGPPPQEDTIAASSVLPHPVVGANPIPTAQNPTSIPPRTPAASSQQNGATTQTFPVRRSGNRGNGSNGGVRAANSSGGDGSSGSGGDGNWNDGSLGTDSGCNSSNGDGPINXDDNVPGTRCARGNDNDSXRNPSGNGHWNHNIRGGGGGGDGNNRNSSGSSNHWNNNPRNSSSSNGVGGRGGYRGSP

SEQ ID NO: 31436 - protein, 300 aa, Zea mays subsp. mays
  peptide (1)..(300): Ceres Seq. ID no. 12416373
  misc_feature (108)..(207): Pfam Name: Pfam Description:  GRASP55/65 family
  misc_feature (1)..(202): NCBI GI NO: 18419738 NR Description: putative protein; protein id: At4g35890
  misc_feature (1)..(202): NCBI GI NO: 7486390 NR Description: hypothetical protein F4B14
  misc_feature (172)..(299): NCBI GI NO: 6899836 NR Description: N66 matrix protein [Pinctada maxima]
  misc_feature (172)..(299): NCBI GI NO: 11362266 NR Description: molluscan shell matrix protein N66
  misc_feature (172)..(299): NCBI GI NO: 21398347 NR Description: hypothetical protein predicted by GeneMark
  misc_feature (172)..(299): NCBI GI NO: 30260564 NR Description: LPXTG-motif cell wall anchor domain protein
  misc_feature (172)..(299): NCBI GI NO: 30018648 NR Description: surface protein [Bacillus cereus ATCC 14579]
  misc_feature (1)..(180): NCBI GI NO: 34809533 NR Description: Epa5p [Candida glabrata]
  misc_feature (152)..(298): NCBI GI NO: 34809533 NR Description: Epa5p [Candida glabrata]
  misc_feature (172)..(299): NCBI GI NO: 30018648 NR Description: surface protein [Bacillus cereus ATCC 14579]
  misc_feature (40)..(40): Xaa is any aa, unknown or other
  misc_feature (45)..(45): Xaa is any aa, unknown or other
  misc_feature (225)..(225): Xaa is any aa, unknown or other
  misc_feature (243)..(243): Xaa is any aa, unknown or other
MSPAAGGPAPAPGQRNQRPPFRRRSRYRRSPAVRRPRLPXDPPAXPEGADPTNAAARKTTWSVLAQTPAAAAEATPEGGGIIGGDASWPALVESTRACPKSGSSDSLNALSDVSGPPPQEDTIAASSVLPHPVVGANPIPTAQNPTSIPPRTPAASSQQNGATTQTFPVRRSGNRGNGSNGGVRAANSSGGDGSSGSGGDGNWNDGSLGTDSGCNSSNGDGPINXDDNVPGTRCARGNDNDSXRNPSGNGHWNHNIRGGGGGGDGNNRNSSGSSNHWNNNPRNSSSSNGVGGRGGYRGSP

SEQ ID NO: 31437 - protein, 254 aa, Zea mays subsp. mays
  peptide (1)..(254): Ceres Seq. ID no. 12416374
  misc_feature (173)..(173): Xaa is any aa, unknown or other
  misc_feature (190)..(190): Xaa is any aa, unknown or other
MRRQGRQRGACWRRPPPPRRRRPQRAAASSAGTPRGRRSWSRRARAPSRARPTPSMPSPMFPARLRRRIQLLLHRYFHIQLWGLIRFPLPKTLPPYLLARLRLPLSRTVPQPRHFQFGAVATVEMVAMVASGLPIVAEVTGAVAVVVMVTGMMEALVLTAVATAAMAMVPSIXMIMSLALVVPVGMTMTXAEILLAMATGTTTYEVVVVVVMGTIEIAVVAATTGIIIPEIVVVAMALEVVVVTGGRRDHERGG

SEQ ID NO: 31438 - DNA, 1342 bp, Zea mays subsp. mays
  misc_feature (1)..(1342): Ceres Seq. ID no. 13493226
aagctagctagcagctgtaacttccaccaccagtactcagtactcacatcaaacacacacgaaccatcaataacccctctgcaggctgagggaaacgtgaacacaccatggcgaggccgccgtgctgcgacaaggagggcgtcaagaagggcccgtggacgccggaggaggacctcgtcctcgtctcctacatccaggaccacggccccggcaactggcgcgccgtccccaccagaaccgggctgatgcggtgcagcaagagctgccggcttcggtggaccaactacctccggccgggcatcaggcgcggcaacttcacggagcaggaggagaagctcatcgtccacctccaggccctcctcggcaacaggtgggcggccatcgcgtcgtacctgccggagcggacggacaacgacgtcaagaactactggaacacgcacctcaagcgcaagctgcaggccggcagcggcgacggcgacggcgacggggcggccaagccgccggcgcacaggccgccgccgtccaactccaaggggcagtgggagaggaggctgcagacggacatcaacctggcgcgccgcgcgctccgcgaggcgctcaccccgctcggcgacctcaagccgcagccgcagccgcagccgcagccgcagcgcgacggcgctggcgtgggcatcgtcggcggtgacagcccggcggcctcgagcttgtcgtcgcagtgctccccgccgccagcgcctgccgccttggggacgtacgttctcaccgcggacaacgtctcccggatgctggacggatgggccggcttgaactggaagcgccgcggcggggctccgggcacgcccggcggcgccgagaccgcgtccaccgggtcctcctcggaggtgtcgtacggcggtggcaccgccgtcgtcgcgccggccgctggtggcccggtgttcgagtacgagacgaagccgccggccgctccgttccagctgatgatgccgctgtctgcgatcgagtcgtggctgttcgacgacgacacccacttccaccgtcctgtccagagcgccagcttgctggacgccgcccccatggattattacctgttgtagctagcgtgtccagcagctgatccagaccaagctaatccgttcaagcaaggaagtcggtggctgattagtcggctagctagctacctgtttctaaagttgttagttttcattatatttagccttttctcttctaggtgggtaaaagctgagtgcgtacttccccttgtgcaagctgcataatgttgcgtgggaaaataacatatatagctcttgagaccactaacatatatatagcagatagttttwcc

SEQ ID NO: 31439 - protein, 328 aa, Zea mays subsp. mays
  peptide (1)..(328): Ceres Seq. ID no. 15222902
  misc_feature (14)..(61): Pfam Name: Pfam Description:  Myb-like DNA-binding domain
  misc_feature (1)..(325): NCBI GI NO: 34913210 NR Description: contains EST C28158(C60218)~myb-like protein
  misc_feature (1)..(307): NCBI GI NO: 15228203 NR Description: transcription factor MYB94 -related
  misc_feature (1)..(307): NCBI GI NO: 3941528 NR Description: putative transcription factor
  misc_feature (1)..(278): NCBI GI NO: 30697683 NR Description: MYB96 transcription factor-related protein
  misc_feature (1)..(278): NCBI GI NO: 30697680 NR Description: MYB96 transcription factor-related protein
  misc_feature (1)..(304): NCBI GI NO: 15228529 NR Description: myb family transcription factor
  misc_feature (1)..(199): NCBI GI NO: 19072764 NR Description: typical P-type R2R3 Myb protein [Oryza sativa]
  misc_feature (1)..(304): NCBI GI NO: 11273960 NR Description: myb-related transcription factor MYB30
  misc_feature (1)..(304): NCBI GI NO: 21592842 NR Description: MYB family transcription factor (hsr1), putative
  misc_feature (1)..(213): NCBI GI NO: 18071376 NR Description: putative transcription factor [Oryza sativa]
MARPPCCDKEGVKKGPWTPEEDLVLVSYIQDHGPGNWRAVPTRTGLMRCSKSCRLRWTNYLRPGIRRGNFTEQEEKLIVHLQALLGNRWAAIASYLPERTDNDVKNYWNTHLKRKLQAGSGDGDGDGAAKPPAHRPPPSNSKGQWERRLQTDINLARRALREALTPLGDLKPQPQPQPQPQRDGAGVGIVGGDSPAASSLSSQCSPPPAPAALGTYVLTADNVSRMLDGWAGLNWKRRGGAPGTPGGAETASTGSSSEVSYGGGTAVVAPAAGGPVFEYETKPPAAPFQLMMPLSAIESWLFDDDTHFHRPVQSASLLDAAPMDYYLL

SEQ ID NO: 31440 - protein, 282 aa, Zea mays subsp. mays
  peptide (1)..(282): Ceres Seq. ID no. 15222903
  misc_feature (1)..(279): NCBI GI NO: 34913210 NR Description: contains EST C28158(C60218)~myb-like protein
  misc_feature (1)..(261): NCBI GI NO: 15228203 NR Description: transcription factor MYB94 -related
  misc_feature (1)..(261): NCBI GI NO: 3941528 NR Description: putative transcription factor
  misc_feature (1)..(232): NCBI GI NO: 30697683 NR Description: MYB96 transcription factor-related protein
  misc_feature (1)..(232): NCBI GI NO: 30697680 NR Description: MYB96 transcription factor-related protein
  misc_feature (1)..(258): NCBI GI NO: 15228529 NR Description: myb family transcription factor
  misc_feature (1)..(153): NCBI GI NO: 19072764 NR Description: typical P-type R2R3 Myb protein [Oryza sativa]
  misc_feature (1)..(258): NCBI GI NO: 11273960 NR Description: myb-related transcription factor MYB30
  misc_feature (1)..(258): NCBI GI NO: 21592842 NR Description: MYB family transcription factor (hsr1), putative
  misc_feature (1)..(167): NCBI GI NO: 18071376 NR Description: putative transcription factor [Oryza sativa]
MRCSKSCRLRWTNYLRPGIRRGNFTEQEEKLIVHLQALLGNRWAAIASYLPERTDNDVKNYWNTHLKRKLQAGSGDGDGDGAAKPPAHRPPPSNSKGQWERRLQTDINLARRALREALTPLGDLKPQPQPQPQPQRDGAGVGIVGGDSPAASSLSSQCSPPPAPAALGTYVLTADNVSRMLDGWAGLNWKRRGGAPGTPGGAETASTGSSSEVSYGGGTAVVAPAAGGPVFEYETKPPAAPFQLMMPLSAIESWLFDDDTHFHRPVQSASLLDAAPMDYYLL

SEQ ID NO: 31441 - DNA, 1297 bp, Zea mays subsp. mays
  misc_feature (1)..(1297): Ceres Seq. ID no. 13493135
  misc_feature (353)..(353): n is a, c, t, g, unknown, or other
  misc_feature (359)..(359): n is a, c, t, g, unknown, or other
  misc_feature (395)..(395): n is a, c, t, g, unknown, or other
  misc_feature (357)..(357): n is a, c, t, g, unknown, or other
acacaagcagcaacatcactgatcgccgtgcaggcctggtacgtaccacacacacacacacacatacagaagaagaacgtaccttgcgctacaaccccgtcgccgccgactacgccgatcgtgtccacgggaaccaagcaaagcaaagcaagcgacgcatcggaagaagccggagaccgaccgaccgaccgagctacctagctacagctcatcagcccatggtgaagacggcgacggcgacggcggcggcgaggcacggcggcgctcataagaggacgtacaagggcgtgcggatgcggagctggggctcctgggtgtcggaggtgcgggcgccgggccagaagacgaggatntggntnggctcccactccaccgccgaggccgcggcgcgcgcntacgacgccgcgctgctctgcctcaggggctcggcggccgcgccggacctcaacttcccgccccgccgcccgctcgccgacggcctccacccgctgccccccgccgccatgtcgcccaaggccatccagcgcgtggccgccgccgccgcggcctgctgcgctcctcagagtaacggcattggcagtgcctgctgcgccgcgccctgcgctcctccgagtaatggcattggcagcgcctgcggccacgccgagaccgccccggcgttgagcggcagcccgccctccagcgacagcgacgtctcctccccggaggcggggtccaccgccagcagcgacggcgagctggcccgctacggcgacggcgacggcgacggcggcgtcagcgtggactacggctcgctcgccgacatcgacgccttcttccagtcgcccaagtgcatggacgacgaccactactactacgcagcgctcatggacccctgcggcgccttcttcgcgccggcgccatcggttgcggcggacgacgacgcagcagccgccgccggatgctgggaggacggcgacggcattgcgctctggagcttcagcttccccgctctggactgctgagctgaagcggcgcagattccgctactactgacgattgacgactaatcgccggtcaagcgatggaaaccgctttatttgcttcatcgacggcacaggtttccgcatacatgataaatttacccaatttaattcgatgtatgtaaacattcttaataagctgattgttaagcgttgtagtggtggggagctctcatggctgaagctgcatgttttaaggtagctttttccatggagttaacctctttgctattgcttgtctatgagtaaacaaaaaaaaaaacagttttattgcc

SEQ ID NO: 31442 - protein, 333 aa, Zea mays subsp. mays
  peptide (1)..(333): Ceres Seq. ID no. 13493136
  misc_feature (91)..(151): Pfam Name: Pfam Description:  AP2 domain
  misc_feature (75)..(246): NCBI GI NO: 34902130 NR Description: hypothetical protein
  misc_feature (76)..(194): NCBI GI NO: 15219452 NR Description: AP2 domain transcription factor TINY, putative
  misc_feature (76)..(181): NCBI GI NO: 15224024 NR Description: AP2 domain transcription factor, putative
  misc_feature (48)..(193): NCBI GI NO: 15219139 NR Description: transcription factor TINY family
  misc_feature (91)..(193): NCBI GI NO: 21554056 NR Description: TINY-like protein [Arabidopsis thaliana]
  misc_feature (75)..(237): NCBI GI NO: 21908034 NR Description: DRE binding factor 2 [Zea mays]
  misc_feature (75)..(237): NCBI GI NO: 25990951 NR Description: DREB-like protein [Zea mays]
  misc_feature (89)..(218): NCBI GI NO: 14140163 NR Description: putative AP2 domain containing protein
  misc_feature (75)..(269): NCBI GI NO: 37536842 NR Description: putative DNA binding protein
  misc_feature (6)..(203): NCBI GI NO: 34898382 NR Description: EST AU055776
  misc_feature (117)..(117): Xaa is any aa, unknown or other
  misc_feature (119)..(119): Xaa is any aa, unknown or other
  misc_feature (131)..(131): Xaa is any aa, unknown or other
TSSNITDRRAGLVRTTHTHTHTEEERTLRYNPVAADYADRVHGNQAKQSKRRIGRSRRPTDRPSYLATAHQPMVKTATATAAARHGGAHKRTYKGVRMRSWGSWVSEVRAPGQKTRXWXGSHSTAEAAARXYDAALLCLRGSAAAPDLNFPPRRPLADGLHPLPPAAMSPKAIQRVAAAAAACCAPQSNGIGSACCAAPCAPPSNGIGSACGHAETAPALSGSPPSSDSDVSSPEAGSTASSDGELARYGDGDGDGGVSVDYGSLADIDAFFQSPKCMDDDHYYYAALMDPCGAFFAPAPSVAADDDAAAAAGCWEDGDGIALWSFSFPALDC

SEQ ID NO: 31443 - protein, 261 aa, Zea mays subsp. mays
  peptide (1)..(261): Ceres Seq. ID no. 13493137
  misc_feature (19)..(79): Pfam Name: Pfam Description:  AP2 domain
  misc_feature (3)..(174): NCBI GI NO: 34902130 NR Description: hypothetical protein
  misc_feature (4)..(122): NCBI GI NO: 15219452 NR Description: AP2 domain transcription factor TINY, putative
  misc_feature (4)..(109): NCBI GI NO: 15224024 NR Description: AP2 domain transcription factor, putative
  misc_feature (1)..(121): NCBI GI NO: 15219139 NR Description: transcription factor TINY family
  misc_feature (19)..(121): NCBI GI NO: 21554056 NR Description: TINY-like protein [Arabidopsis thaliana]
  misc_feature (3)..(165): NCBI GI NO: 21908034 NR Description: DRE binding factor 2 [Zea mays]
  misc_feature (3)..(165): NCBI GI NO: 25990951 NR Description: DREB-like protein [Zea mays]
  misc_feature (17)..(146): NCBI GI NO: 14140163 NR Description: putative AP2 domain containing protein
  misc_feature (3)..(197): NCBI GI NO: 37536842 NR Description: putative DNA binding protein
  misc_feature (1)..(131): NCBI GI NO: 34898382 NR Description: EST AU055776
  misc_feature (45)..(45): Xaa is any aa, unknown or other
  misc_feature (47)..(47): Xaa is any aa, unknown or other
  misc_feature (59)..(59): Xaa is any aa, unknown or other
MVKTATATAAARHGGAHKRTYKGVRMRSWGSWVSEVRAPGQKTRXWXGSHSTAEAAARXYDAALLCLRGSAAAPDLNFPPRRPLADGLHPLPPAAMSPKAIQRVAAAAAACCAPQSNGIGSACCAAPCAPPSNGIGSACGHAETAPALSGSPPSSDSDVSSPEAGSTASSDGELARYGDGDGDGGVSVDYGSLADIDAFFQSPKCMDDDHYYYAALMDPCGAFFAPAPSVAADDDAAAAAGCWEDGDGIALWSFSFPALDC

SEQ ID NO: 31444 - protein, 236 aa, Zea mays subsp. mays
  peptide (1)..(236): Ceres Seq. ID no. 13493138
  misc_feature (1)..(54): Pfam Name: Pfam Description:  AP2 domain
  misc_feature (1)..(149): NCBI GI NO: 34902130 NR Description: hypothetical protein
  misc_feature (1)..(97): NCBI GI NO: 15219452 NR Description: AP2 domain transcription factor TINY, putative
  misc_feature (1)..(84): NCBI GI NO: 15224024 NR Description: AP2 domain transcription factor, putative
  misc_feature (1)..(96): NCBI GI NO: 15219139 NR Description: transcription factor TINY family
  misc_feature (1)..(96): NCBI GI NO: 21554056 NR Description: TINY-like protein [Arabidopsis thaliana]
  misc_feature (1)..(140): NCBI GI NO: 21908034 NR Description: DRE binding factor 2 [Zea mays]
  misc_feature (1)..(140): NCBI GI NO: 25990951 NR Description: DREB-like protein [Zea mays]
  misc_feature (1)..(121): NCBI GI NO: 14140163 NR Description: putative AP2 domain containing protein
  misc_feature (1)..(172): NCBI GI NO: 37536842 NR Description: putative DNA binding protein
  misc_feature (1)..(106): NCBI GI NO: 34898382 NR Description: EST AU055776
  misc_feature (20)..(20): Xaa is any aa, unknown or other
  misc_feature (22)..(22): Xaa is any aa, unknown or other
  misc_feature (34)..(34): Xaa is any aa, unknown or other
MRSWGSWVSEVRAPGQKTRXWXGSHSTAEAAARXYDAALLCLRGSAAAPDLNFPPRRPLADGLHPLPPAAMSPKAIQRVAAAAAACCAPQSNGIGSACCAAPCAPPSNGIGSACGHAETAPALSGSPPSSDSDVSSPEAGSTASSDGELARYGDGDGDGGVSVDYGSLADIDAFFQSPKCMDDDHYYYAALMDPCGAFFAPAPSVAADDDAAAAAGCWEDGDGIALWSFSFPALDC

SEQ ID NO: 31445 - DNA, 1675 bp, Zea mays subsp. mays
  misc_feature (1)..(1675): Ceres Seq. ID no. 12354295
atagaacatcctaatcgaaaaattttctggttgcagattgattctttaccatttgtatcgccattcctccctgttcgttgggcgtggggtctcaacctaaaatcagtcccattccgcgctcctagtggagagtggattcgaacggaaacacctttttgtgccccaagatgcctgtttccgcttcgtttccacgccacaccttttgaatcctttgccgtcacctcgccttttgcagcactagttgtttgtcagccttcttggagtgtggaggggcagagagcgccgtcctgttgattcaggaaaacagtccgagccgatgggcaggaagagcgacggcgcgcggttgcaatgcgctgaggccaaactggcgacggattggacctgctgcttcctggccctgccaccggcagcaccatccgctgtggatggcgatggtggattcaacctctcgtggaacctccaccagtccttccacccgccggccggcttcttcgccagcgtgggccagcaggttggggttgggttcccagggccttcgtcccagtcgccggagacgccacgggacccatacatgaagtacgtctcgccggaggttgttgtgacacctctgccgagggaaggcgtggtggggttgagggacaaggggaagaagaaagtcgtgaagctcaagattaaggttgggaatcatcacctcaagagactgatcagtggagcaatcgcaggcgcagtgtcaagaactgctgttgcacctttggagacgatcaggacgcatttgatggtgggaagtaatgggaattcgacgacggaggtgttccagtctatcatgaagcatgagggatggactgggttgttccgtggtaacgttgttaatgtcatccgggtagccccaagcaaggcaatcgagctttttgcctttgatacagctaataagttcttgacccccaaatatggggagaaaccgaagatcccagtccctccttcactagtggctggggcatttgccggtgttagctcaactctgtgtacatacccactggaattaattaagacacggctaactatacagagaggcgtgtatgacaatttccttgatgcatttgtcaaaatcatccgcgacgaagggccttctgagctctaccgaggcttaaccccaagcttgattggagtggtgccatatgctgcaacgaactacttcgcctatgacagcctgaagaaggtgtacaagaagatgttcaagacaaatgagattggcagtgttccaacactgttcatcgggtctgccgcaggagctatctcaagcacagcgacgttccctcttgaggtggcacggaagcacatgcaagttggagctgttggtggcaggaaggtttacaagaacatgcttcatgccttgttgagcattcttgaggatgaaggggttgggggcctttacagagggttggggccaagctgcatgaagttggtgcctgctgctgggatttcgttcatgtgctacgaggcttgcaagaagattctgattgaggaagaggatgagtgaagtgtatgcagatcattagaactcagttttgtgacatcctgacagcaggcagcttgaggttactgctgtagtcggcataagttcttaacccctttttgcacccagttttatctgataaactcacctcgttttttcccc

SEQ ID NO: 31446 - protein, 406 aa, Zea mays subsp. mays
  peptide (1)..(406): Ceres Seq. ID no. 12354296
  misc_feature (59)..(406): NCBI GI NO: 4138581 NR Description: mitochondrial energy transfer protein
  misc_feature (39)..(406): NCBI GI NO: 15236783 NR Description: mitochondrial carrier protein family
  misc_feature (128)..(406): NCBI GI NO: 231654 NR Description: Brittle-1 protein, chloroplast precursor
  misc_feature (100)..(400): NCBI GI NO: 20864410 NR Description: RIKEN cDNA 2900084M01 [Mus musculus]
  misc_feature (126)..(400): NCBI GI NO: 34877651 NR Description: similar to CG4241-PA [Rattus norvegicus]
  misc_feature (127)..(400): NCBI GI NO: 16549529 NR Description: unnamed protein product [Homo sapiens]
  misc_feature (126)..(398): NCBI GI NO: 6746567 NR Description: hydrogenosomal membrane protein 31 precursor
  misc_feature (104)..(400): NCBI GI NO: 15241360 NR Description: calcium-binding transporter-like protein
  misc_feature (100)..(400): NCBI GI NO: 29742699 NR Description: similar to CG4241-PA [Homo sapiens]
  misc_feature (126)..(398): NCBI GI NO: 30315255 NR Description: hydrogenosomal carrier protein
MGRKSDGARLQCAEAKLATDWTCCFLALPPAAPSAVDGDGGFNLSWNLHQSFHPPAGFFASVGQQVGVGFPGPSSQSPETPRDPYMKYVSPEVVVTPLPREGVVGLRDKGKKKVVKLKIKVGNHHLKRLISGAIAGAVSRTAVAPLETIRTHLMVGSNGNSTTEVFQSIMKHEGWTGLFRGNVVNVIRVAPSKAIELFAFDTANKFLTPKYGEKPKIPVPPSLVAGAFAGVSSTLCTYPLELIKTRLTIQRGVYDNFLDAFVKIIRDEGPSELYRGLTPSLIGVVPYAATNYFAYDSLKKVYKKMFKTNEIGSVPTLFIGSAAGAISSTATFPLEVARKHMQVGAVGGRKVYKNMLHALLSILEDEGVGGLYRGLGPSCMKLVPAAGISFMCYEACKKILIEEEDE

SEQ ID NO: 31447 - protein, 321 aa, Zea mays subsp. mays
  peptide (1)..(321): Ceres Seq. ID no. 12354297
  misc_feature (1)..(321): NCBI GI NO: 4138581 NR Description: mitochondrial energy transfer protein
  misc_feature (1)..(321): NCBI GI NO: 15236783 NR Description: mitochondrial carrier protein family
  misc_feature (43)..(321): NCBI GI NO: 231654 NR Description: Brittle-1 protein, chloroplast precursor
  misc_feature (15)..(315): NCBI GI NO: 20864410 NR Description: RIKEN cDNA 2900084M01 [Mus musculus]
  misc_feature (41)..(315): NCBI GI NO: 34877651 NR Description: similar to CG4241-PA [Rattus norvegicus]
  misc_feature (42)..(315): NCBI GI NO: 16549529 NR Description: unnamed protein product [Homo sapiens]
  misc_feature (41)..(313): NCBI GI NO: 6746567 NR Description: hydrogenosomal membrane protein 31 precursor
  misc_feature (19)..(315): NCBI GI NO: 15241360 NR Description: calcium-binding transporter-like protein
  misc_feature (15)..(315): NCBI GI NO: 29742699 NR Description: similar to CG4241-PA [Homo sapiens]
  misc_feature (41)..(313): NCBI GI NO: 30315255 NR Description: hydrogenosomal carrier protein
MKYVSPEVVVTPLPREGVVGLRDKGKKKVVKLKIKVGNHHLKRLISGAIAGAVSRTAVAPLETIRTHLMVGSNGNSTTEVFQSIMKHEGWTGLFRGNVVNVIRVAPSKAIELFAFDTANKFLTPKYGEKPKIPVPPSLVAGAFAGVSSTLCTYPLELIKTRLTIQRGVYDNFLDAFVKIIRDEGPSELYRGLTPSLIGVVPYAATNYFAYDSLKKVYKKMFKTNEIGSVPTLFIGSAAGAISSTATFPLEVARKHMQVGAVGGRKVYKNMLHALLSILEDEGVGGLYRGLGPSCMKLVPAAGISFMCYEACKKILIEEEDE

SEQ ID NO: 31448 - protein, 253 aa, Zea mays subsp. mays
  peptide (1)..(253): Ceres Seq. ID no. 12354298
  misc_feature (1)..(253): NCBI GI NO: 4138581 NR Description: mitochondrial energy transfer protein
  misc_feature (1)..(253): NCBI GI NO: 15236783 NR Description: mitochondrial carrier protein family
  misc_feature (1)..(253): NCBI GI NO: 231654 NR Description: Brittle-1 protein, chloroplast precursor
  misc_feature (1)..(247): NCBI GI NO: 20864410 NR Description: RIKEN cDNA 2900084M01 [Mus musculus]
  misc_feature (1)..(247): NCBI GI NO: 34877651 NR Description: similar to CG4241-PA [Rattus norvegicus]
  misc_feature (1)..(247): NCBI GI NO: 16549529 NR Description: unnamed protein product [Homo sapiens]
  misc_feature (1)..(245): NCBI GI NO: 6746567 NR Description: hydrogenosomal membrane protein 31 precursor
  misc_feature (1)..(247): NCBI GI NO: 15241360 NR Description: calcium-binding transporter-like protein
  misc_feature (1)..(247): NCBI GI NO: 29742699 NR Description: similar to CG4241-PA [Homo sapiens]
  misc_feature (1)..(245): NCBI GI NO: 30315255 NR Description: hydrogenosomal carrier protein
MVGSNGNSTTEVFQSIMKHEGWTGLFRGNVVNVIRVAPSKAIELFAFDTANKFLTPKYGEKPKIPVPPSLVAGAFAGVSSTLCTYPLELIKTRLTIQRGVYDNFLDAFVKIIRDEGPSELYRGLTPSLIGVVPYAATNYFAYDSLKKVYKKMFKTNEIGSVPTLFIGSAAGAISSTATFPLEVARKHMQVGAVGGRKVYKNMLHALLSILEDEGVGGLYRGLGPSCMKLVPAAGISFMCYEACKKILIEEEDE

SEQ ID NO: 31449 - DNA, 1413 bp, Zea mays subsp. mays
  misc_feature (1)..(1413): Ceres Seq. ID no. 12381429
acgactttatacatccgcttcctccagtcatcaaagaaacagagcgagcctagactgtgaggaagaaaggactaccatgggcgacgtcgctgccggcgctgccgccctgagtccacccccgatgaccaaggagaccaacctcttcatgcaaatcgtcggcaacccggacggcacggtcacgcgccccgaggtccccctcgtcccggcctcagccgaagccactggcggcgtcatctccagggacgtgcccctcgacgcctccgccggcacgtacctccgcctctacctgcccgacccatcctccgcgccagccgccaagcttcccgtcgtcctctacttccacggcggcggcttcgtgatcctctccgccgccaccgtattctaccacggccactgcgaggcgatggccgccgcggtgcccgccatcgtggcgtccctcgagtaccgcctcgcgccggagcaccgcctgcccgcggcctacgaggacgccgccgcggccgtggcgtggctccgcgacggcgcgccgggggacccctgggtcgcggcgcacggcgacctctcccgctgcttcctcatgggcagcagctcgggcggcaacatggctttcttcgcggcgctccggaccggaggcctcgacctgggccccgccacggtgcgcggcctcctgctgcaccagccctacctcggcggcgtcgaccggacgccctcggaggccaggtccgtcgacgacgccatgctgccgctggaggccaacgacaggctctggagcctcgcgctgcccgtgggcgccgaccgggaccacgagttctgcaaccccgtcaaggccatggcgccggaagcccttgccggcctgccgcgctgcctggtcaccgcaacttgggcgacccgctgatcgacaggcagcgggagttcgctcggtggctgcaggaccgcggcggcgcggaggcggaggtcgtcgtgaagttggacgtcgcggggttccacgcgtcggagctgttcgtgccggagatcgccgaggtgctgttcgccgcgatgcgcgagttcgtgtacaccggcgacgcttgacacgttgaatttcgtgccggccggtgacaagtggacatacgtgttgcatcgttgtggattgtgtgaccgtgcgcaataattctcggccgtgttgaatttgaatcttgacaaactggcaccagccaccaggcggcgactactatgtaacacgtgagcactgtagcagctaccgcaacgcacctgacgtccggacgtgtagttttcgcgacgcgtgcagctatcggccacggcaacgaaaataggagatgttttgttcggatttttttttggcccgcgaccattcacagcgctatctgaaactatcttcatcacatctcttatcaaatcatctatctcatcctctatttc

SEQ ID NO: 31450 - protein, 296 aa, Zea mays subsp. mays
  peptide (1)..(296): Ceres Seq. ID no. 12381430
  misc_feature (94)..(152): Pfam Name: Pfam Description:  Carboxylesterase
  misc_feature (37)..(279): NCBI GI NO: 18406834 NR Description: expressed protein; protein id: At2g45600
  misc_feature (37)..(279): NCBI GI NO: 21593183 NR Description: unknown [Arabidopsis thaliana]
  misc_feature (36)..(286): NCBI GI NO: 15241725 NR Description: putative protein; protein id: At5g62180.1
  misc_feature (48)..(290): NCBI GI NO: 5487873 NR Description: PrMC3 [Pinus radiata]
  misc_feature (37)..(289): NCBI GI NO: 15225521 NR Description: unknown protein; protein id: At2g45610.1
  misc_feature (39)..(272): NCBI GI NO: 8574455 NR Description: pepper esterase [Capsicum annuum]
  misc_feature (37)..(272): NCBI GI NO: 34899928 NR Description: OJ1714_H10.48
  misc_feature (56)..(292): NCBI GI NO: 34895936 NR Description: P0030H07.39
  misc_feature (34)..(291): NCBI GI NO: 34899924 NR Description: OJ1714_H10.46
  misc_feature (34)..(289): NCBI GI NO: 27819508 NR Description: putative esterase
RLYTSASSSHQRNRASLDCEEERTTMGDVAAGAAALSPPPMTKETNLFMQIVGNPDGTVTRPEVPLVPASAEATGGVISRDVPLDASAGTYLRLYLPDPSSAPAAKLPVVLYFHGGGFVILSAATVFYHGHCEAMAAAVPAIVASLEYRLAPEHRLPAAYEDAAAAVAWLRDGAPGDPWVAAHGDLSRCFLMGSSSGGNMAFFAALRTGGLDLGPATVRGLLLHQPYLGGVDRTPSEARSVDDAMLPLEANDRLWSLALPVGADRDHEFCNPVKAMAPEALAGLPRCLVTATWATR

SEQ ID NO: 31451 - protein, 271 aa, Zea mays subsp. mays
  peptide (1)..(271): Ceres Seq. ID no. 12381431
  misc_feature (69)..(127): Pfam Name: Pfam Description:  Carboxylesterase
  misc_feature (12)..(254): NCBI GI NO: 18406834 NR Description: expressed protein; protein id: At2g45600
  misc_feature (12)..(254): NCBI GI NO: 21593183 NR Description: unknown [Arabidopsis thaliana]
  misc_feature (11)..(261): NCBI GI NO: 15241725 NR Description: putative protein; protein id: At5g62180.1
  misc_feature (23)..(265): NCBI GI NO: 5487873 NR Description: PrMC3 [Pinus radiata]
  misc_feature (12)..(264): NCBI GI NO: 15225521 NR Description: unknown protein; protein id: At2g45610.1
  misc_feature (14)..(247): NCBI GI NO: 8574455 NR Description: pepper esterase [Capsicum annuum]
  misc_feature (12)..(247): NCBI GI NO: 34899928 NR Description: OJ1714_H10.48
  misc_feature (31)..(267): NCBI GI NO: 34895936 NR Description: P0030H07.39
  misc_feature (9)..(266): NCBI GI NO: 34899924 NR Description: OJ1714_H10.46
  misc_feature (9)..(264): NCBI GI NO: 27819508 NR Description: putative esterase
MGDVAAGAAALSPPPMTKETNLFMQIVGNPDGTVTRPEVPLVPASAEATGGVISRDVPLDASAGTYLRLYLPDPSSAPAAKLPVVLYFHGGGFVILSAATVFYHGHCEAMAAAVPAIVASLEYRLAPEHRLPAAYEDAAAAVAWLRDGAPGDPWVAAHGDLSRCFLMGSSSGGNMAFFAALRTGGLDLGPATVRGLLLHQPYLGGVDRTPSEARSVDDAMLPLEANDRLWSLALPVGADRDHEFCNPVKAMAPEALAGLPRCLVTATWATR

SEQ ID NO: 31452 - protein, 256 aa, Zea mays subsp. mays
  peptide (1)..(256): Ceres Seq. ID no. 12381432
  misc_feature (54)..(112): Pfam Name: Pfam Description:  Carboxylesterase
  misc_feature (1)..(239): NCBI GI NO: 18406834 NR Description: expressed protein; protein id: At2g45600
  misc_feature (1)..(239): NCBI GI NO: 21593183 NR Description: unknown [Arabidopsis thaliana]
  misc_feature (1)..(246): NCBI GI NO: 15241725 NR Description: putative protein; protein id: At5g62180.1
  misc_feature (8)..(250): NCBI GI NO: 5487873 NR Description: PrMC3 [Pinus radiata]
  misc_feature (1)..(249): NCBI GI NO: 15225521 NR Description: unknown protein; protein id: At2g45610.1
  misc_feature (1)..(232): NCBI GI NO: 8574455 NR Description: pepper esterase [Capsicum annuum]
  misc_feature (1)..(232): NCBI GI NO: 34899928 NR Description: OJ1714_H10.48
  misc_feature (16)..(252): NCBI GI NO: 34895936 NR Description: P0030H07.39
  misc_feature (1)..(251): NCBI GI NO: 34899924 NR Description: OJ1714_H10.46
  misc_feature (1)..(249): NCBI GI NO: 27819508 NR Description: putative esterase
MTKETNLFMQIVGNPDGTVTRPEVPLVPASAEATGGVISRDVPLDASAGTYLRLYLPDPSSAPAAKLPVVLYFHGGGFVILSAATVFYHGHCEAMAAAVPAIVASLEYRLAPEHRLPAAYEDAAAAVAWLRDGAPGDPWVAAHGDLSRCFLMGSSSGGNMAFFAALRTGGLDLGPATVRGLLLHQPYLGGVDRTPSEARSVDDAMLPLEANDRLWSLALPVGADRDHEFCNPVKAMAPEALAGLPRCLVTATWATR

SEQ ID NO: 31453 - DNA, 1736 bp, Zea mays subsp. mays
  misc_feature (1)..(1736): Ceres Seq. ID no. 12355141
aaaatggatatacttgaggctgcgcaaacagatatcagtgtctgacgcggccgcgggcatgtcagctgcatgcgctgcctcatggcagagcccgaccctggcggcgtgggacgccacgtccctcgcctcctccctgaaggcggcggccgcccgccgctccgcggcccacgtcggtccattgcacgccgtgctcctcaagctgggcctctccgcctccgccatccacgccacctccctggcgcacgtggctctgcgggccgggcttgcgcggtacgcgcgggagctgttcgacgagatgccccgcccggacgtggtctcttggacgtcactcgtcaccggccacgcgcaccaggggctacaccgcgattccctcgcgctgctccggcgcatggcgggttctggcgtccagcccaacggctactccttgtccggtgggctgctggcctgcgccggtgtcgggcagagcgcgcttgttcacgggaaggagatccatgccagcgtggtcaagatgagctcgcgtggactagtggacccggtcgtggagaacggggttcttggcatgtactcgaggtgcggaagcatggagtacgcgctgagagtgttcagggcgatgcctgtcaggaacatagttgcttggaactcgatgatggcagcgcttcttgggagcgggcaggccgaggacgcgctgaggctgttcgtttccatggtttcttctggcgtcggtgtggatggtttctcactctctatagccgtggatgcgtgcggggagctggcgctgctgaagcaggggatgcaggcgcacgcacaggttgctggcaatggattcgaggcagatgtcgtcgtcaggaactccttagtggacatgtacgccaagtgtggctgtgtcgattcggccgagctcgtcttcgaagcagtatcgtcaaacgacgctgttctttggaccacaatggtctcagcttacgggaagtctggccgtgcacaggacgccgtcagcttgtttgacaggatggcgcgcatggggatataacaagatggcatagcgtatcttgcggttctgtcagcttgtagccatggcggactcgtcagagaagcctggcactacttcagttcgatttctgatggttcgagctcggttgagatgcgagccgagcactacggatgcatggcggatctcctgtgcaggagaggttacctagaagaagctcttgagtttatcaagaacatgccgtttgactcgagcgtcgctgcctggagtgcgctgctcaactcatctcgaatacacgggaatgccaggctaagtcagttcgcagcttcctgtttgctcaagcttgaccctgagaaccacagcaactgggttgctctgtcaagtgtgcatgcatcagggaatgactggcacgagacctggacaatcagggagagcatgagcagagagtgtgtgaagaaagagcctgcgtgtagctgggttgagctgtgtgatggcgttcatgtttttgtaacggccgaccagtctcgtcctgaactgtttcaaatactgcagagtcttgattatttgaaggaggatacatcggtgatgccttggcaagtttcgtagaaaattctatgttttatattacagctttgtggtaggtggtttaaatctcactgcacagtgggcgattattctaatcaaaacaatcagttatgtaaagttgttgctcaatatactcgaatatgatgagttgatgactaattgtttg

SEQ ID NO: 31454 - protein, 341 aa, Zea mays subsp. mays
  peptide (1)..(341): Ceres Seq. ID no. 12355142
  misc_feature (11)..(341): NCBI GI NO: 37534806 NR Description: putative PPR-repeat containing protein
  misc_feature (55)..(341): NCBI GI NO: 15221566 NR Description: hypothetical protein; protein id: At1g68930.1
  misc_feature (40)..(341): NCBI GI NO: 38345824 NR Description: OSJNBa0070M12.7
  misc_feature (37)..(341): NCBI GI NO: 15234006 NR Description: putative protein; protein id: At4g18750.1
  misc_feature (85)..(341): NCBI GI NO: 21741755 NR Description: OSJNBa0060B20.9
  misc_feature (93)..(341): NCBI GI NO: 15229426 NR Description: hypothetical protein; protein id: At3g23330.1
  misc_feature (37)..(341): NCBI GI NO: 11994419 NR Description: selenium-binding protein-like
  misc_feature (37)..(341): NCBI GI NO: 15230593 NR Description: unknown protein; protein id: At3g12770.1
  misc_feature (27)..(341): NCBI GI NO: 15227724 NR Description: putative selenium-binding protein
  misc_feature (27)..(341): NCBI GI NO: 28392910 NR Description: putative selenium-binding protein
KWIYLRLRKQISVSDAAAGMSAACAASWQSPTLAAWDATSLASSLKAAAARRSAAHVGPLHAVLLKLGLSASAIHATSLAHVALRAGLARYARELFDEMPRPDVVSWTSLVTGHAHQGLHRDSLALLRRMAGSGVQPNGYSLSGGLLACAGVGQSALVHGKEIHASVVKMSSRGLVDPVVENGVLGMYSRCGSMEYALRVFRAMPVRNIVAWNSMMAALLGSGQAEDALRLFVSMVSSGVGVDGFSLSIAVDACGELALLKQGMQAHAQVAGNGFEADVVVRNSLVDMYAKCGCVDSAELVFEAVSSNDAVLWTTMVSAYGKSGRAQDAVSLFDRMARMGI

SEQ ID NO: 31455 - protein, 322 aa, Zea mays subsp. mays
  peptide (1)..(322): Ceres Seq. ID no. 12355143
  misc_feature (1)..(322): NCBI GI NO: 37534806 NR Description: putative PPR-repeat containing protein
  misc_feature (36)..(322): NCBI GI NO: 15221566 NR Description: hypothetical protein; protein id: At1g68930.1
  misc_feature (21)..(322): NCBI GI NO: 38345824 NR Description: OSJNBa0070M12.7
  misc_feature (18)..(322): NCBI GI NO: 15234006 NR Description: putative protein; protein id: At4g18750.1
  misc_feature (66)..(322): NCBI GI NO: 21741755 NR Description: OSJNBa0060B20.9
  misc_feature (74)..(322): NCBI GI NO: 15229426 NR Description: hypothetical protein; protein id: At3g23330.1
  misc_feature (18)..(322): NCBI GI NO: 11994419 NR Description: selenium-binding protein-like
  misc_feature (18)..(322): NCBI GI NO: 15230593 NR Description: unknown protein; protein id: At3g12770.1
  misc_feature (8)..(322): NCBI GI NO: 15227724 NR Description: putative selenium-binding protein
  misc_feature (8)..(322): NCBI GI NO: 28392910 NR Description: putative selenium-binding protein
MSAACAASWQSPTLAAWDATSLASSLKAAAARRSAAHVGPLHAVLLKLGLSASAIHATSLAHVALRAGLARYARELFDEMPRPDVVSWTSLVTGHAHQGLHRDSLALLRRMAGSGVQPNGYSLSGGLLACAGVGQSALVHGKEIHASVVKMSSRGLVDPVVENGVLGMYSRCGSMEYALRVFRAMPVRNIVAWNSMMAALLGSGQAEDALRLFVSMVSSGVGVDGFSLSIAVDACGELALLKQGMQAHAQVAGNGFEADVVVRNSLVDMYAKCGCVDSAELVFEAVSSNDAVLWTTMVSAYGKSGRAQDAVSLFDRMARMGI

SEQ ID NO: 31456 - protein, 310 aa, Zea mays subsp. mays
  peptide (1)..(310): Ceres Seq. ID no. 12355144
MRCLMAEPDPGGVGRHVPRLLPEGGGRPPLRGPRRSIARRAPQAGPLRLRHPRHLPGARGSAGRACAVRAGAVRRDAPPGRGLLDVTRHRPRAPGATPRFPRAAPAHGGFWRPAQRLLLVRWAAGLRRCRAERACSREGDPCQRGQDELAWTSGPGRGERGSWHVLEVRKHGVRAESVQGDACQEHSCLELDDGSASWERAGRGRAEAVRFHGFFWRRCGWFLTLYSRGCVRGAGAAEAGDAGARTGCWQWIRGRCRRQELLSGHVRQVWLCRFGRARLRSSIVKRRCSLDHNGLSLREVWPCTGRRQLV

SEQ ID NO: 31457 - DNA, 1147 bp, Zea mays subsp. mays
  misc_feature (1)..(1147): Ceres Seq. ID no. 12354206
atccatccatccacacacacaaacagacagacagacaagcatacaacaccgttgccatttagttgtgttcttgctaggcagttgcgcacttacattgagccgcagctagctgtctacggcacaactatctcctgcgcgcgtgctcgatctgaagctaggccagacctgagcctgtccaattttgccttgttctacccaccggtagtcgagaaggttccataagcgcaagcagacagcaaaagagctaaggggtctgagacaaggttcgaacagatggaggatgtggtgaagttcgtctttggagtttctggaaatgtcatcgctctcttcctcttcctgtccccagtgcctacgttctggaggatcatcaggaggaagtcgacggaggatttctcaggggtgccgtacagcatgacactcctcaactgcctcttgtcagcttggtacgggctgccgttcgtgtccccgaacaacatgctggtgtcgacgatcaacggcgcgggcgcggcgatcgaggccgtgtacgtggtgatcttcctggcgtcggcggtctcggcggcgttcgccgccgtggcgctggcgtcgatgctggcgctgcacggacagggccggaagctcatgtgcggcctcgccgccaccgtctgctccatctgcatgtacgcctcgccgctctccatcatgaggctggtggtgaagaccaagagcgtggagtacatgccgttcctgctgtcgctggccgtgttcctgtgcggcacgtcctggttcgtctacggcctgctcggccgggaccccttcgtcgcgattcccaacgggtgcgggagctttctgggcgcagtgcagctggtcttgtacgccatctaccgcgacagcaacagcggcggcaagcagcaggccggcgacgacgtggagatggcctccgacgccaagagcagcaagaaggtcgccgacgacgtcggcggcaaggaggaccgcctggtctagcatggagctagccactttctctttcggtgcgcgagcgtatgtttcctccccccgtgattgtgtgtgtgtgcatgtatacgagagtgcgtgctgtactgtactacctctgcgtgtgtgcaataatgtaactgggtgtttcatctcgcaatcgggtgtttttctctcc

SEQ ID NO: 31458 - protein, 235 aa, Zea mays subsp. mays
  peptide (1)..(235): Ceres Seq. ID no. 12354207
  misc_feature (115)..(198): Pfam Name: Pfam Description:  MtN3/saliva family
  misc_feature (1)..(232): NCBI GI NO: 34907420 NR Description: P0018C10.36
  misc_feature (3)..(232): NCBI GI NO: 18394992 NR Description: expressed protein; protein id: At1g21460
  misc_feature (47)..(232): NCBI GI NO: 25518644 NR Description: hypothetical protein F24J8
  misc_feature (3)..(229): NCBI GI NO: 34912462 NR Description: MtN3-like protein
  misc_feature (3)..(229): NCBI GI NO: 34912454 NR Description: P0681B11.31
  misc_feature (3)..(199): NCBI GI NO: 18413388 NR Description: putative protein; protein id: At4g10850
  misc_feature (1)..(224): NCBI GI NO: 15219732 NR Description: hypothetical protein; protein id: At1g66770.1
  misc_feature (4)..(228): NCBI GI NO: 21592355 NR Description: contains similarity to nodulin MtN3 protein
  misc_feature (1)..(199): NCBI GI NO: 18400517 NR Description: expressed protein; protein id: At3g14770
  misc_feature (4)..(228): NCBI GI NO: 18405611 NR Description: Expressed protein; protein id: At3g28007
MEDVVKFVFGVSGNVIALFLFLSPVPTFWRIIRRKSTEDFSGVPYSMTLLNCLLSAWYGLPFVSPNNMLVSTINGAGAAIEAVYVVIFLASAVSAAFAAVALASMLALHGQGRKLMCGLAATVCSICMYASPLSIMRLVVKTKSVEYMPFLLSLAVFLCGTSWFVYGLLGRDPFVAIPNGCGSFLGAVQLVLYAIYRDSNSGGKQQAGDDVEMASDAKSSKKVADDVGGKEDRLV

SEQ ID NO: 31459 - protein, 189 aa, Zea mays subsp. mays
  peptide (1)..(189): Ceres Seq. ID no. 12354208
  misc_feature (69)..(152): Pfam Name: Pfam Description:  MtN3/saliva family
  misc_feature (1)..(186): NCBI GI NO: 34907420 NR Description: P0018C10.36
  misc_feature (1)..(186): NCBI GI NO: 18394992 NR Description: expressed protein; protein id: At1g21460
  misc_feature (1)..(186): NCBI GI NO: 25518644 NR Description: hypothetical protein F24J8
  misc_feature (1)..(183): NCBI GI NO: 34912462 NR Description: MtN3-like protein
  misc_feature (1)..(183): NCBI GI NO: 34912454 NR Description: P0681B11.31
  misc_feature (1)..(153): NCBI GI NO: 18413388 NR Description: putative protein; protein id: At4g10850
  misc_feature (1)..(178): NCBI GI NO: 15219732 NR Description: hypothetical protein; protein id: At1g66770.1
  misc_feature (1)..(182): NCBI GI NO: 21592355 NR Description: contains similarity to nodulin MtN3 protein
  misc_feature (1)..(153): NCBI GI NO: 18400517 NR Description: expressed protein; protein id: At3g14770
  misc_feature (1)..(182): NCBI GI NO: 18405611 NR Description: Expressed protein; protein id: At3g28007
MTLLNCLLSAWYGLPFVSPNNMLVSTINGAGAAIEAVYVVIFLASAVSAAFAAVALASMLALHGQGRKLMCGLAATVCSICMYASPLSIMRLVVKTKSVEYMPFLLSLAVFLCGTSWFVYGLLGRDPFVAIPNGCGSFLGAVQLVLYAIYRDSNSGGKQQAGDDVEMASDAKSSKKVADDVGGKEDRLV

SEQ ID NO: 31460 - protein, 168 aa, Zea mays subsp. mays
  peptide (1)..(168): Ceres Seq. ID no. 12354209
  misc_feature (48)..(131): Pfam Name: Pfam Description:  MtN3/saliva family
  misc_feature (1)..(165): NCBI GI NO: 34907420 NR Description: P0018C10.36
  misc_feature (1)..(165): NCBI GI NO: 18394992 NR Description: expressed protein; protein id: At1g21460
  misc_feature (1)..(165): NCBI GI NO: 25518644 NR Description: hypothetical protein F24J8
  misc_feature (1)..(162): NCBI GI NO: 34912462 NR Description: MtN3-like protein
  misc_feature (1)..(162): NCBI GI NO: 34912454 NR Description: P0681B11.31
  misc_feature (1)..(132): NCBI GI NO: 18413388 NR Description: putative protein; protein id: At4g10850
  misc_feature (1)..(157): NCBI GI NO: 15219732 NR Description: hypothetical protein; protein id: At1g66770.1
  misc_feature (1)..(161): NCBI GI NO: 21592355 NR Description: contains similarity to nodulin MtN3 protein
  misc_feature (1)..(132): NCBI GI NO: 18400517 NR Description: expressed protein; protein id: At3g14770
  misc_feature (1)..(161): NCBI GI NO: 18405611 NR Description: Expressed protein; protein id: At3g28007
MLVSTINGAGAAIEAVYVVIFLASAVSAAFAAVALASMLALHGQGRKLMCGLAATVCSICMYASPLSIMRLVVKTKSVEYMPFLLSLAVFLCGTSWFVYGLLGRDPFVAIPNGCGSFLGAVQLVLYAIYRDSNSGGKQQAGDDVEMASDAKSSKKVADDVGGKEDRLV

SEQ ID NO: 31461 - DNA, 1068 bp, Zea mays subsp. mays
  misc_feature (1)..(1068): Ceres Seq. ID no. 12578882
acacggcagccggattccgaagcgcaccccctcggccccagccaaaagcatcgcagtttctaatcgtttggagagcacacaagaatgtcgttcgtgcagctctctggtgctggagtcgctgcagtggccttcacgaacaagagcctagtctctcggcacgcagcgctacgggtctgctcgtcgaggcgctcgatccgtagcctggtcgttaaggctgcaactgtcgtcaccccaaagtacacttcactgaagcctctgggagatagggtgcttgtgaagcttggtgccgcagaggagaagacagttggtggcattttgcttccatctactgcccagactaaaccacaaggaggtgaggttgttgctgttggagcaggaaggaccatcggggacaagaaaatagctgtggatatagagactggagcacaagtagtatactcaaagtatgctgggactgaggttgaattcaatgactcaaagcatcttattctcaaagaagacgatatcattggtattcttgagacagatgatgtgaaggacatgaagcctctcaatgaccgtgttctcatcaaggttgcagaagccgaagacaaaactcctgggggccttatcctcactgaaacaactaaagagaagccgtccataggaacggttgtagctgttggcccgggtcctctggacgaggaaggcaagagacagccactgtcagtgtcggcgggcagcacagtgctgtactccaagtatgcagggagtgagttcaagggcgcggatggcacggcctacattgtgttgagagcgtcggatgtgatggctgtcctgtcttgagcatttcgtttccggctcgttaatgtagtttgcagccaatagtttgtcatgtggtatgaaacgatcgctttgtggtggtcatcacaccatgctggtgatcatcacaacatatgctgatactgttccggacaatcggctagaatttgttgtgtggcaggtataaacgtcagcatctgatagtgagagcactcggttacttctacagatggtatttaaggggtgatagtcacgcctctttgctgg

SEQ ID NO: 31462 - protein, 246 aa, Zea mays subsp. mays; identical to SEQ ID NO: 28105
  peptide (1)..(246): Ceres Seq. ID no. 12578883
  misc_feature (151)..(246): Pfam Name: Pfam Description:  Chaperonin 10 Kd subunit
  misc_feature (4)..(246): NCBI GI NO: 15242045 NR Description: chloroplast Cpn21 protein; protein id: At5g20720
  misc_feature (1)..(246): NCBI GI NO: 7331143 NR Description: chaperonin 21 precursor [Lycopersicon esculentum]
  misc_feature (4)..(246): NCBI GI NO: 25453528 NR Description: chaperonin 10 [imported] - Arabidopsis thaliana
  misc_feature (2)..(246): NCBI GI NO: 21780187 NR Description: cp10-like protein [Gossypium hirsutum]
  misc_feature (35)..(246): NCBI GI NO: 399241 NR Description: 20 kDa chaperonin, chloroplast precursor
  misc_feature (150)..(245): NCBI GI NO: 22297730 NR Description: 10kD chaperonin
  misc_feature (152)..(246): NCBI GI NO: 3599923 NR Description: GroES/HSP10 homolog [Lawsonia intracellularis]
  misc_feature (55)..(146): NCBI GI NO: 2493659 NR Description: 10 kDa chaperonin (Protein Cpn10) (groES protein)
  misc_feature (55)..(146): NCBI GI NO: 20807075 NR Description: Co-chaperonin GroES (HSP10)
  misc_feature (54)..(145): NCBI GI NO: 23113174 NR Description: hypothetical protein

SEQ ID NO: 31463 - DNA, 449 bp, Zea mays subsp. mays; identical to SEQ ID NO: 25795
  misc_feature (1)..(449): Ceres Seq. ID no. 12595631
  misc_feature (315)..(315): n is a, c, t, g, unknown, or other
  misc_feature (349)..(349): n is a, c, t, g, unknown, or other
  misc_feature (298)..(298): n is a, c, t, g, unknown, or other

SEQ ID NO: 31464 - protein, 124 aa, Zea mays subsp. mays; identical to SEQ ID NO: 25796
  peptide (1)..(124): Ceres Seq. ID no. 12595632
  misc_feature (100)..(100): Xaa is any aa, unknown or other
  misc_feature (105)..(105): Xaa is any aa, unknown or other
  misc_feature (117)..(117): Xaa is any aa, unknown or other

SEQ ID NO: 31465 - protein, 106 aa, Zea mays subsp. mays; identical to SEQ ID NO: 25797
  peptide (1)..(106): Ceres Seq. ID no. 12595633
  misc_feature (5)..(106): NCBI GI NO: 27573361 NR Description: unknown protein
  misc_feature (34)..(106): NCBI GI NO: 18410491 NR Description: expressed protein; protein id: At1g73940
  misc_feature (40)..(106): NCBI GI NO: 15239880 NR Description: putative protein; protein id: At5g49410
  misc_feature (40)..(106): NCBI GI NO: 21594042 NR Description: unknown [Arabidopsis thaliana]
  misc_feature (34)..(106): NCBI GI NO: 38637563 NR Description: unknown protein
  misc_feature (99)..(99): Xaa is any aa, unknown or other
  misc_feature (105)..(105): Xaa is any aa, unknown or other

SEQ ID NO: 31466 - protein, 102 aa, Zea mays subsp. mays; identical to SEQ ID NO: 25798
  peptide (1)..(102): Ceres Seq. ID no. 12595634
  misc_feature (1)..(102): NCBI GI NO: 27573361 NR Description: unknown protein
  misc_feature (30)..(102): NCBI GI NO: 18410491 NR Description: expressed protein; protein id: At1g73940
  misc_feature (36)..(102): NCBI GI NO: 15239880 NR Description: putative protein; protein id: At5g49410
  misc_feature (36)..(102): NCBI GI NO: 21594042 NR Description: unknown [Arabidopsis thaliana]
  misc_feature (30)..(102): NCBI GI NO: 38637563 NR Description: unknown protein
  misc_feature (95)..(95): Xaa is any aa, unknown or other
  misc_feature (101)..(101): Xaa is any aa, unknown or other

SEQ ID NO: 31467 - DNA, 1722 bp, Zea mays subsp. mays
  misc_feature (1)..(1722): Ceres Seq. ID no. 12367714
cgttgtatgatgatgatgacgagggaaccaaaaaagaagaagaaagaattccaaaaccctccctctcctgttctgtatcttctgcggctccgccgtggattcttcgtgcgataaactaagcagggcgctgcacgaggatggggtgcggggcgtcgagccagaaggacgccggggcgccgcggaggcggccggtgagcgtcggcgacgtggtcgtcttcctcccgggcctccgcgtgccgagggccgtcgacttggcccaggcgctcggcggctgcctggccaggagcgccgtggaccggctgtcggctctgcgatcgcgggtcgtcgagatggcaatgcgagagtcggcggcggcgctcaagcccaggcggagggcggcggcacggcacgggtctagtacagccaatcttctacaggccctcgaagactacttgccggctctgctaggactggtaaaagaaggtagcgtcttgaggaacaaagtgcacttcacctggagtaaccaggaggataatgctgaggagacggccatgccagacgcctggtacgaggtgctgtccatgctgcatctgatggccatggtctgcctgctgcaggccaacgccctgcttctcccgaggtcatacggcgatggctatgccccaagggtttctgaagagagtcgacgggccactgttgatgtcttcttgaaggcagctggatacctagactgtgcagttcggcatgtactcccgaagatgccactcgagctaaggagacagcttccagtagacctggctgaaggaaatctcaaagctctaagcctccaagccctgggtcagggggttgacatgcagcttggtttggctattgatagtccaaaggccactttagcagtaaaacggcgcttagcctgtgagatggtcaaatattggcaacaagttcaagagagcattccagagcttcctatctctgatggatggggtaaaaagcaccggctgtttataaagtggaaatatgttgaagctaaggctgcagcatactatttccacggtttgattcttgacgagggaaataccgaaaaatcccatggaatggcaatagctgcactccaagcttcagaggaatttctaaaagaaagcaaaagggtttcagaagccttccatgcaactcctccaacatcgaggagtcccaatccattcggaacagcaaaatatctgtttgacaagatcccaagagatgcttccagcaaggttcgaatcaaccaggacctgtatactcaagaaaaggtcattggagcgccacccccattaccagattttgcattggcgctaacacctgaagaatatgatcttcctccactagatccactttggaacaaagaagacacaagccattaagtgtatatgcagcagaatggttgcttctggcaaaaatattggctctggagagaaaggaaggaccaagatctgccatgtcaagagctgatgtgtaatgaatgaagtgtacaaagtattttcaaacaaaaatacatgttcacaaatttacgcaaggcctgaagacaatctgaagagctttgtacaggcgattcttcttctgacaagggaaatgctatgtcaaagggttccttgatcattgtgcatcttgatgcttgcattttgtcaaaaacagattttcagcaatttatgtagaactgtaaactagcctctgatcgaaagtggcagccttcaaattttttttttc

SEQ ID NO: 31468 - protein, 413 aa, Zea mays subsp. mays
  peptide (1)..(413): Ceres Seq. ID no. 12367715
  misc_feature (1)..(411): NCBI GI NO: 38344447 NR Description: OSJNBa0038O10.19
  misc_feature (1)..(408): NCBI GI NO: 15219459 NR Description: hypothetical protein; protein id: At1g73390
  misc_feature (1)..(400): NCBI GI NO: 25372891 NR Description: protein F2H15.16 [imported] - Arabidopsis thaliana
  misc_feature (1)..(400): NCBI GI NO: 15220908 NR Description: hypothetical protein; protein id: At1g17940.1
  misc_feature (1)..(403): NCBI GI NO: 30684716 NR Description: expressed protein [Arabidopsis thaliana]
MGCGASSQKDAGAPRRRPVSVGDVVVFLPGLRVPRAVDLAQALGGCLARSAVDRLSALRSRVVEMAMRESAAALKPRRRAAARHGSSTANLLQALEDYLPALLGLVKEGSVLRNKVHFTWSNQEDNAEETAMPDAWYEVLSMLHLMAMVCLLQANALLLPRSYGDGYAPRVSEESRRATVDVFLKAAGYLDCAVRHVLPKMPLELRRQLPVDLAEGNLKALSLQALGQGVDMQLGLAIDSPKATLAVKRRLACEMVKYWQQVQESIPELPISDGWGKKHRLFIKWKYVEAKAAAYYFHGLILDEGNTEKSHGMAIAALQASEEFLKESKRVSEAFHATPPTSRSPNPFGTAKYLFDKIPRDASSKVRINQDLYTQEKVIGAPPPLPDFALALTPEEYDLPPLDPLWNKEDTSH

SEQ ID NO: 31469 - protein, 349 aa, Zea mays subsp. mays
  peptide (1)..(349): Ceres Seq. ID no. 12367716
  misc_feature (1)..(347): NCBI GI NO: 38344447 NR Description: OSJNBa0038O10.19
  misc_feature (1)..(344): NCBI GI NO: 15219459 NR Description: hypothetical protein; protein id: At1g73390
  misc_feature (1)..(336): NCBI GI NO: 25372891 NR Description: protein F2H15.16 [imported] - Arabidopsis thaliana
  misc_feature (1)..(336): NCBI GI NO: 15220908 NR Description: hypothetical protein; protein id: At1g17940.1
  misc_feature (1)..(339): NCBI GI NO: 30684716 NR Description: expressed protein [Arabidopsis thaliana]
MAMRESAAALKPRRRAAARHGSSTANLLQALEDYLPALLGLVKEGSVLRNKVHFTWSNQEDNAEETAMPDAWYEVLSMLHLMAMVCLLQANALLLPRSYGDGYAPRVSEESRRATVDVFLKAAGYLDCAVRHVLPKMPLELRRQLPVDLAEGNLKALSLQALGQGVDMQLGLAIDSPKATLAVKRRLACEMVKYWQQVQESIPELPISDGWGKKHRLFIKWKYVEAKAAAYYFHGLILDEGNTEKSHGMAIAALQASEEFLKESKRVSEAFHATPPTSRSPNPFGTAKYLFDKIPRDASSKVRINQDLYTQEKVIGAPPPLPDFALALTPEEYDLPPLDPLWNKEDTSH

SEQ ID NO: 31470 - protein, 347 aa, Zea mays subsp. mays
  peptide (1)..(347): Ceres Seq. ID no. 12367717
  misc_feature (1)..(345): NCBI GI NO: 38344447 NR Description: OSJNBa0038O10.19
  misc_feature (1)..(342): NCBI GI NO: 15219459 NR Description: hypothetical protein; protein id: At1g73390
  misc_feature (1)..(334): NCBI GI NO: 25372891 NR Description: protein F2H15.16 [imported] - Arabidopsis thaliana
  misc_feature (1)..(334): NCBI GI NO: 15220908 NR Description: hypothetical protein; protein id: At1g17940.1
  misc_feature (1)..(337): NCBI GI NO: 30684716 NR Description: expressed protein [Arabidopsis thaliana]
MRESAAALKPRRRAAARHGSSTANLLQALEDYLPALLGLVKEGSVLRNKVHFTWSNQEDNAEETAMPDAWYEVLSMLHLMAMVCLLQANALLLPRSYGDGYAPRVSEESRRATVDVFLKAAGYLDCAVRHVLPKMPLELRRQLPVDLAEGNLKALSLQALGQGVDMQLGLAIDSPKATLAVKRRLACEMVKYWQQVQESIPELPISDGWGKKHRLFIKWKYVEAKAAAYYFHGLILDEGNTEKSHGMAIAALQASEEFLKESKRVSEAFHATPPTSRSPNPFGTAKYLFDKIPRDASSKVRINQDLYTQEKVIGAPPPLPDFALALTPEEYDLPPLDPLWNKEDTSH

SEQ ID NO: 31471 - DNA, 1322 bp, Zea mays subsp. mays
  misc_feature (1)..(1322): Ceres Seq. ID no. 12350141
aaaaaatttgcgacaattcacctgcatacaggggcagcatatctagcagctactccgcccccaaatgctcgccggcatatcccgtttcctcactcgccgccgccgcccgccctttccgcttgccgctaccgccgctgcagcagccatgtcgtcgtcgtcgtccacggcagcgaacatctccgagcgtccgatctctccggacaccacccgcgtggcctgggtggggacgggcgtcatgggccagtcaatggccggccacctcctcgccgccggctacgctctcaccgtattcaaccggacggcatccaagacccagggcctcgtctcccgcggcgccagcctcgcggacagcccgcgcgcggccgccgcggctgccgatgtcatcttcctcatggtcggcttcccctccgacgtccgctccaccgccctcgatccatccacaggcgccctctctggcctcaccccaggcggtatcctagtcgacatgaccacctccgaccccaccctcgccgccgagatagccgcggccgcggccgccgccggctgctcggccgtcgacgcccccgtctccggcggtgaccgaggggcccgcaacgccaccctctccatcttcgctggcggcgacgccgccgtcgttgctcgcctggcgccgctcttcaagctcatgggaaacgcgctgtacatgggcgggcccggcgcggggcagcgcgcgaagctgggcaaccagatcgccatcgcatccaccatggtagggctcgtggagggcatggtgtacgcgcacaaggccgggctggacgtggccaagtggctggaggccatctccaccggcgcagccgggtccaagtcgctggaactgtatgggaagcggatcctggagagggatatggcggctggcttctatgtccggcacttcgtcaaggacctcggtatctgcctgttggaatgccaggccatggggctgtcgctgccggggctcgccctcgcgcaacagctgtacgtgtcgctgatcgcgcacggcgagggcgggctcggtacacaggcgcttatactggccgtcgagcggctgaacaacaccagcctcgagaagaaggacgaatgaaaggccccaggctctagctttgatgaacttgtgggaagctttgcttggtgccttggtgcaagtatgcaagatcgaggtgactgttaagttgtctttcagagttctacagttgttcacttttgtagtagtatatatgttatgcacttgtgcaaaaaattgtgctggcttggatgattgcttagctctacctgtttacatccgccaccggttcaaataagatttt

SEQ ID NO: 31472 - protein, 344 aa, Zea mays subsp. mays
  peptide (1)..(344): Ceres Seq. ID no. 12350142
  misc_feature (47)..(210): Pfam Name: Pfam Description:  NAD binding domain of 6-phosphogluconate dehydrogenase
  misc_feature (30)..(344): NCBI GI NO: 34909392 NR Description: putative dehydrogenase
  misc_feature (13)..(343): NCBI GI NO: 15233455 NR Description: putative protein; protein id: At4g29120
  misc_feature (49)..(342): NCBI GI NO: 32472744 NR Description: 3-hydroxyisobutyrate dehydrogenase [Pirellula sp.]
  misc_feature (43)..(338): NCBI GI NO: 18409781 NR Description: putative dehydrogenase; protein id: At1g71180
  misc_feature (43)..(338): NCBI GI NO: 25283629 NR Description: probable dehydrogenase F23N20.17
  misc_feature (43)..(338): NCBI GI NO: 30698779 NR Description: dehydrogenase -related [Arabidopsis thaliana]
  misc_feature (48)..(328): NCBI GI NO: 15674197 NR Description: 3-hydroxyisobutyrate dehydrogenase (EC 1.1.1.31)
  misc_feature (49)..(328): NCBI GI NO: 16800073 NR Description: similar to 3-hydroxyisobutyrate dehydrogenase (B
  misc_feature (43)..(331): NCBI GI NO: 23098036 NR Description: 3-hydroxyisobutyrate dehydrogenase
  misc_feature (49)..(328): NCBI GI NO: 16803045 NR Description: similar to 3-hydroxyisobutyrate dehydrogenase (B
MLAGISRFLTRRRRPPFPLAATAAAAAMSSSSSTAANISERPISPDTTRVAWVGTGVMGQSMAGHLLAAGYALTVFNRTASKTQGLVSRGASLADSPRAAAAAADVIFLMVGFPSDVRSTALDPSTGALSGLTPGGILVDMTTSDPTLAAEIAAAAAAAGCSAVDAPVSGGDRGARNATLSIFAGGDAAVVARLAPLFKLMGNALYMGGPGAGQRAKLGNQIAIASTMVGLVEGMVYAHKAGLDVAKWLEAISTGAAGSKSLELYGKRILERDMAAGFYVRHFVKDLGICLLECQAMGLSLPGLALAQQLYVSLIAHGEGGLGTQALILAVERLNNTSLEKKDE

SEQ ID NO: 31473 - protein, 317 aa, Zea mays subsp. mays
  peptide (1)..(317): Ceres Seq. ID no. 12350143
  misc_feature (20)..(183): Pfam Name: Pfam Description:  NAD binding domain of 6-phosphogluconate dehydrogenase
  misc_feature (3)..(317): NCBI GI NO: 34909392 NR Description: putative dehydrogenase
  misc_feature (1)..(316): NCBI GI NO: 15233455 NR Description: putative protein; protein id: At4g29120
  misc_feature (22)..(315): NCBI GI NO: 32472744 NR Description: 3-hydroxyisobutyrate dehydrogenase [Pirellula sp.]
  misc_feature (16)..(311): NCBI GI NO: 18409781 NR Description: putative dehydrogenase; protein id: At1g71180
  misc_feature (16)..(311): NCBI GI NO: 25283629 NR Description: probable dehydrogenase F23N20.17
  misc_feature (16)..(311): NCBI GI NO: 30698779 NR Description: dehydrogenase -related [Arabidopsis thaliana]
  misc_feature (21)..(301): NCBI GI NO: 15674197 NR Description: 3-hydroxyisobutyrate dehydrogenase (EC 1.1.1.31)
  misc_feature (22)..(301): NCBI GI NO: 16800073 NR Description: similar to 3-hydroxyisobutyrate dehydrogenase (B
  misc_feature (16)..(304): NCBI GI NO: 23098036 NR Description: 3-hydroxyisobutyrate dehydrogenase
  misc_feature (22)..(301): NCBI GI NO: 16803045 NR Description: similar to 3-hydroxyisobutyrate dehydrogenase (B
MSSSSSTAANISERPISPDTTRVAWVGTGVMGQSMAGHLLAAGYALTVFNRTASKTQGLVSRGASLADSPRAAAAAADVIFLMVGFPSDVRSTALDPSTGALSGLTPGGILVDMTTSDPTLAAEIAAAAAAAGCSAVDAPVSGGDRGARNATLSIFAGGDAAVVARLAPLFKLMGNALYMGGPGAGQRAKLGNQIAIASTMVGLVEGMVYAHKAGLDVAKWLEAISTGAAGSKSLELYGKRILERDMAAGFYVRHFVKDLGICLLECQAMGLSLPGLALAQQLYVSLIAHGEGGLGTQALILAVERLNNTSLEKKDE

SEQ ID NO: 31474 - protein, 287 aa, Zea mays subsp. mays
  peptide (1)..(287): Ceres Seq. ID no. 12350144
  misc_feature (1)..(153): Pfam Name: Pfam Description:  NAD binding domain of 6-phosphogluconate dehydrogenase
  misc_feature (1)..(287): NCBI GI NO: 34909392 NR Description: putative dehydrogenase
  misc_feature (1)..(286): NCBI GI NO: 15233455 NR Description: putative protein; protein id: At4g29120
  misc_feature (1)..(285): NCBI GI NO: 32472744 NR Description: 3-hydroxyisobutyrate dehydrogenase [Pirellula sp.]
  misc_feature (1)..(281): NCBI GI NO: 18409781 NR Description: putative dehydrogenase; protein id: At1g71180
  misc_feature (1)..(281): NCBI GI NO: 25283629 NR Description: probable dehydrogenase F23N20.17
  misc_feature (1)..(281): NCBI GI NO: 30698779 NR Description: dehydrogenase -related [Arabidopsis thaliana]
  misc_feature (1)..(271): NCBI GI NO: 15674197 NR Description: 3-hydroxyisobutyrate dehydrogenase (EC 1.1.1.31)
  misc_feature (1)..(271): NCBI GI NO: 16800073 NR Description: similar to 3-hydroxyisobutyrate dehydrogenase (B
  misc_feature (1)..(274): NCBI GI NO: 23098036 NR Description: 3-hydroxyisobutyrate dehydrogenase
  misc_feature (1)..(271): NCBI GI NO: 16803045 NR Description: similar to 3-hydroxyisobutyrate dehydrogenase (B
MGQSMAGHLLAAGYALTVFNRTASKTQGLVSRGASLADSPRAAAAAADVIFLMVGFPSDVRSTALDPSTGALSGLTPGGILVDMTTSDPTLAAEIAAAAAAAGCSAVDAPVSGGDRGARNATLSIFAGGDAAVVARLAPLFKLMGNALYMGGPGAGQRAKLGNQIAIASTMVGLVEGMVYAHKAGLDVAKWLEAISTGAAGSKSLELYGKRILERDMAAGFYVRHFVKDLGICLLECQAMGLSLPGLALAQQLYVSLIAHGEGGLGTQALILAVERLNNTSLEKKDE

SEQ ID NO: 31475 - DNA, 1217 bp, Zea mays subsp. mays
  misc_feature (1)..(1217): Ceres Seq. ID no. 13499227
  misc_feature (862)..(862): n is a, c, t, g, unknown, or other
  misc_feature (563)..(563): n is a, c, t, g, unknown, or other
  misc_feature (368)..(368): n is a, c, t, g, unknown, or other
  misc_feature (745)..(745): n is a, c, t, g, unknown, or other
  misc_feature (382)..(382): n is a, c, t, g, unknown, or other
gacaaacggattgacaccgacacataaaaaacacctttttagacatttctcgagaccaccactactcgtgcccgtgcggtggttcgaccagatccatctcacacccttatcctctttacgcctcaccactacagagaaaaagagaaacctgcgagcgacggggactatggccgccacccgcaccgccctggccctgctagggcacgagggcatggaatctgggcccaggccggcggcgccgcgccgcagcaggctacgcgtcgtcgccgtcgcgctgcggaccaggcccaccagcctcgcggccccgggtctcccgcccgcggcgccggagcccgtgctgccgtcgccgcccgtggccgcgggcgccncggcggtgctgctngaggcgggcgtgccgcccgccgacctccggcgcgcggcggggatgtgcccggagctgctgtccgtgtccgcggaggccgtcgaggccgcgctccggttcctcacggaggaggcgggcgtcgccgaggccgacctcccgcgcgtgctccggcggcgcccgcgcctgctcgtctctcccgtgncggcgcggctgcggcccacgctctacttcctgcgcgcgctcggcgtgcccgacctgcaccgccgcgccgacctgctatccttctccgtggagggcaagctgctgccgcggctcgagttcctcgagtcgctgggcctgccggcgcgcgccgcccgctccatggcgcgccgcttccccgcgctnttcggctacggcgtggaggggaacatgcggcccaaggcggactacctcctgggcgccatggcccgccgcgccgacgagctgtacgacttccccgagtacttctcctacgcgctggcnacgcgcatcgtgccgcgttacgaggcctgcgccgcgcgcggggtcagcaggctgccactgcccgccatgtccgccccggggacgccaagttccgcgccactctcgccagctgtgtcgggtccatgctgccccggaggcggtcggcgctgtggcacgccaagtgggtggatgacgacgcggcggcggcggcgaaggagaccacggtgtgacgtgcgcattggtagcgagcgagaggctcttgcctcttggtggtgtaacatatgtccataaggatcggcattggctgcttgtaaagtatgatagccatgatgaattatctagttggtcctcccagtgaacaatggcactgttggct

SEQ ID NO: 31476 - protein, 376 aa, Zea mays subsp. mays
  peptide (1)..(376): Ceres Seq. ID no. 13499228
  misc_feature (135)..(310): Pfam Name: Pfam Description:  mTERF
  misc_feature (135)..(310): NCBI GI NO: 21537209 NR Description: unknown [Arabidopsis thaliana]
  misc_feature (135)..(310): NCBI GI NO: 30686631 NR Description: expressed protein [Arabidopsis thaliana]
  misc_feature (135)..(310): NCBI GI NO: 30686636 NR Description: expressed protein [Arabidopsis thaliana]
  misc_feature (111)..(310): NCBI GI NO: 15226787 NR Description: expressed protein [Arabidopsis thaliana]
  misc_feature (111)..(310): NCBI GI NO: 28392870 NR Description: unknown protein [Arabidopsis thaliana]
  misc_feature (73)..(310): NCBI GI NO: 15230219 NR Description: hypothetical protein [Arabidopsis thaliana]
  misc_feature (111)..(310): NCBI GI NO: 15227524 NR Description: hypothetical protein [Arabidopsis thaliana]
  misc_feature (111)..(310): NCBI GI NO: 28204784 NR Description: hypothetical protein [Arabidopsis thaliana]
  misc_feature (124)..(311): NCBI GI NO: 27817836 NR Description: OJ1127_E01.4
  misc_feature (130)..(302): NCBI GI NO: 33589698 NR Description: At1g78930 [Arabidopsis thaliana]
  misc_feature (123)..(123): Xaa is any aa, unknown or other
  misc_feature (127)..(127): Xaa is any aa, unknown or other
  misc_feature (188)..(188): Xaa is any aa, unknown or other
  misc_feature (248)..(248): Xaa is any aa, unknown or other
  misc_feature (287)..(287): Xaa is any aa, unknown or other
TNGLTPTHKKHLFRHFSRPPLLVPVRWFDQIHLTPLSSLRLTTTEKKRNLRATGTMAATRTALALLGHEGMESGPRPAAPRRSRLRVVAVALRTRPTSLAAPGLPPAAPEPVLPSPPVAAGAXAVLXEAGVPPADLRRAAGMCPELLSVSAEAVEAALRFLTEEAGVAEADLPRVLRRRPRLLVSPVXARLRPTLYFLRALGVPDLHRRADLLSFSVEGKLLPRLEFLESLGLPARAARSMARRFPAXFGYGVEGNMRPKADYLLGAMARRADELYDFPEYFSYALXTRIVPRYEACAARGVSRLPLPAMSAPGTPSSAPLSPAVSGPCCPGGGRRCGTPSGWMTTRRRRRRRPRCDVRIGSEREALASWWCNICP

SEQ ID NO: 31477 - protein, 321 aa, Zea mays subsp. mays
  peptide (1)..(321): Ceres Seq. ID no. 13499229
  misc_feature (80)..(255): Pfam Name: Pfam Description:  mTERF
  misc_feature (80)..(255): NCBI GI NO: 21537209 NR Description: unknown [Arabidopsis thaliana]
  misc_feature (80)..(255): NCBI GI NO: 30686631 NR Description: expressed protein [Arabidopsis thaliana]
  misc_feature (80)..(255): NCBI GI NO: 30686636 NR Description: expressed protein [Arabidopsis thaliana]
  misc_feature (56)..(255): NCBI GI NO: 15226787 NR Description: expressed protein [Arabidopsis thaliana]
  misc_feature (56)..(255): NCBI GI NO: 28392870 NR Description: unknown protein [Arabidopsis thaliana]
  misc_feature (18)..(255): NCBI GI NO: 15230219 NR Description: hypothetical protein [Arabidopsis thaliana]
  misc_feature (56)..(255): NCBI GI NO: 15227524 NR Description: hypothetical protein [Arabidopsis thaliana]
  misc_feature (56)..(255): NCBI GI NO: 28204784 NR Description: hypothetical protein [Arabidopsis thaliana]
  misc_feature (69)..(256): NCBI GI NO: 27817836 NR Description: OJ1127_E01.4
  misc_feature (75)..(247): NCBI GI NO: 33589698 NR Description: At1g78930 [Arabidopsis thaliana]
  misc_feature (68)..(68): Xaa is any aa, unknown or other
  misc_feature (72)..(72): Xaa is any aa, unknown or other
  misc_feature (133)..(133): Xaa is any aa, unknown or other
  misc_feature (193)..(193): Xaa is any aa, unknown or other
  misc_feature (232)..(232): Xaa is any aa, unknown or other
MAATRTALALLGHEGMESGPRPAAPRRSRLRVVAVALRTRPTSLAAPGLPPAAPEPVLPSPPVAAGAXAVLXEAGVPPADLRRAAGMCPELLSVSAEAVEAALRFLTEEAGVAEADLPRVLRRRPRLLVSPVXARLRPTLYFLRALGVPDLHRRADLLSFSVEGKLLPRLEFLESLGLPARAARSMARRFPAXFGYGVEGNMRPKADYLLGAMARRADELYDFPEYFSYALXTRIVPRYEACAARGVSRLPLPAMSAPGTPSSAPLSPAVSGPCCPGGGRRCGTPSGWMTTRRRRRRRPRCDVRIGSEREALASWWCNICP

SEQ ID NO: 31478 - protein, 306 aa, Zea mays subsp. mays
  peptide (1)..(306): Ceres Seq. ID no. 13499230
  misc_feature (65)..(240): Pfam Name: Pfam Description:  mTERF
  misc_feature (65)..(240): NCBI GI NO: 21537209 NR Description: unknown [Arabidopsis thaliana]
  misc_feature (65)..(240): NCBI GI NO: 30686631 NR Description: expressed protein [Arabidopsis thaliana]
  misc_feature (65)..(240): NCBI GI NO: 30686636 NR Description: expressed protein [Arabidopsis thaliana]
  misc_feature (41)..(240): NCBI GI NO: 15226787 NR Description: expressed protein [Arabidopsis thaliana]
  misc_feature (41)..(240): NCBI GI NO: 28392870 NR Description: unknown protein [Arabidopsis thaliana]
  misc_feature (3)..(240): NCBI GI NO: 15230219 NR Description: hypothetical protein [Arabidopsis thaliana]
  misc_feature (41)..(240): NCBI GI NO: 15227524 NR Description: hypothetical protein [Arabidopsis thaliana]
  misc_feature (41)..(240): NCBI GI NO: 28204784 NR Description: hypothetical protein [Arabidopsis thaliana]
  misc_feature (54)..(241): NCBI GI NO: 27817836 NR Description: OJ1127_E01.4
  misc_feature (60)..(232): NCBI GI NO: 33589698 NR Description: At1g78930 [Arabidopsis thaliana]
  misc_feature (53)..(53): Xaa is any aa, unknown or other
  misc_feature (57)..(57): Xaa is any aa, unknown or other
  misc_feature (118)..(118): Xaa is any aa, unknown or other
  misc_feature (178)..(178): Xaa is any aa, unknown or other
  misc_feature (217)..(217): Xaa is any aa, unknown or other
MESGPRPAAPRRSRLRVVAVALRTRPTSLAAPGLPPAAPEPVLPSPPVAAGAXAVLXEAGVPPADLRRAAGMCPELLSVSAEAVEAALRFLTEEAGVAEADLPRVLRRRPRLLVSPVXARLRPTLYFLRALGVPDLHRRADLLSFSVEGKLLPRLEFLESLGLPARAARSMARRFPAXFGYGVEGNMRPKADYLLGAMARRADELYDFPEYFSYALXTRIVPRYEACAARGVSRLPLPAMSAPGTPSSAPLSPAVSGPCCPGGGRRCGTPSGWMTTRRRRRRRPRCDVRIGSEREALASWWCNICP

SEQ ID NO: 31479 - DNA, 1648 bp, Zea mays subsp. mays
  misc_feature (1)..(1648): Ceres Seq. ID no. 12595157
  misc_feature (986)..(986): n is a, c, t, g, unknown, or other
acaaagagcgagcgagagagagagagagagagagcagctctcaaggtcatggtcttatggaggagcatggtggtgctacctagcaagagctccccactataaagcgcccccacacaccataccacagctcagagcttcttttcatcatcttgtagaaaagaaagagtgagagtgagattggcaagggtatagggttcttggtcgatcaaatatctttcccctcttggattctcctcttcctgcttcgttctcgccagatcgatctcactacgtgcctgcgtagctagccactctgtatgcaccatcaccaccaggaccaggccatgggcgacgcgctgtgggacctgctcggggaggagatggcagcggcgggcggggagcacgggctgcccccggggtttcggttccaccccaccgacgaggagctggtcaccttctacctcgccgccaaggtgttcaacggcgcctgctgtggcatcgacatcgccgaggtggacctcaaccggtgcgagccgtgggagctccccgacgcggcgcgtatgggggagcgcgagtggtacttcttcagcctccgcgaccgcaagtaccccacgggcctccgtaccaaccgcgccaccggcgccgggtactggaaggccaccgggaaggaccgcgaggtgctcaacgccgccaccggcgcgctcctcggcatgaagaagacgctcgtcttctacaagggccgggcgccgcgcggcgagaagaccaagtgggtcctgcacgagtatcgcctcgacggcgacttcgccgccgctcgccgcccctgcaaggaggaatgggtcatctgcaggatactgcacaaggcaggcgaccagtatagcaagctgatgatggtgaagagcccctactacctgcccatggcgatggacccttccagcttctgcttccaggaggacccaaccgggcatcccctcccgaaccctagtggctgcacccccttccaccacggncacccccaccacagcatgcagccgcctccattgccgccgagcaaccatgctggcaaggccgtcttcacgggagcagcagcctcctgctgcatgcaacaagagccggcagacggcagcaacagcgccgtgctgcccatgccgccgttccctcccttcaccaccatcgtcgccggcaagccggcggtcccggcgccgccgccccaggttgtcaacgccggtccacaggagccaccgccacctacctggctggaggcctacctgcagcacactggtgggatcctttatgagatgggtgtgggtccaactgcagcgcccaggggcgcgtgatccggaccgtcggttccttagggttacccccctacgtacgtactgaaacactgatgatccatcgatttacctggtctgtaatgtgcggtgaagcttagtatttccaagtgacatatttcgacaagcacttgtagttattaaaaaagagttatcttgtattcggtggcatcattagtcgtcgttgttatgaaatcatgtgtgcttataacatgcatgaatgcatgcatttggatcatcgatcagagctgtcctgagcttgtacgtgctacgtactgtgctcatgcatccatccacatgcaaagtggtgcttgctaaaatgtactatccaaatgtcc

SEQ ID NO: 31480 - protein, 338 aa, Zea mays subsp. mays
  peptide (1)..(338): Ceres Seq. ID no. 12595158
  misc_feature (31)..(159): Pfam Name: NAM Pfam Description: No apical meristem
  misc_feature (10)..(338): NCBI GI NO: 28411877 NR Description: putative NAM
  misc_feature (9)..(185): NCBI GI NO: 15223043 NR Description: unknown protein; protein id: At1g76420.1
  misc_feature (43)..(185): NCBI GI NO: 21389170 NR Description: nam-like protein 16 [Petunia x hybrida]
  misc_feature (28)..(182): NCBI GI NO: 1279640 NR Description: NAM [Petunia x hybrida]
  misc_feature (31)..(312): NCBI GI NO: 15232511 NR Description: NAM-like protein; protein id: At3g15170
  misc_feature (26)..(181): NCBI GI NO: 15238882 NR Description: CUC2 (dbj|BAA19529.1); protein id: At5g53950.1
  misc_feature (31)..(291): NCBI GI NO: 11994506 NR Description: contains similarity to NAM
  misc_feature (28)..(181): NCBI GI NO: 40737029 NR Description: putative OsNAC1 protein
  misc_feature (28)..(215): NCBI GI NO: 15241819 NR Description: NAM / CUC2 - like protein; protein id: At5g39610
  misc_feature (28)..(215): NCBI GI NO: 21536866 NR Description: NAM / CUC2-like protein [Arabidopsis thaliana]
  misc_feature (230)..(230): Xaa is any aa, unknown or other
MHHHHQDQAMGDALWDLLGEEMAAAGGEHGLPPGFRFHPTDEELVTFYLAAKVFNGACCGIDIAEVDLNRCEPWELPDAARMGEREWYFFSLRDRKYPTGLRTNRATGAGYWKATGKDREVLNAATGALLGMKKTLVFYKGRAPRGEKTKWVLHEYRLDGDFAAARRPCKEEWVICRILHKAGDQYSKLMMVKSPYYLPMAMDPSSFCFQEDPTGHPLPNPSGCTPFHHXHPHHSMQPPPLPPSNHAGKAVFTGAAASCCMQQEPADGSNSAVLPMPPFPPFTTIVAGKPAVPAPPPQVVNAGPQEPPPPTWLEAYLQHTGGILYEMGVGPTAAPRGA

SEQ ID NO: 31481 - protein, 329 aa, Zea mays subsp. mays
  peptide (1)..(329): Ceres Seq. ID no. 12595159
  misc_feature (22)..(150): Pfam Name: NAM Pfam Description: No apical meristem
  misc_feature (1)..(329): NCBI GI NO: 28411877 NR Description: putative NAM
  misc_feature (1)..(176): NCBI GI NO: 15223043 NR Description: unknown protein; protein id: At1g76420.1
  misc_feature (34)..(176): NCBI GI NO: 21389170 NR Description: nam-like protein 16 [Petunia x hybrida]
  misc_feature (19)..(173): NCBI GI NO: 1279640 NR Description: NAM [Petunia x hybrida]
  misc_feature (22)..(303): NCBI GI NO: 15232511 NR Description: NAM-like protein; protein id: At3g15170
  misc_feature (17)..(172): NCBI GI NO: 15238882 NR Description: CUC2 (dbj|BAA19529.1); protein id: At5g53950.1
  misc_feature (22)..(282): NCBI GI NO: 11994506 NR Description: contains similarity to NAM
  misc_feature (19)..(172): NCBI GI NO: 40737029 NR Description: putative OsNAC1 protein
  misc_feature (19)..(206): NCBI GI NO: 15241819 NR Description: NAM / CUC2 - like protein; protein id: At5g39610
  misc_feature (19)..(206): NCBI GI NO: 21536866 NR Description: NAM / CUC2-like protein [Arabidopsis thaliana]
  misc_feature (221)..(221): Xaa is any aa, unknown or other
MGDALWDLLGEEMAAAGGEHGLPPGFRFHPTDEELVTFYLAAKVFNGACCGIDIAEVDLNRCEPWELPDAARMGEREWYFFSLRDRKYPTGLRTNRATGAGYWKATGKDREVLNAATGALLGMKKTLVFYKGRAPRGEKTKWVLHEYRLDGDFAAARRPCKEEWVICRILHKAGDQYSKLMMVKSPYYLPMAMDPSSFCFQEDPTGHPLPNPSGCTPFHHXHPHHSMQPPPLPPSNHAGKAVFTGAAASCCMQQEPADGSNSAVLPMPPFPPFTTIVAGKPAVPAPPPQVVNAGPQEPPPPTWLEAYLQHTGGILYEMGVGPTAAPRGA

SEQ ID NO: 31482 - protein, 317 aa, Zea mays subsp. mays
  peptide (1)..(317): Ceres Seq. ID no. 12595160
  misc_feature (10)..(138): Pfam Name: NAM Pfam Description: No apical meristem
  misc_feature (1)..(317): NCBI GI NO: 28411877 NR Description: putative NAM
  misc_feature (1)..(164): NCBI GI NO: 15223043 NR Description: unknown protein; protein id: At1g76420.1
  misc_feature (22)..(164): NCBI GI NO: 21389170 NR Description: nam-like protein 16 [Petunia x hybrida]
  misc_feature (7)..(161): NCBI GI NO: 1279640 NR Description: NAM [Petunia x hybrida]
  misc_feature (10)..(291): NCBI GI NO: 15232511 NR Description: NAM-like protein; protein id: At3g15170
  misc_feature (5)..(160): NCBI GI NO: 15238882 NR Description: CUC2 (dbj|BAA19529.1); protein id: At5g53950.1
  misc_feature (10)..(270): NCBI GI NO: 11994506 NR Description: contains similarity to NAM
  misc_feature (7)..(160): NCBI GI NO: 40737029 NR Description: putative OsNAC1 protein
  misc_feature (7)..(194): NCBI GI NO: 15241819 NR Description: NAM / CUC2 - like protein; protein id: At5g39610
  misc_feature (7)..(194): NCBI GI NO: 21536866 NR Description: NAM / CUC2-like protein [Arabidopsis thaliana]
  misc_feature (209)..(209): Xaa is any aa, unknown or other
MAAAGGEHGLPPGFRFHPTDEELVTFYLAAKVFNGACCGIDIAEVDLNRCEPWELPDAARMGEREWYFFSLRDRKYPTGLRTNRATGAGYWKATGKDREVLNAATGALLGMKKTLVFYKGRAPRGEKTKWVLHEYRLDGDFAAARRPCKEEWVICRILHKAGDQYSKLMMVKSPYYLPMAMDPSSFCFQEDPTGHPLPNPSGCTPFHHXHPHHSMQPPPLPPSNHAGKAVFTGAAASCCMQQEPADGSNSAVLPMPPFPPFTTIVAGKPAVPAPPPQVVNAGPQEPPPPTWLEAYLQHTGGILYEMGVGPTAAPRGA

SEQ ID NO: 31483 - DNA, 1284 bp, Zea mays subsp. mays
  misc_feature (1)..(1284): Ceres Seq. ID no. 13493673
  misc_feature (736)..(736): n is a, c, t, g, unknown, or other
gtcacttcattcccttgtcactagctagatcgactgactggagaggagctatcgtctactacctctgggcgagctgcgtgtcctgtcgtccttctcgctcctgtggtcgccgcgcgcggcggtgcgatggggcggtcgccgtgctgcgagaaggaggccgggctgaagaaggggccgtggacgtccgaggaggaccagaaactgctggccttcatcgagcagcacggacacggctgctggcgctcgctgccggctaaggccggtctgcggcggtgcggcaagagctgccggctccggtggaccaactacctgcggccggacatcaagcggggcaagttcacgctgcaggaggagcagaccatcatccagctccacgctctcctcggcaacaggtggtcgtcgatcgcgacgcacctgcccaagcgcacggacaacgagatcaagaactactggaacacgcacctcaagaagcggctcgccaagatgggcatcgaccccgtcacgcacaaggcccgcgccgacgtggggggctcctctggcgcaggcaacaactctggagcgcgctacagggcagccgcgcacctcagccacacggcgcagtgggagagcgcgcgcctcgaggccgaggcgcgtctggcgcgcgaggccaggctgcgtgcccttgcctcgccgccgccgccgccagggccagggccgggacccgcgtttagcgggctcgagtcgccgacatcgactntgagcttctccgagagcgtgctgttcgccagtgcggcgcacgacacccacgccctgacgtcacgcgcttacgcagaggcgttcggggcggagcagcaacagcgcttcgctgacactgccgccgccgccgacgccgcgccaggcttccttgcaggcgtccttctcggctgctccgtcgccggcgcggagaaggggttcgcggcctcgtcgacggacgccagcgtctgtgagcagcagcaggaggaagaggacaagggctactggagcagcatactgaacatggtcaactcctccatgtcgtcgtccacgtcctcgctgacttctgatgctgtcacggaccccgccgccgcgtacttgccgccggcgacggcggcggccgagttctgagtgattgtcgtccaataataacgaacctgtgctaatgttaccttgtcatgtgtgttgcttactagtaggtgcgttttggtgctagttagtttatttacgtgctaatgggctgtcgcccacgtgtgcttgtgctttatgatgtgcaataataaacatgtacgt

SEQ ID NO: 31484 - protein, 331 aa, Zea mays subsp. mays
  peptide (1)..(331): Ceres Seq. ID no. 13493674
  misc_feature (15)..(62): Pfam Name: Pfam Description:  Myb-like DNA-binding domain
  misc_feature (1)..(278): NCBI GI NO: 38344966 NR Description: OSJNBa0072F16.11
  misc_feature (1)..(178): NCBI GI NO: 28628947 NR Description: MYB1 [Dendrobium sp. XMW-2002-1]
  misc_feature (228)..(301): NCBI GI NO: 28628947 NR Description: MYB1 [Dendrobium sp. XMW-2002-1]
  misc_feature (1)..(209): NCBI GI NO: 27125807 NR Description: MYB27 protein
  misc_feature (1)..(211): NCBI GI NO: 15232045 NR Description: myb family transcription factor
  misc_feature (1)..(193): NCBI GI NO: 13346188 NR Description: GHMYB25 [Gossypium hirsutum]
  misc_feature (1)..(293): NCBI GI NO: 282964 NR Description: myb-related protein 1 - garden petunia
  misc_feature (1)..(208): NCBI GI NO: 15242272 NR Description: myb family transcription factor
  misc_feature (1)..(176): NCBI GI NO: 4886264 NR Description: Myb-related transcription factor mixta-like 1
  misc_feature (1)..(176): NCBI GI NO: 629737 NR Description: myb-related protein MIXTA - garden snapdragon
  misc_feature (204)..(204): Xaa is any aa, unknown or other
MGRSPCCEKEAGLKKGPWTSEEDQKLLAFIEQHGHGCWRSLPAKAGLRRCGKSCRLRWTNYLRPDIKRGKFTLQEEQTIIQLHALLGNRWSSIATHLPKRTDNEIKNYWNTHLKKRLAKMGIDPVTHKARADVGGSSGAGNNSGARYRAAAHLSHTAQWESARLEAEARLAREARLRALASPPPPPGPGPGPAFSGLESPTSTXSFSESVLFASAAHDTHALTSRAYAEAFGAEQQQRFADTAAAADAAPGFLAGVLLGCSVAGAEKGFAASSTDASVCEQQQEEEDKGYWSSILNMVNSSMSSSTSSLTSDAVTDPAAAYLPPATAAAEF

SEQ ID NO: 31485 - protein, 212 aa, Zea mays subsp. mays
  peptide (1)..(212): Ceres Seq. ID no. 13493675
  misc_feature (1)..(159): NCBI GI NO: 38344966 NR Description: OSJNBa0072F16.11
  misc_feature (1)..(59): NCBI GI NO: 28628947 NR Description: MYB1 [Dendrobium sp. XMW-2002-1]
  misc_feature (109)..(182): NCBI GI NO: 28628947 NR Description: MYB1 [Dendrobium sp. XMW-2002-1]
  misc_feature (1)..(90): NCBI GI NO: 27125807 NR Description: MYB27 protein
  misc_feature (1)..(92): NCBI GI NO: 15232045 NR Description: myb family transcription factor
  misc_feature (1)..(74): NCBI GI NO: 13346188 NR Description: GHMYB25 [Gossypium hirsutum]
  misc_feature (1)..(174): NCBI GI NO: 282964 NR Description: myb-related protein 1 - garden petunia
  misc_feature (1)..(89): NCBI GI NO: 15242272 NR Description: myb family transcription factor
  misc_feature (1)..(57): NCBI GI NO: 4886264 NR Description: Myb-related transcription factor mixta-like 1
  misc_feature (1)..(57): NCBI GI NO: 629737 NR Description: myb-related protein MIXTA - garden snapdragon
  misc_feature (85)..(85): Xaa is any aa, unknown or other
MGIDPVTHKARADVGGSSGAGNNSGARYRAAAHLSHTAQWESARLEAEARLAREARLRALASPPPPPGPGPGPAFSGLESPTSTXSFSESVLFASAAHDTHALTSRAYAEAFGAEQQQRFADTAAAADAAPGFLAGVLLGCSVAGAEKGFAASSTDASVCEQQQEEEDKGYWSSILNMVNSSMSSSTSSLTSDAVTDPAAAYLPPATAAAEF

SEQ ID NO: 31486 - DNA, 1281 bp, Zea mays subsp. mays
  misc_feature (1)..(1281): Ceres Seq. ID no. 12416646
aattggctgttggatctggcgtgtctaggagtgggatttggggagtctatttggtgtgctccttttggggttcccatcgtttctcgttctgtggatgggcgtgtagattcagtgaggcgtttggtactacaggaggcgcgcttgatttggtcgagttcttccatatgtgtggatcgagtggactctaatctgcccagctccagtgtcatgtgggtggggattggttgaccaatattttctgcggttgaatcttaacaagctgcatcgcagtttctaatcgtttggagagcacacaagaatgtcgttcgtgcagctctctggtgctggagtcgctgcagtggccttcacgaacaagagcctagtctctcggcacgcagcgctacgggtctgctcgtcgaggcgctcgatccgtagcctggtcgttaaggctgcaactgtcgtcaccccaaagtacacttcactgaagcctctgggagatagggtgcttgtgaagcttggtgccgcagaggagaagacagttggtggcattttgcttccatctactgcccagactaaaccacaaggaggtgaggttgttgctgttggagcaggaaggaccatcggggacaagaaaatagctgtggatatagagactggagcacaagtagtatactcaaagtatgctgggactgaggttgaattcaatgactcaaagcatcttattctcaaagaagacgatatcattggtattcttgagacagatgatgtgaaggacatgaagcctctcaatgaccgtgttctcatcaaggttgcagaagccgaagacaaaactcctgggggccttatcctcactgaaacaactaaagagaagccgtccataggaacggttgtagctgttggcccgggtcctctggacgaggaaggcaagagacagccactgtcagtgtcggcgggcagcacagtgctgtactccaagtatgcagggagtgagttcaagggcgcggatggcacggcctacattgtgttgagagcgtcggatgtgatggctgtcctgtcttgagcatttcgtttccggctcgttaatgtagtttgcagccaatagttgtcatgtggtatgaaacgatcgctttgtggtggtcatcacaccatgctggtgatcatcacaacatatgctgatactgttccggacaatcggctagaatttgttgtgtggcaggtataaacgtcagcatctgatagtgagagcactcggttacttctacagatggtatttaaggggtgatagtcacgcctctttgctgg

SEQ ID NO: 31487 - protein, 246 aa, Zea mays subsp. mays; identical to SEQ ID NO: 28105
  peptide (1)..(246): Ceres Seq. ID no. 12416647
  misc_feature (151)..(246): Pfam Name: Pfam Description:  Chaperonin 10 Kd subunit
  misc_feature (4)..(246): NCBI GI NO: 15242045 NR Description: chloroplast Cpn21 protein; protein id: At5g20720
  misc_feature (1)..(246): NCBI GI NO: 7331143 NR Description: chaperonin 21 precursor [Lycopersicon esculentum]
  misc_feature (4)..(246): NCBI GI NO: 25453528 NR Description: chaperonin 10 [imported] - Arabidopsis thaliana
  misc_feature (2)..(246): NCBI GI NO: 21780187 NR Description: cp10-like protein [Gossypium hirsutum]
  misc_feature (35)..(246): NCBI GI NO: 399241 NR Description: 20 kDa chaperonin, chloroplast precursor
  misc_feature (150)..(245): NCBI GI NO: 22297730 NR Description: 10kD chaperonin
  misc_feature (152)..(246): NCBI GI NO: 3599923 NR Description: GroES/HSP10 homolog [Lawsonia intracellularis]
  misc_feature (55)..(146): NCBI GI NO: 2493659 NR Description: 10 kDa chaperonin (Protein Cpn10) (groES protein)
  misc_feature (55)..(146): NCBI GI NO: 20807075 NR Description: Co-chaperonin GroES (HSP10)
  misc_feature (54)..(145): NCBI GI NO: 23113174 NR Description: hypothetical protein

SEQ ID NO: 31488 - DNA, 1819 bp, Zea mays subsp. mays
  misc_feature (1)..(1819): Ceres Seq. ID no. 12416772
actctgttcaaccaccagccgagttcgcagcggcactccagggtccaggcccagcagcctcttcggctcttcgttgggggtgcgtggacaccggaaattgcctcggggattgcgttcctgatctaagcccggcatgaagggctgctcagagcgtttgctgctcctgctgctgctggcatcgtcgttgttactgtccgtcgtggttgccgcgcagcagacttgccctgccgacctcgacagcaaatgcgacggtggcgcgcctgatgactgggagggggaattcttccccggcgtcccgaaaatcaagtatgagggtccaacaagcaagaaccctcttgcttataagtggtataacaaggaggaagtcattctcggaaagaagatgaaggactggatgcgcttcagtgttgcgttctggcacacgttccgtggtactggtgctgatccttttggtgcgcctacaaaggtttggccttgggaggacggcacaaattcgttggccatggctaagagaagaatgagagctcactttgagttcatggagaagctgggggttgacaaatggtgcttccatgatagggatattgcccctgatgggaaaactctcgaagaaacaaatgctaacttggatgagatagttgagctggcaaagcagctccagggtgagaccaatataaagccattgtggggtactgcacagctctttatgcatcctcgttacatgcacggagctgctactagcccagaggttaaagtatatgcatatgcggctgcacaagttaagaaagctttggaggtcactcactacctaggtggtgaaaactatgtgttttggggtggaagagagggttaccaaactcttctgaacactgatcttaagagagaacttgaccatttggctaactttcttcaagctgctgttgactacaagaagaagattggattcaacggaacactgttgatagagcctaaaccacaggaacctacaaaacaccagtatgactgggatgttgcaactacgtttgcttttctacagaagtatggtcttaccggagagttcaagattaatgttgagtgcaaccatgctactctatctggacatagctgccatcatgaactggagactgcacgcattaatgggctgcttgggaacattgatgcaaacactggtgatcctcaagttggctgggacacggatcagttcatgacagacattgcagaggctactttggttatgtcaactgtggttaagaatggtggacttgcacctggtggcttcaactttgacgccaaattgcggagggaaagcactgatgttgaggacttgtttcttgctcatatctccggaatggacaccctggcccgtggcctccgcaacgccgccaagctgatcgaggatggttccctagatgctctcgtccgcaagcggtaccagagctttgatagtgagattggtgccttgatcgaggctgggaaaggagactttgaggcgctagagaagaaggtccttgagtggggtgagcccactgttccgtccggcaaacaggaactggcggagattctgttccactctgctctatagatggcgccatgtccgtagcggtagctcctggaataagcaagcactgagcctgcgccctcccaacgcgcgcggtcgtcctcaccagtcaccaccaagggaatgtttctggttgcgcgcgatgaaccatgtacaatacaccgtggaactgaaataaattgaaatagctagtcagaatttttagaactgttgcctctttgtttggaacggaatgaaactgaacttggttagtttgagctc

SEQ ID NO: 31489 - protein, 482 aa, Zea mays subsp. mays
  peptide (1)..(482): Ceres Seq. ID no. 12416773
  misc_feature (76)..(482): Pfam Name: Pfam Description:  Xylose isomerase
  misc_feature (9)..(482): NCBI GI NO: 34899308 NR Description: putative xylose isomerase
  misc_feature (1)..(482): NCBI GI NO: 6175480 NR Description: Xylose isomerase
  misc_feature (1)..(482): NCBI GI NO: 2130051 NR Description: xylose isomerase (EC 5.3.1.5) - barley
  misc_feature (1)..(482): NCBI GI NO: 30696904 NR Description: expressed protein [Arabidopsis thaliana]
  misc_feature (1)..(482): NCBI GI NO: 21537178 NR Description: xylose isomerase [Arabidopsis thaliana]
  misc_feature (1)..(471): NCBI GI NO: 17433690 NR Description: Xylose isomerase
  misc_feature (49)..(480): NCBI GI NO: 1175034 NR Description: Xylose isomerase
  misc_feature (49)..(480): NCBI GI NO: 3319057 NR Description: Chain A
  misc_feature (49)..(480): NCBI GI NO: 15644415 NR Description: xylose isomerase [Thermotoga maritima]
  misc_feature (49)..(482): NCBI GI NO: 17433692 NR Description: Xylose isomerase
MKGCSERLLLLLLLASSLLLSVVVAAQQTCPADLDSKCDGGAPDDWEGEFFPGVPKIKYEGPTSKNPLAYKWYNKEEVILGKKMKDWMRFSVAFWHTFRGTGADPFGAPTKVWPWEDGTNSLAMAKRRMRAHFEFMEKLGVDKWCFHDRDIAPDGKTLEETNANLDEIVELAKQLQGETNIKPLWGTAQLFMHPRYMHGAATSPEVKVYAYAAAQVKKALEVTHYLGGENYVFWGGREGYQTLLNTDLKRELDHLANFLQAAVDYKKKIGFNGTLLIEPKPQEPTKHQYDWDVATTFAFLQKYGLTGEFKINVECNHATLSGHSCHHELETARINGLLGNIDANTGDPQVGWDTDQFMTDIAEATLVMSTVVKNGGLAPGGFNFDAKLRRESTDVEDLFLAHISGMDTLARGLRNAAKLIEDGSLDALVRKRYQSFDSEIGALIEAGKGDFEALEKKVLEWGEPTVPSGKQELAEILFHSAL

SEQ ID NO: 31490 - protein, 399 aa, Zea mays subsp. mays
  peptide (1)..(399): Ceres Seq. ID no. 12416774
  misc_feature (1)..(399): Pfam Name: Pfam Description:  Xylose isomerase
  misc_feature (1)..(399): NCBI GI NO: 34899308 NR Description: putative xylose isomerase
  misc_feature (1)..(399): NCBI GI NO: 6175480 NR Description: Xylose isomerase
  misc_feature (1)..(399): NCBI GI NO: 2130051 NR Description: xylose isomerase (EC 5.3.1.5) - barley
  misc_feature (1)..(399): NCBI GI NO: 30696904 NR Description: expressed protein [Arabidopsis thaliana]
  misc_feature (1)..(399): NCBI GI NO: 21537178 NR Description: xylose isomerase [Arabidopsis thaliana]
  misc_feature (1)..(388): NCBI GI NO: 17433690 NR Description: Xylose isomerase
  misc_feature (1)..(397): NCBI GI NO: 1175034 NR Description: Xylose isomerase
  misc_feature (1)..(397): NCBI GI NO: 3319057 NR Description: Chain A
  misc_feature (1)..(397): NCBI GI NO: 15644415 NR Description: xylose isomerase [Thermotoga maritima]
  misc_feature (1)..(399): NCBI GI NO: 17433692 NR Description: Xylose isomerase
MKDWMRFSVAFWHTFRGTGADPFGAPTKVWPWEDGTNSLAMAKRRMRAHFEFMEKLGVDKWCFHDRDIAPDGKTLEETNANLDEIVELAKQLQGETNIKPLWGTAQLFMHPRYMHGAATSPEVKVYAYAAAQVKKALEVTHYLGGENYVFWGGREGYQTLLNTDLKRELDHLANFLQAAVDYKKKIGFNGTLLIEPKPQEPTKHQYDWDVATTFAFLQKYGLTGEFKINVECNHATLSGHSCHHELETARINGLLGNIDANTGDPQVGWDTDQFMTDIAEATLVMSTVVKNGGLAPGGFNFDAKLRRESTDVEDLFLAHISGMDTLARGLRNAAKLIEDGSLDALVRKRYQSFDSEIGALIEAGKGDFEALEKKVLEWGEPTVPSGKQELAEILFHSAL

SEQ ID NO: 31491 - protein, 395 aa, Zea mays subsp. mays
  peptide (1)..(395): Ceres Seq. ID no. 12416775
  misc_feature (1)..(395): Pfam Name: Pfam Description:  Xylose isomerase
  misc_feature (1)..(395): NCBI GI NO: 34899308 NR Description: putative xylose isomerase
  misc_feature (1)..(395): NCBI GI NO: 6175480 NR Description: Xylose isomerase
  misc_feature (1)..(395): NCBI GI NO: 2130051 NR Description: xylose isomerase (EC 5.3.1.5) - barley
  misc_feature (1)..(395): NCBI GI NO: 30696904 NR Description: expressed protein [Arabidopsis thaliana]
  misc_feature (1)..(395): NCBI GI NO: 21537178 NR Description: xylose isomerase [Arabidopsis thaliana]
  misc_feature (1)..(384): NCBI GI NO: 17433690 NR Description: Xylose isomerase
  misc_feature (1)..(393): NCBI GI NO: 1175034 NR Description: Xylose isomerase
  misc_feature (1)..(393): NCBI GI NO: 3319057 NR Description: Chain A
  misc_feature (1)..(393): NCBI GI NO: 15644415 NR Description: xylose isomerase [Thermotoga maritima]
  misc_feature (1)..(395): NCBI GI NO: 17433692 NR Description: Xylose isomerase
MRFSVAFWHTFRGTGADPFGAPTKVWPWEDGTNSLAMAKRRMRAHFEFMEKLGVDKWCFHDRDIAPDGKTLEETNANLDEIVELAKQLQGETNIKPLWGTAQLFMHPRYMHGAATSPEVKVYAYAAAQVKKALEVTHYLGGENYVFWGGREGYQTLLNTDLKRELDHLANFLQAAVDYKKKIGFNGTLLIEPKPQEPTKHQYDWDVATTFAFLQKYGLTGEFKINVECNHATLSGHSCHHELETARINGLLGNIDANTGDPQVGWDTDQFMTDIAEATLVMSTVVKNGGLAPGGFNFDAKLRRESTDVEDLFLAHISGMDTLARGLRNAAKLIEDGSLDALVRKRYQSFDSEIGALIEAGKGDFEALEKKVLEWGEPTVPSGKQELAEILFHSAL

SEQ ID NO: 31492 - DNA, 1792 bp, Zea mays subsp. mays
  misc_feature (1)..(1792): Ceres Seq. ID no. 12358858
atctagttagttctcgatagcctctctctccctgcctccccgctgttgtggttgcggtgcttctgctgatctgctccgtcttctcctcccggcaatggcctgcttggaggcgcccccgcgcgtcgagctctgcccggtctcgtgccagccccgcggcctgcagcttccgccatggcggctcagcctgtcgaggtcctcctcttcatgcagatcttgcacccttgtgtctcgccagcttccaatttgcaatgcacagtcatatgctgatgatttatgggtggctgcgcctcatagccctgcatctgttcgctcaaggttgcttgcagcggaaagagaggaagcaaaggctgtcctgtccctgtttctgaggcagaaaggtctgcgaagcacgctggccgcacggatcgtcaacaaatcggatggcttcatcgagcacctggtctcgaagctccagattgcttacagatctcgatatgctgaaggaagggagctgagcacgcctgaaatcagagacgctctccttccctatctcgaagctctctccaaagaacatggcgacagtttggtcgaggtggtggagaatttccccgacccttttgctatggaaagggaagccttatcttcatcaatggcgtttacacccacgagctcaaacaagcagaaggcgattgctcgaataagcacgcagcctcaggcgccgccctccctgagctggtcccctacctactagaccttggcatggaccacgaggagataaaggacatcgtgcgcaagttcccagcgttcgcgtactacagcgtggatcgcaagatcaagcccctggtggagctcctgcttgagcttggggtgaaaaattccagcataccaggaatcatcaagaagcggccccagctgtgcgggatcagcatgtcagacaatctcaagccgatgatggcttatctggagagcatcggcgtcgacaaggctcagtggagcaaggtgatcacccgcttcccggcgctcctcacgtacagccggaacaaggtgcagacgaccgtgagcttcctcgccgagctaggtgtctccgagaagagcatcggcaagatcctgacgcggtgcccccacatcatgagctacagcgtggacgacaacctcaggccgaccgccgcctacttccggtcgatcggcgcggacgccgcgtcccttatccagaagagcccgcaggccttcggtctgaacgtcgaggccaagctgaggccgaccacggagttcttcctggcgagggggttcagcgtcgaggaggtcggcgtcatggcgaacaggttcgggatcgttcacacgctgagcctggaggagaacctgctccccaagtacgagttcttcctggcgatggagtacccgaggtgcgagctcgtcaagttcccgcagtactttgggtacagcttggaccggcggataaagccacggtacgcgaggatgactgggtgtggggtgaggttgattttgaaccagatgctttcggtctccgatgccaggtttgagaagattctagagaagaagacggctaggctttgataagacagcagtttcagattaggcacagtgttggagttcatttgagaagaactgtcaatgataaaaccatcagttttcagagcacgtagcttattatcgtggccttcatggacgtgcaacgtccagaggcgaactgtttgatgtgctaatctgtagttagcttctgcgaggtattgaaatgcatgcaactttggcaatcagaaatgccagttgcagtgggcgagattgcttggtgctc

SEQ ID NO: 31493 - protein, 271 aa, Zea mays subsp. mays
  peptide (1)..(271): Ceres Seq. ID no. 12358859
  misc_feature (1)..(202): Pfam Name: Pfam Description:  mTERF
  misc_feature (1)..(231): NCBI GI NO: 18414260 NR Description: hypothetical protein; protein id: At4g14605.1
  misc_feature (1)..(231): NCBI GI NO: 7485117 NR Description: hypothetical protein - Arabidopsis thaliana
  misc_feature (159)..(271): NCBI GI NO: 18414260 NR Description: hypothetical protein; protein id: At4g14605.1
  misc_feature (1)..(260): NCBI GI NO: 34905080 NR Description: P0686C03.23
  misc_feature (1)..(262): NCBI GI NO: 15233700 NR Description: putative protein; protein id: At4g38160
  misc_feature (1)..(265): NCBI GI NO: 18406426 NR Description: expressed protein; protein id: At2g44020
  misc_feature (46)..(265): NCBI GI NO: 15227524 NR Description: predicted by genefinder and genscan
  misc_feature (46)..(265): NCBI GI NO: 28204784 NR Description: hypothetical protein [Arabidopsis thaliana]
  misc_feature (9)..(260): NCBI GI NO: 33589698 NR Description: At1g78930 [Arabidopsis thaliana]
  misc_feature (9)..(260): NCBI GI NO: 30699372 NR Description: expressed protein [Arabidopsis thaliana]
MDHEEIKDIVRKFPAFAYYSVDRKIKPLVELLLELGVKNSSIPGIIKKRPQLCGISMSDNLKPMMAYLESIGVDKAQWSKVITRFPALLTYSRNKVQTTVSFLAELGVSEKSIGKILTRCPHIMSYSVDDNLRPTAAYFRSIGADAASLIQKSPQAFGLNVEAKLRPTTEFFLARGFSVEEVGVMANRFGIVHTLSLEENLLPKYEFFLAMEYPRCELVKFPQYFGYSLDRRIKPRYARMTGCGVRLILNQMLSVSDARFEKILEKKTARL

SEQ ID NO: 31494 - protein, 215 aa, Zea mays subsp. mays
  peptide (1)..(215): Ceres Seq. ID no. 12358860
  misc_feature (1)..(146): Pfam Name: Pfam Description:  mTERF
  misc_feature (1)..(175): NCBI GI NO: 18414260 NR Description: hypothetical protein; protein id: At4g14605.1
  misc_feature (1)..(175): NCBI GI NO: 7485117 NR Description: hypothetical protein - Arabidopsis thaliana
  misc_feature (103)..(215): NCBI GI NO: 18414260 NR Description: hypothetical protein; protein id: At4g14605.1
  misc_feature (1)..(204): NCBI GI NO: 34905080 NR Description: P0686C03.23
  misc_feature (1)..(206): NCBI GI NO: 15233700 NR Description: putative protein; protein id: At4g38160
  misc_feature (1)..(209): NCBI GI NO: 18406426 NR Description: expressed protein; protein id: At2g44020
  misc_feature (1)..(209): NCBI GI NO: 15227524 NR Description: predicted by genefinder and genscan
  misc_feature (1)..(209): NCBI GI NO: 28204784 NR Description: hypothetical protein [Arabidopsis thaliana]
  misc_feature (1)..(204): NCBI GI NO: 33589698 NR Description: At1g78930 [Arabidopsis thaliana]
  misc_feature (1)..(204): NCBI GI NO: 30699372 NR Description: expressed protein [Arabidopsis thaliana]
MSDNLKPMMAYLESIGVDKAQWSKVITRFPALLTYSRNKVQTTVSFLAELGVSEKSIGKILTRCPHIMSYSVDDNLRPTAAYFRSIGADAASLIQKSPQAFGLNVEAKLRPTTEFFLARGFSVEEVGVMANRFGIVHTLSLEENLLPKYEFFLAMEYPRCELVKFPQYFGYSLDRRIKPRYARMTGCGVRLILNQMLSVSDARFEKILEKKTARL

SEQ ID NO: 31495 - protein, 211 aa, Zea mays subsp. mays
  peptide (1)..(211): Ceres Seq. ID no. 12358861
  misc_feature (67)..(196): Pfam Name: Pfam Description:  mTERF
  misc_feature (67)..(196): NCBI GI NO: 18414260 NR Description: hypothetical protein; protein id: At4g14605.1
  misc_feature (67)..(196): NCBI GI NO: 7485117 NR Description: hypothetical protein - Arabidopsis thaliana
MACLEAPPRVELCPVSCQPRGLQLPPWRLSLSRSSSSCRSCTLVSRQLPICNAQSYADDLWVAAPHSPASVRSRLLAAEREEAKAVLSLFLRQKGLRSTLAARIVNKSDGFIEHLVSKLQIAYRSRYAEGRELSTPEIRDALLPYLEALSKEHGDSLVEVVENFPDPFAMEREALSSSMAFTPTSSNKQKAIARISTQPQAPPSLSWSPTY

SEQ ID NO: 31496 - DNA, 1143 bp, Zea mays subsp. mays
  misc_feature (1)..(1143): Ceres Seq. ID no. 12354214
tctcctgctccctggctgcaacggacttgaccactgaaagctaagcacacccctcggccatggcgctcgcgtccacctccgccaccgcgcccgctgccgtgctcaagaccccgttcctcggcgccaggcgcgcgctcgccaatgccgccgcgcccaagcccacgtcgcgccgcgcgctcctcgccgtcgccgcggccgccgccaagaagtcgtggatccccgccttcaagagcgacgccgagttcatcaacccgccctagctcgacggatcgctccctggcgacttcggattcgatccgctggggctgggcaaggacccggcgttcctcaagtggtaccgggaggcggagctgatccacgggcggtgggcgatggccgccgtgctgggcatcttcgtgggacaggcctggagcggcatcccgtggttcgaggccggcgccgacccgggcgccatcgcgcccttctccttcggctcgctgctgggcacgcagctgctgctcatggggtgggtggagtcgaagcggtgggtggacttcttcaacccggactcgcagtccgtcgagtgggccacgccctggtcccgcactgccgagaacttcgccaacttcaccggcgaccagggctacccgggcggcaagttcttcgacccgctcggcctcgccggcaccgtcaaggacggcgtctacgtccccgacgtcgagaagctcgagcggcttaagctggccgagatcaaacacgcccgcatcgccatgcttgccatgctcgttttctacttcgaggccggacagggcaagacgccgctcggcgcgcttggcctatgatctgcatgctgccggccacgacgggtgtcgtgtcatcagtcatccctgtgtgcttgtgctcatcggtcgatcgaatccaccgagctggttctcgattgcgagcgtcgtggtacggctgcatcggatcagacgcatgcaacaaaatgggggattttttttcttcttcttccgtgtatgtaccatgtagtgtatagtagtctggtcatggaaccaattaaggcagaatgagtgagcgagggacatttcgttacattaatctctcattccgccttgctgaattgctatcgtctttcagaaacatagcgatattcctccgaagacc

SEQ ID NO: 31497 - protein, 149 aa, Zea mays subsp. mays
  peptide (1)..(149): Ceres Seq. ID no. 12354215
  misc_feature (1)..(138): Pfam Name: Pfam Description:  Chlorophyll A-B binding protein
  misc_feature (1)..(149): NCBI GI NO: 7443235 NR Description: chlorophyll a/b-binding apo protein CP24 precursor -maize
  misc_feature (1)..(149): NCBI GI NO: 115834 NR Description: Chlorophyll A-B binding protein CP24 10B
  misc_feature (1)..(149): NCBI GI NO: 8954298 NR Description: chlorophyll a/b-binding protein CP24 precursor
  misc_feature (1)..(149): NCBI GI NO: 543939 NR Description: Chlorophyll A-B binding protein CP24
  misc_feature (1)..(149): NCBI GI NO: 115833 NR Description: Chlorophyll A-B binding protein CP24 10A
  misc_feature (1)..(149): NCBI GI NO: 15218330 NR Description: chlorophyll binding protein, putative
  misc_feature (1)..(149): NCBI GI NO: 25299024 NR Description: chlorophyll a/b-binding protein Lhcb6
  misc_feature (1)..(147): NCBI GI NO: 1076724 NR Description: LHCI-680, photosystem I antenna protein - barley
  misc_feature (1)..(147): NCBI GI NO: 5902596 NR Description: light harvesting complex a protein
  misc_feature (1)..(147): NCBI GI NO: 7443233 NR Description: chlorophyll a/b-binding protein type II
MAAVLGIFVGQAWSGIPWFEAGADPGAIAPFSFGSLLGTQLLLMGWVESKRWVDFFNPDSQSVEWATPWSRTAENFANFTGDQGYPGGKFFDPLGLAGTVKDGVYVPDVEKLERLKLAEIKHARIAMLAMLVFYFEAGQGKTPLGALGL

SEQ ID NO: 31498 - protein, 106 aa, Zea mays subsp. mays
  peptide (1)..(106): Ceres Seq. ID no. 12354216
  misc_feature (1)..(95): Pfam Name: Pfam Description:  Chlorophyll A-B binding protein
  misc_feature (1)..(106): NCBI GI NO: 7443235 NR Description: chlorophyll a/b-binding apo protein CP24 precursor -maize
  misc_feature (1)..(106): NCBI GI NO: 115834 NR Description: Chlorophyll A-B binding protein CP24 10B
  misc_feature (1)..(106): NCBI GI NO: 8954298 NR Description: chlorophyll a/b-binding protein CP24 precursor
  misc_feature (1)..(106): NCBI GI NO: 543939 NR Description: Chlorophyll A-B binding protein CP24
  misc_feature (1)..(106): NCBI GI NO: 115833 NR Description: Chlorophyll A-B binding protein CP24 10A
  misc_feature (1)..(106): NCBI GI NO: 15218330 NR Description: chlorophyll binding protein, putative
  misc_feature (1)..(106): NCBI GI NO: 25299024 NR Description: chlorophyll a/b-binding protein Lhcb6
  misc_feature (1)..(104): NCBI GI NO: 1076724 NR Description: LHCI-680, photosystem I antenna protein - barley
  misc_feature (1)..(104): NCBI GI NO: 5902596 NR Description: light harvesting complex a protein
  misc_feature (1)..(104): NCBI GI NO: 7443233 NR Description: chlorophyll a/b-binding protein type II
MGWVESKRWVDFFNPDSQSVEWATPWSRTAENFANFTGDQGYPGGKFFDPLGLAGTVKDGVYVPDVEKLERLKLAEIKHARIAMLAMLVFYFEAGQGKTPLGALGL

SEQ ID NO: 31499 - DNA, 763 bp, Zea mays subsp. mays
  misc_feature (1)..(763): Ceres Seq. ID no. 12367941
aggccaccgcagccctagcgcgccgccaccatcaccttcgcagccctagccgccgcctccattgctgctatacccgcaaccatgggtcccgtgctgaagcgcccgaccccgggcacggtgcagtgtttcgggcgcaagaagacggccgtggccgtggcctacacgaagccaggccgggggatgatcaaggtgaacggcgtcccgatcgagctgctccgtcccgagatgctgcggctcaaggccatggagcccgtgctgctggcggggcggtccaggttcaaggacatcgacatgcggatccgcgtgcgcggcggcgggaagacgtcgcagatctacgccatccgccaggccgtcgccaagggtctcgtggcatactaccagaagtacgtcgacgaggcggcgaaaaaggagatcaaggacatcttcatgcgctacgagcgcaccctcctcgtcgccgacccccgccgctgcgagcccaagaagttcggcggccgcggcgcccgcgccaggttccagaagtcctaccgctgagcgccagcgcctgccggaccgctgtcgtggctccgtttagctacgactttacttatttctgataataacatggttggcgattcgtaggcttctcaggctttattttattttattttagtttatcctatttaagtgcaagactagttcctcaaatttagtttatagtatacaccgattggtgatttatatttatgcacttcgtatagcgtttttaatttccatgattatcctt

SEQ ID NO: 31500 - protein, 196 aa, Zea mays subsp. mays
  peptide (1)..(196): Ceres Seq. ID no. 12367942
ATAALARRHHHLRSPSRRLHCCYTRNHGSRAEAPDPGHGAVFRAQEDGRGRGLHEARPGDDQGERRPDRAAPSRDAAAQGHGARAAGGAVQVQGHRHADPRARRREDVADLRHPPGRRQGSRGILPEVRRRGGEKGDQGHLHALRAHPPRRRPPPLRAQEVRRPRRPRQVPEVLPLSASACRTAVVAPFSYDFTYF

SEQ ID NO: 31501 - protein, 149 aa, Zea mays subsp. mays
  peptide (1)..(149): Ceres Seq. ID no. 12367943
  misc_feature (17)..(149): Pfam Name: Pfam Description:  Ribosomal protein S9/S16
  misc_feature (1)..(149): NCBI GI NO: 1172818 NR Description: 40S RIBOSOMAL PROTEIN S16
  misc_feature (9)..(149): NCBI GI NO: 3122800 NR Description: 40S RIBOSOMAL PROTEIN S16
  misc_feature (8)..(149): NCBI GI NO: 6984222 NR Description: 40S ribosomal protein S16 [Euphorbia esula]
  misc_feature (12)..(149): NCBI GI NO: 1173209 NR Description: 40S RIBOSOMAL PROTEIN S16
  misc_feature (12)..(149): NCBI GI NO: 17369864 NR Description: 40S ribosomal protein S16
  misc_feature (7)..(149): NCBI GI NO: 15238809 NR Description: 40S RIBOSOMAL PROTEIN S16; protein id: At5g18380
  misc_feature (7)..(149): NCBI GI NO: 15226676 NR Description: 40S ribosomal protein S16; protein id: At2g09990
  misc_feature (7)..(149): NCBI GI NO: 15229252 NR Description: putative 40S ribosomal protein S16
  misc_feature (12)..(149): NCBI GI NO: 4506691 NR Description: ribosomal protein S16; 40S ribosomal protein S16
  misc_feature (12)..(149): NCBI GI NO: 39850096 NR Description: Unknown (protein for IMAGE:6887619)
MGPVLKRPTPGTVQCFGRKKTAVAVAYTKPGRGMIKVNGVPIELLRPEMLRLKAMEPVLLAGRSRFKDIDMRIRVRGGGKTSQIYAIRQAVAKGLVAYYQKYVDEAAKKEIKDIFMRYERTLLVADPRRCEPKKFGGRGARARFQKSYR

SEQ ID NO: 31502 - protein, 116 aa, Zea mays subsp. mays
  peptide (1)..(116): Ceres Seq. ID no. 12367944
  misc_feature (1)..(116): Pfam Name: Pfam Description:  Ribosomal protein S9/S16
  misc_feature (1)..(116): NCBI GI NO: 1172818 NR Description: 40S RIBOSOMAL PROTEIN S16
  misc_feature (1)..(116): NCBI GI NO: 3122800 NR Description: 40S RIBOSOMAL PROTEIN S16
  misc_feature (1)..(116): NCBI GI NO: 6984222 NR Description: 40S ribosomal protein S16 [Euphorbia esula]
  misc_feature (1)..(116): NCBI GI NO: 1173209 NR Description: 40S RIBOSOMAL PROTEIN S16
  misc_feature (1)..(116): NCBI GI NO: 17369864 NR Description: 40S ribosomal protein S16
  misc_feature (1)..(116): NCBI GI NO: 15238809 NR Description: 40S RIBOSOMAL PROTEIN S16; protein id: At5g18380
  misc_feature (1)..(116): NCBI GI NO: 15226676 NR Description: 40S ribosomal protein S16; protein id: At2g09990
  misc_feature (1)..(116): NCBI GI NO: 15229252 NR Description: putative 40S ribosomal protein S16
  misc_feature (1)..(116): NCBI GI NO: 4506691 NR Description: ribosomal protein S16; 40S ribosomal protein S16
  misc_feature (1)..(116): NCBI GI NO: 39850096 NR Description: Unknown (protein for IMAGE:6887619)
MIKVNGVPIELLRPEMLRLKAMEPVLLAGRSRFKDIDMRIRVRGGGKTSQIYAIRQAVAKGLVAYYQKYVDEAAKKEIKDIFMRYERTLLVADPRRCEPKKFGGRGARARFQKSYR

SEQ ID NO: 31503 - DNA, 1436 bp, Zea mays subsp. mays
  misc_feature (1)..(1436): Ceres Seq. ID no. 12360026
  misc_feature (314)..(314): n is a, c, t, g, unknown, or other
  misc_feature (360)..(360): n is a, c, t, g, unknown, or other
  misc_feature (355)..(355): n is a, c, t, g, unknown, or other
  misc_feature (361)..(361): n is a, c, t, g, unknown, or other
  misc_feature (313)..(313): n is a, c, t, g, unknown, or other
  misc_feature (367)..(367): n is a, c, t, g, unknown, or other
  misc_feature (356)..(356): n is a, c, t, g, unknown, or other
aaccaggtgtctgttcagttcgtgtccgccgtcctctgttcaagtgcaagcgagcgaagaaacgaagcaccaggaggcgggaacaagaaggaatttgcgcagcaagcaaaggtcccgagttgcaaacttgcaacccaagaagagcgttggacatgcagatggaggggagggagggtatcgcggtggtggccgcaggcggcggccatggatccgggcagcacggcatgttcggagcggcagacatcgccatggcagaggcgcaggaggcagcggctaaggggtaccagtaccagtcctccccctcgtcgccgtnngacgtccctcacgccgtcgccgccgccggctgcggctggcnnctgnnggggangccaccgcggcgccacttgcctggagcctgggcggcgggatgccgagcgaggccgcgggggacagcggcgtgcgggcggccgggcatagccagagcgagcacgccaacaacatgagctccgagcgccgccgcggccgcccgcgcggctccggcaggcgccagatcctggccactctcggtgaatggtacgcgctgtcagccggcgggagcttcacgcctcacgtcatcatcgtgggtactggggaggatgtggcggcgcgcgtcatgtcgttttcgcagaaaggcccacgctcggtctgcatcctctccgccaacgggacaatctctaacgtgacgctgaggcagccgggttcatctggtagcaccttcacctacgagggccgtttcgagatcctgcagctgatgggctcaatcacaatggctgaggaaggtcgtaagaggacaggcggcctcagcgtctctctcgctggcccagacggccgtgtggtcggcggcgtagtggctgggatgctgcgtgccgcaagtcctatacaggtgatcgtgggaagcttcctgcccaacagcctgaagcagcaccagaggcggatgagcgcgcagcagcagctctccccggttccggcactgccagaacctgaggcgcccccacccgtgctcaccgcagccaccccgatctctctggcaggtcctggggacgggttccatgatgcgccgccaccctccgccgcacctccccagccccacgccagcgccatgaacctgaacgcgacgggcttccccgtggctggctggcccgcaagctcgccgcagcccatggtgtacagggcttcccctgacatcaacgtcagcttgactccccaggagtaggatcgttgggctcgtcgtcgtcttcttctcttttctttccgtcgcctctacgctgatacattttgggagagagagaggaagtgagctaggatcatgaacccatgtcgaggataggcaatatactgaatgagaatgaactgatctgtaggtggcgccaaccatgactgtgggctgtggcagttgatttagtcccttctcctttttc

SEQ ID NO: 31504 - protein, 274 aa, Zea mays subsp. mays
  peptide (1)..(274): Ceres Seq. ID no. 12360027
  misc_feature (1)..(244): NCBI GI NO: 37537056 NR Description: putative AT-Hook DNA-binding protein
  misc_feature (1)..(268): NCBI GI NO: 38346715 NR Description: OSJNBa0086O06.13
  misc_feature (1)..(235): NCBI GI NO: 32352210 NR Description: hypothetical protein
  misc_feature (19)..(196): NCBI GI NO: 22328578 NR Description: putative DNA-binding protein; protein id:At4g12080
  misc_feature (1)..(212): NCBI GI NO: 14326504 NR Description: At2g33620/F4P9.39 [Arabidopsis thaliana]
  misc_feature (1)..(212): NCBI GI NO: 2598227 NR Description: AT-hook protein 1 [Arabidopsis thaliana]
  misc_feature (1)..(212): NCBI GI NO: 25408293 NR Description: AT-hook DNA-binding protein (AHP1)
  misc_feature (1)..(212): NCBI GI NO: 18403332 NR Description: AT-hook DNA-binding protein
  misc_feature (1)..(187): NCBI GI NO: 15225902 NR Description: putative AT-hook DNA-binding protein
  misc_feature (18)..(209): NCBI GI NO: 30696854 NR Description: DNA-binding protein -related
MPSEAAGDSGVRAAGHSQSEHANNMSSERRRGRPRGSGRRQILATLGEWYALSAGGSFTPHVIIVGTGEDVAARVMSFSQKGPRSVCILSANGTISNVTLRQPGSSGSTFTYEGRFEILQLMGSITMAEEGRKRTGGLSVSLAGPDGRVVGGVVAGMLRAASPIQVIVGSFLPNSLKQHQRRMSAQQQLSPVPALPEPEAPPPVLTAATPISLAGPGDGFHDAPPPSAAPPQPHASAMNLNATGFPVAGWPASSPQPMVYRASPDINVSLTPQE

SEQ ID NO: 31505 - protein, 250 aa, Zea mays subsp. mays
  peptide (1)..(250): Ceres Seq. ID no. 12360028
  misc_feature (1)..(220): NCBI GI NO: 37537056 NR Description: putative AT-Hook DNA-binding protein
  misc_feature (1)..(244): NCBI GI NO: 38346715 NR Description: OSJNBa0086O06.13
  misc_feature (1)..(211): NCBI GI NO: 32352210 NR Description: hypothetical protein
  misc_feature (1)..(172): NCBI GI NO: 22328578 NR Description: putative DNA-binding protein; protein id:At4g12080
  misc_feature (1)..(188): NCBI GI NO: 14326504 NR Description: At2g33620/F4P9.39 [Arabidopsis thaliana]
  misc_feature (1)..(188): NCBI GI NO: 2598227 NR Description: AT-hook protein 1 [Arabidopsis thaliana]
  misc_feature (1)..(188): NCBI GI NO: 18403332 NR Description: AT-hook DNA-binding protein
  misc_feature (1)..(188): NCBI GI NO: 25408293 NR Description: AT-hook DNA-binding protein (AHP1)
  misc_feature (1)..(163): NCBI GI NO: 15225902 NR Description: putative AT-hook DNA-binding protein
  misc_feature (1)..(185): NCBI GI NO: 30696854 NR Description: DNA-binding protein -related
MSSERRRGRPRGSGRRQILATLGEWYALSAGGSFTPHVIIVGTGEDVAARVMSFSQKGPRSVCILSANGTISNVTLRQPGSSGSTFTYEGRFEILQLMGSITMAEEGRKRTGGLSVSLAGPDGRVVGGVVAGMLRAASPIQVIVGSFLPNSLKQHQRRMSAQQQLSPVPALPEPEAPPPVLTAATPISLAGPGDGFHDAPPPSAAPPQPHASAMNLNATGFPVAGWPASSPQPMVYRASPDINVSLTPQE

SEQ ID NO: 31506 - protein, 199 aa, Zea mays subsp. mays
  peptide (1)..(199): Ceres Seq. ID no. 12360029
  misc_feature (1)..(169): NCBI GI NO: 37537056 NR Description: putative AT-Hook DNA-binding protein
  misc_feature (1)..(193): NCBI GI NO: 38346715 NR Description: OSJNBa0086O06.13
  misc_feature (1)..(160): NCBI GI NO: 32352210 NR Description: hypothetical protein
  misc_feature (1)..(121): NCBI GI NO: 22328578 NR Description: putative DNA-binding protein; protein id:At4g12080
  misc_feature (1)..(137): NCBI GI NO: 14326504 NR Description: At2g33620/F4P9.39 [Arabidopsis thaliana]
  misc_feature (1)..(137): NCBI GI NO: 2598227 NR Description: AT-hook protein 1 [Arabidopsis thaliana]
  misc_feature (1)..(137): NCBI GI NO: 25408293 NR Description: AT-hook DNA-binding protein (AHP1)
  misc_feature (1)..(137): NCBI GI NO: 18403332 NR Description: AT-hook DNA-binding protein
  misc_feature (1)..(112): NCBI GI NO: 15225902 NR Description: putative AT-hook DNA-binding protein
  misc_feature (1)..(134): NCBI GI NO: 30696854 NR Description: DNA-binding protein -related
MSFSQKGPRSVCILSANGTISNVTLRQPGSSGSTFTYEGRFEILQLMGSITMAEEGRKRTGGLSVSLAGPDGRVVGGVVAGMLRAASPIQVIVGSFLPNSLKQHQRRMSAQQQLSPVPALPEPEAPPPVLTAATPISLAGPGDGFHDAPPPSAAPPQPHASAMNLNATGFPVAGWPASSPQPMVYRASPDINVSLTPQE

SEQ ID NO: 31507 - DNA, 1439 bp, Zea mays subsp. mays
  misc_feature (1)..(1439): Ceres Seq. ID no. 12382324
acaacatacagatacagctcggccggagctagagtagcgggcggcggcgagaggagaaaacaaggaagcgaggagatggcgggcgggggcagggatgggccggcggcgcgtcttctccggcgcgtccccgccgccgtgtccgtcctcttgatgctgacgctgtgctcccccgggccgcccggcgcggtggtggtggtgtcggcccggaaggtgggcgagacgtgcgcgctggaccggaactgcgacgccgggctgcactgcgagacgtgtgtggccgacggcaacgtgcggccgcgctgcacccgcgtcgctcccgtcgacccgcagaccaaggcgcgggacctgccgttcaaccgctacgcgtggctgacgacgcacaactcgttcgcgcggctcgggcagcggtcgcagaccggggtcgccatagccacgccgtggaaccagcaggacaccgtcaccgagcagctcaacaacggcgttaggggtctgatgctggacatgtacgacttccgcaacgacgtctggctctgccactcctacggcggcatctgccagaacttcaccgcctttcaaccggcggtgaacgtgctccgcgaggtggagcgcttcctgtcgcggaaccccgccgaggtggtgaccatcttcgtggaggactacgtggagtcgcccatggggctcacccgggtgctcaacgcgtcgggcctcgcgcgctacgtgctccccgcctggcgcatgcccaagagcggcggcgactggccgctgctcagcgacatggtccgcgacaaccaccgcctgctcgtcttcacctccaaggccgctaaggaggccgccgagggcatcgcctacgagtggcgctacgtcgtcgagaaccagtacgggaccaaggggatggtgaaggggacgtgccacaaccgcgccgagtcggccgccatgaacgacctgtcgaggtcgctggtgctcaactacttcagggacctcccgaacctgccggcggcgtgcaaggacaactcggcgcagctgctggacatggtcaccgcctgccacgacaagtccggggaccggtggcccaacttcatcgccgtggacttctacaagaggagcgaccggggcggcgcggcggaggccacggacaaggcgaacggcggcctagtctgcggctgcgggagcatatcggcctgcaacgccaactggacatgcactcccaggcacggcaggacgcccagaggcatcttcaacgcctcatctgacgcagcggcgtggaggccgccgccgccggtgctgcaatggcagaggctcatcctgctgccttttctccttgctcttcttatgggcctgtgagttctacgtattttgttgtatagacgggtacggatcggtttggttgcaggcaccgagcgtattttgttgtgtatatatacacacagatgacagattggtcg

SEQ ID NO: 31508 - protein, 445 aa, Zea mays subsp. mays
  peptide (1)..(445): Ceres Seq. ID no. 12382325
  misc_feature (40)..(443): NCBI GI NO: 38345461 NR Description: OSJNBa0042L16.16
  misc_feature (40)..(443): NCBI GI NO: 34897530 NR Description: OSJNBa0042L16.2
  misc_feature (65)..(399): NCBI GI NO: 18402763 NR Description: expressed protein; protein id: At1g49740
  misc_feature (60)..(407): NCBI GI NO: 15230348 NR Description: unknown protein; protein id: At3g19310.1
  misc_feature (68)..(407): NCBI GI NO: 27754722 NR Description: unknown protein [Arabidopsis thaliana]
  misc_feature (67)..(398): NCBI GI NO: 38637049 NR Description: MAP3K-like protein kinase
  misc_feature (70)..(396): NCBI GI NO: 25407778 NR Description: MAP3K-like protein kinase
  misc_feature (43)..(424): NCBI GI NO: 38345515 NR Description: OSJNBa0039K24.18
  misc_feature (45)..(393): NCBI GI NO: 18425155 NR Description: putative protein; protein id: At5g67130
  misc_feature (45)..(393): NCBI GI NO: 21593427 NR Description: unknown [Arabidopsis thaliana]
TTYRYSSAGARVAGGGERRKQGSEEMAGGGRDGPAARLLRRVPAAVSVLLMLTLCSPGPPGAVVVVSARKVGETCALDRNCDAGLHCETCVADGNVRPRCTRVAPVDPQTKARDLPFNRYAWLTTHNSFARLGQRSQTGVAIATPWNQQDTVTEQLNNGVRGLMLDMYDFRNDVWLCHSYGGICQNFTAFQPAVNVLREVERFLSRNPAEVVTIFVEDYVESPMGLTRVLNASGLARYVLPAWRMPKSGGDWPLLSDMVRDNHRLLVFTSKAAKEAAEGIAYEWRYVVENQYGTKGMVKGTCHNRAESAAMNDLSRSLVLNYFRDLPNLPAACKDNSAQLLDMVTACHDKSGDRWPNFIAVDFYKRSDRGGAAEATDKANGGLVCGCGSISACNANWTCTPRHGRTPRGIFNASSDAAAWRPPPPVLQWQRLILLPFLLALLMGL

SEQ ID NO: 31509 - protein, 420 aa, Zea mays subsp. mays
  peptide (1)..(420): Ceres Seq. ID no. 12382326
  misc_feature (15)..(418): NCBI GI NO: 38345461 NR Description: OSJNBa0042L16.16
  misc_feature (15)..(418): NCBI GI NO: 34897530 NR Description: OSJNBa0042L16.2
  misc_feature (40)..(374): NCBI GI NO: 18402763 NR Description: expressed protein; protein id: At1g49740
  misc_feature (35)..(382): NCBI GI NO: 15230348 NR Description: unknown protein; protein id: At3g19310.1
  misc_feature (43)..(382): NCBI GI NO: 27754722 NR Description: unknown protein [Arabidopsis thaliana]
  misc_feature (42)..(373): NCBI GI NO: 38637049 NR Description: MAP3K-like protein kinase
  misc_feature (45)..(371): NCBI GI NO: 25407778 NR Description: MAP3K-like protein kinase
  misc_feature (18)..(399): NCBI GI NO: 38345515 NR Description: OSJNBa0039K24.18
  misc_feature (20)..(368): NCBI GI NO: 18425155 NR Description: putative protein; protein id: At5g67130
  misc_feature (20)..(368): NCBI GI NO: 21593427 NR Description: unknown [Arabidopsis thaliana]
MAGGGRDGPAARLLRRVPAAVSVLLMLTLCSPGPPGAVVVVSARKVGETCALDRNCDAGLHCETCVADGNVRPRCTRVAPVDPQTKARDLPFNRYAWLTTHNSFARLGQRSQTGVAIATPWNQQDTVTEQLNNGVRGLMLDMYDFRNDVWLCHSYGGICQNFTAFQPAVNVLREVERFLSRNPAEVVTIFVEDYVESPMGLTRVLNASGLARYVLPAWRMPKSGGDWPLLSDMVRDNHRLLVFTSKAAKEAAEGIAYEWRYVVENQYGTKGMVKGTCHNRAESAAMNDLSRSLVLNYFRDLPNLPAACKDNSAQLLDMVTACHDKSGDRWPNFIAVDFYKRSDRGGAAEATDKANGGLVCGCGSISACNANWTCTPRHGRTPRGIFNASSDAAAWRPPPPVLQWQRLILLPFLLALLMGL

SEQ ID NO: 31510 - protein, 395 aa, Zea mays subsp. mays
  peptide (1)..(395): Ceres Seq. ID no. 12382327
  misc_feature (1)..(393): NCBI GI NO: 38345461 NR Description: OSJNBa0042L16.16
  misc_feature (1)..(393): NCBI GI NO: 34897530 NR Description: OSJNBa0042L16.2
  misc_feature (15)..(349): NCBI GI NO: 18402763 NR Description: expressed protein; protein id: At1g49740
  misc_feature (10)..(357): NCBI GI NO: 15230348 NR Description: unknown protein; protein id: At3g19310.1
  misc_feature (18)..(357): NCBI GI NO: 27754722 NR Description: unknown protein [Arabidopsis thaliana]
  misc_feature (17)..(348): NCBI GI NO: 38637049 NR Description: MAP3K-like protein kinase
  misc_feature (20)..(346): NCBI GI NO: 25407778 NR Description: MAP3K-like protein kinase
  misc_feature (1)..(374): NCBI GI NO: 38345515 NR Description: OSJNBa0039K24.18
  misc_feature (1)..(343): NCBI GI NO: 18425155 NR Description: putative protein; protein id: At5g67130
  misc_feature (1)..(343): NCBI GI NO: 21593427 NR Description: unknown [Arabidopsis thaliana]
MLTLCSPGPPGAVVVVSARKVGETCALDRNCDAGLHCETCVADGNVRPRCTRVAPVDPQTKARDLPFNRYAWLTTHNSFARLGQRSQTGVAIATPWNQQDTVTEQLNNGVRGLMLDMYDFRNDVWLCHSYGGICQNFTAFQPAVNVLREVERFLSRNPAEVVTIFVEDYVESPMGLTRVLNASGLARYVLPAWRMPKSGGDWPLLSDMVRDNHRLLVFTSKAAKEAAEGIAYEWRYVVENQYGTKGMVKGTCHNRAESAAMNDLSRSLVLNYFRDLPNLPAACKDNSAQLLDMVTACHDKSGDRWPNFIAVDFYKRSDRGGAAEATDKANGGLVCGCGSISACNANWTCTPRHGRTPRGIFNASSDAAAWRPPPPVLQWQRLILLPFLLALLMGL

SEQ ID NO: 31511 - DNA, 1418 bp, Zea mays subsp. mays
  misc_feature (1)..(1418): Ceres Seq. ID no. 12411535
agtggcactcgcagactcgcttctccccgaaaaacggctgaaccctgaaccctcactacgtcccgccgcctgcttcacagttcaccccggccatggtctccaccgctcgcgccgccctcccgacgccccacctctctctcgcttcctcctcccgccgcaggcccatctgtttttcacgccctcctccgcacctcgcctgcgcggcggcgctgccacctccatcaccgccggcagctccgcctcgccgcagcagcaccaggtcaccacgcgcctgggcgacgtgatagaggcgcagcagttcgatcgggactcgcttaacgagatctttgaggtggcgcgggagatggaggccgtggagcggagctcccacggcgctcccagtcgcgtcctcgaggggtacctcatggccactctcttctacgagccctccacgcgcacgcgcctctccttcgaggccgctatgcggaggctcggcggggaggtgctcaccaccgagaacgcgcgcgagttctcttccgccgccaagggggagacactcaagatacataagaaccgttgagggttattctgatattattgttctgagacattttgaaagtggagctgcaaggagagcagatatactgcgaatattctgttattaatgcaggtgatgggccagggcaacatccaacccaggctttgttggatgtttatacaataaagagagaaattggcacactagatggaataaaacttggtttggttggtgaccttgctaatgggaggacagttcgttctctggcttacttgattgctaagtaccagaacattaagatatactttgtatctccagatgttgttaaaatgaaggatgatatcaaggactacttaaattcccaaggtgttgaatgggaagaatgttcagatttgttggaggtggcatccaagtgtgatgttatttatcaaacacgtattcaaaaagaaagatttggtgagaggattgatctttataaagctgctcgtggtaagtacattgtggataagaaggtcttagatgtgctgccaaagcatgctgtgatcatgcatccccttccaaggcttgatgagatcacggcagaagtcgatagtgatccaagagctgcatattttaggcaggctaagaatggcctctacataaggatggcattgctcaaacttctgcttgttggtcactgacatatctgctagtgtgtgagcttgtgctgcgtcaagggatgaggaaatgtactaataatcagcagctcctgtcaaaattcaacgttcctgcgctgtcagggtaataaaagtctggatccatgctggagtgcagcaaagtttggcatggccatgttaatgtacaaatggtgttcgaaatagagttttgctgttctcatgtgatgtgagaacatggaacgtcg

SEQ ID NO: 31512 - protein, 185 aa, Zea mays subsp. mays
  peptide (1)..(185): Ceres Seq. ID no. 12411536
  misc_feature (92)..(180): Pfam Name: Pfam Description:  Aspartate/ornithine carbamoyltransferase
  misc_feature (44)..(180): NCBI GI NO: 9453916 NR Description: aspartate carbamoyl transferase
  misc_feature (90)..(180): NCBI GI NO: 3914501 NR Description: Aspartate carbamoyltransferase 3
  misc_feature (90)..(180): NCBI GI NO: 3914503 NR Description: Aspartate carbamoyltransferase 2
  misc_feature (91)..(180): NCBI GI NO: 21535795 NR Description: aspartate carbamoyltransferase [Solanum tuberosum]
  misc_feature (91)..(180): NCBI GI NO: 15231112 NR Description: aspartate carbamoyltransferase precursor
  misc_feature (91)..(180): NCBI GI NO: 1076293 NR Description: aspartate carbamoyltransferase (EC 2
  misc_feature (90)..(180): NCBI GI NO: 3914502 NR Description: Aspartate carbamoyltransferase 1
  misc_feature (91)..(180): NCBI GI NO: 15215706 NR Description: AT3g20330/MQC12_8 [Arabidopsis thaliana]
  misc_feature (132)..(180): NCBI GI NO: 479713 NR Description: aspartate carbamoyltransferase (EC 2
  misc_feature (132)..(180): NCBI GI NO: 397385 NR Description: aspartate carbamoyltransferase
VALADSLLPEKRLNPEPSLRPAACFTVHPGHGLHRSRRPPDAPPLSRFLLPPQAHLFFTPSSAPRLRGGAATSITAGSSASPQQHQVTTRLGDVIEAQQFDRDSLNEIFEVAREMEAVERSSHGAPSRVLEGYLMATLFYEPSTRTRLSFEAAMRRLGGEVLTTENAREFSSAAKGETLKIHKNR

SEQ ID NO: 31513 - protein, 116 aa, Zea mays subsp. mays
  peptide (1)..(116): Ceres Seq. ID no. 12411537
  misc_feature (1)..(113): Pfam Name: Pfam Description:  Aspartate/ornithine carbamoyltransferase
  misc_feature (1)..(115): NCBI GI NO: 9453916 NR Description: aspartate carbamoyl transferase
  misc_feature (1)..(115): NCBI GI NO: 3914501 NR Description: Aspartate carbamoyltransferase 3
  misc_feature (1)..(115): NCBI GI NO: 3914503 NR Description: Aspartate carbamoyltransferase 2
  misc_feature (1)..(115): NCBI GI NO: 21535795 NR Description: aspartate carbamoyltransferase [Solanum tuberosum]
  misc_feature (1)..(115): NCBI GI NO: 15231112 NR Description: aspartate carbamoyltransferase precursor
  misc_feature (1)..(115): NCBI GI NO: 1076293 NR Description: aspartate carbamoyltransferase (EC 2
  misc_feature (1)..(115): NCBI GI NO: 3914502 NR Description: Aspartate carbamoyltransferase 1
  misc_feature (1)..(115): NCBI GI NO: 15215706 NR Description: AT3g20330/MQC12_8 [Arabidopsis thaliana]
  misc_feature (1)..(115): NCBI GI NO: 479713 NR Description: aspartate carbamoyltransferase (EC 2
  misc_feature (1)..(115): NCBI GI NO: 397385 NR Description: aspartate carbamoyltransferase
MKDDIKDYLNSQGVEWEECSDLLEVASKCDVIYQTRIQKERFGERIDLYKAARGKYIVDKKVLDVLPKHAVIMHPLPRLDEITAEVDSDPRAAYFRQAKNGLYIRMALLKLLLVGH

SEQ ID NO: 31514 - DNA, 1569 bp, Zea mays subsp. mays
  misc_feature (1)..(1569): Ceres Seq. ID no. 12349393
aagaagagaccaagattagtaccacttgtactgtacactcctcgttccgcgtgcgaagcgaaccctgttccatgttcttgaatctctctgagcccagtccttgtagctagcagatcagatcgctcaggcggaaagatcgagagaaggtcgccccaggatcgagatctagagcgagaaaggtttaagagggaaaggcgcggcaaggagtcgagagaatagaatgttcccttcctccaagaagcaggccagcaccggtgccgcgaacccaaatgatcggcctatgtgcgggcaaggcggcgactccggcggtctcgtcctcaccaccgaccccaagccccgcctccggtggacacccgagctccatgaccgcttcgtcgatgccgtcgcccagctcggaggcccggacaaggcaacgcccaagaccatcatgagggttatgggagtcaagggcctcaccctctaccacctcaagagtcaccttcagaaattcaggctagggaagcagcacaaggagttgggtgaccatacagcaatggagatgcaacgtagcgtggcctcttcttcaggcatgatagcaagaagcatgaacgaccgcagcgtgaatgtgaacgaggccttaaggatccaaatggaagtccaaagaaggctccatggagaactagaggtgcagaagcacctccagatgagggttgaagcccaggggaagtacatgcagtccatcgtggagaaagcataccaagccctcgggtccagcgactgcgccacgtggcccgctgggtacagaactctaggcagccaaggggtccttgacatcggcaccagctccacgagcttctcgtccgtccaggacctgcagtgcttctatggaggaagcagccacatggaccagctcctgcatcagatggagaggccaatggatggcttcctgacgctgggcgagagctgcttcattgggtccgcggacaacaagaaggaccctaataaccattgcagctccagtggcaagagctcgatgatgtgggccagcgaagagcagcaggcaaagagcggcaacgatcagcttcagatggggtcgtcgacaaggatggagggtgcaggcattgatgtcatggatccagtagtcaccgggctgtacgagggcgccgtgtcgggagactccatggacagcaagggttttgagggttcgaactccaggctcgagatgaagccgcctgcacaacaagcacctgtaggaagtcagaggatacgcatatagtcgtccaatatataatggtttggaactcacgtaaagaactgtatactacaatatatggataagcaaggtcaagctaaggtatttaaatgcaagtgtcagttttgttgtgaaccatcaaagttcagacgattagcgtgtgatcggagttgtagtacatgcagtcattagttttgttggatacaagatattatggagatcaattctccatatatatgtttgtttattttgtccctaagattcgccatatatatgctgtattatattggatttgtgtgacacccttgtaacattgatcagagatcttttgtgggtgc

SEQ ID NO: 31515 - protein, 344 aa, Zea mays subsp. mays
  peptide (1)..(344): Ceres Seq. ID no. 12349394
  misc_feature (40)..(91): Pfam Name: Pfam Description:  Myb-like DNA-binding domain
  misc_feature (1)..(337): NCBI GI NO: 30699418 NR Description: transfactor -related [Arabidopsis thaliana]
  misc_feature (1)..(204): NCBI GI NO: 25406584 NR Description: hypothetical protein T8K14.15
  misc_feature (31)..(175): NCBI GI NO: 18414049 NR Description: putative protein; protein id: At4g13640
  misc_feature (26)..(265): NCBI GI NO: 18404044 NR Description: transfactor, putative; protein id: At3g24120
  misc_feature (4)..(177): NCBI GI NO: 34394528 NR Description: transfactor-like protein
  misc_feature (23)..(208): NCBI GI NO: 29647444 NR Description: P0410E11.32
  misc_feature (23)..(253): NCBI GI NO: 14596181 NR Description: transfactor-like protein [Arabidopsis thaliana]
  misc_feature (23)..(253): NCBI GI NO: 15238770 NR Description: transfactor-like protein; protein id: At5g18240
  misc_feature (23)..(253): NCBI GI NO: 28059694 NR Description: transfactor-like protein [Arabidopsis thaliana]
  misc_feature (18)..(179): NCBI GI NO: 32470629 NR Description: putative phosphate starvation response regulator
MFPSSKKQASTGAANPNDRPMCGQGGDSGGLVLTTDPKPRLRWTPELHDRFVDAVAQLGGPDKATPKTIMRVMGVKGLTLYHLKSHLQKFRLGKQHKELGDHTAMEMQRSVASSSGMIARSMNDRSVNVNEALRIQMEVQRRLHGELEVQKHLQMRVEAQGKYMQSIVEKAYQALGSSDCATWPAGYRTLGSQGVLDIGTSSTSFSSVQDLQCFYGGSSHMDQLLHQMERPMDGFLTLGESCFIGSADNKKDPNNHCSSSGKSSMMWASEEQQAKSGNDQLQMGSSTRMEGAGIDVMDPVVTGLYEGAVSGDSMDSKGFEGSNSRLEMKPPAQQAPVGSQRIRI

SEQ ID NO: 31516 - protein, 324 aa, Zea mays subsp. mays
  peptide (1)..(324): Ceres Seq. ID no. 12349395
  misc_feature (20)..(71): Pfam Name: Pfam Description:  Myb-like DNA-binding domain
  misc_feature (1)..(317): NCBI GI NO: 30699418 NR Description: transfactor -related [Arabidopsis thaliana]
  misc_feature (1)..(184): NCBI GI NO: 25406584 NR Description: hypothetical protein T8K14.15
  misc_feature (11)..(155): NCBI GI NO: 18414049 NR Description: putative protein; protein id: At4g13640
  misc_feature (6)..(245): NCBI GI NO: 18404044 NR Description: transfactor, putative; protein id: At3g24120
  misc_feature (1)..(157): NCBI GI NO: 34394528 NR Description: transfactor-like protein
  misc_feature (3)..(188): NCBI GI NO: 29647444 NR Description: P0410E11.32
  misc_feature (3)..(233): NCBI GI NO: 14596181 NR Description: transfactor-like protein [Arabidopsis thaliana]
  misc_feature (3)..(233): NCBI GI NO: 28059694 NR Description: transfactor-like protein [Arabidopsis thaliana]
  misc_feature (3)..(233): NCBI GI NO: 15238770 NR Description: transfactor-like protein; protein id: At5g18240
  misc_feature (1)..(159): NCBI GI NO: 32470629 NR Description: putative phosphate starvation response regulator
MCGQGGDSGGLVLTTDPKPRLRWTPELHDRFVDAVAQLGGPDKATPKTIMRVMGVKGLTLYHLKSHLQKFRLGKQHKELGDHTAMEMQRSVASSSGMIARSMNDRSVNVNEALRIQMEVQRRLHGELEVQKHLQMRVEAQGKYMQSIVEKAYQALGSSDCATWPAGYRTLGSQGVLDIGTSSTSFSSVQDLQCFYGGSSHMDQLLHQMERPMDGFLTLGESCFIGSADNKKDPNNHCSSSGKSSMMWASEEQQAKSGNDQLQMGSSTRMEGAGIDVMDPVVTGLYEGAVSGDSMDSKGFEGSNSRLEMKPPAQQAPVGSQRIRI

SEQ ID NO: 31517 - protein, 275 aa, Zea mays subsp. mays
  peptide (1)..(275): Ceres Seq. ID no. 12349396
  misc_feature (1)..(268): NCBI GI NO: 30699418 NR Description: transfactor -related [Arabidopsis thaliana]
  misc_feature (1)..(135): NCBI GI NO: 25406584 NR Description: hypothetical protein T8K14.15
  misc_feature (1)..(106): NCBI GI NO: 18414049 NR Description: putative protein; protein id: At4g13640
  misc_feature (1)..(196): NCBI GI NO: 18404044 NR Description: transfactor, putative; protein id: At3g24120
  misc_feature (1)..(108): NCBI GI NO: 34394528 NR Description: transfactor-like protein
  misc_feature (1)..(139): NCBI GI NO: 29647444 NR Description: P0410E11.32
  misc_feature (1)..(184): NCBI GI NO: 14596181 NR Description: transfactor-like protein [Arabidopsis thaliana]
  misc_feature (1)..(184): NCBI GI NO: 15238770 NR Description: transfactor-like protein; protein id: At5g18240
  misc_feature (1)..(184): NCBI GI NO: 28059694 NR Description: transfactor-like protein [Arabidopsis thaliana]
  misc_feature (1)..(110): NCBI GI NO: 32470629 NR Description: putative phosphate starvation response regulator
MRVMGVKGLTLYHLKSHLQKFRLGKQHKELGDHTAMEMQRSVASSSGMIARSMNDRSVNVNEALRIQMEVQRRLHGELEVQKHLQMRVEAQGKYMQSIVEKAYQALGSSDCATWPAGYRTLGSQGVLDIGTSSTSFSSVQDLQCFYGGSSHMDQLLHQMERPMDGFLTLGESCFIGSADNKKDPNNHCSSSGKSSMMWASEEQQAKSGNDQLQMGSSTRMEGAGIDVMDPVVTGLYEGAVSGDSMDSKGFEGSNSRLEMKPPAQQAPVGSQRIRI

SEQ ID NO: 31518 - DNA, 1828 bp, Zea mays subsp. mays
  misc_feature (1)..(1828): Ceres Seq. ID no. 12356837
atgcatagtaaagttagcaatgtcgatggattacttggctgctgctgtacccgtgaccttggctctgggagtgggatctatcttgttggtcttacgatggacgtactgccgccgccgaacaagcgccgaagaagtgagactgccgccggggtcaaggggcctcctgttcctgggggagacgctccactacctggcagcgtcctccaccccgggggtattgccaccattcttccagcgacggttggagaggtatggccccatcttccggacgaacctggtcggggaggacctcgtcgtgtcgctggacgcggagctgaacgcgcacgtgctgaagcaggaggagcgcggcttccagatctggtacccgccctccttcatgcgcgtcttcggcgccgacaacatcaccgccaagctcggcgtgctccaccactacatgaggaccctcgtgctccgcctcttcggccaccagaccgtccgctccgtgctgctgcacgacgtgcagcggagcgcgcgcgacgagctgcgctcatggctcggccgcccggacgtcgaggtcaggacggccacctccaggatgatatttggcgtcactgccaagaagctgatcagccatgacgacgcagcatctggagaaacgttgtggagatgcttccacgactggacttcggggctgctctcgtttccggtttccattcccggcacaaccttctacagatgcatgcagggacgtaagaaggttatgacgatgctgaaacagcagctcgtcgagcgtcgacggaacgcagcggagcgcgagacagaggattttcttcgatctcgtgatcgatgaactgaacaagccagaccctatgatggacgagagcaccgcgttggacttgctgttcaccatgttgtttgcgagccatgagacgacgtccatggtattaaccgtcatactcaagtatctgacggacaaccccaaagctttgcaagagctgacagaggagcacgaaagaatcctggaaagtagggccaatccaggctctgacctcacgtgggaggagtacaagtctatgaaattcacatctcatgttgtacatgagtcgctaaggctcgcaaacatcgcactggccatgttcaggaaagcaaatcaggatgtgcacataaatgggtacacaattccaaaaggatcaaagatcatgatgtgtccactagcatcgcacttgaatacggaggtctacgaggacccctcagtgttcaatccatggagatggaaggatattcctgaaccagtaggcacttctaaggacttcatggccttcgggggtggtttgcgcctatgtgctggtgccgacttttccaagatgcagatggctatgttcctccattacttggtcacaaattacaggtggaaacccgtcggcggtgggacaatgctattctatccaggactgcaatttccagaaggcttccacatccagcttcttccaaaaatcccaaacgtggttccataaaccctatgaagaaatatgaatacaaataatttaagcaaatattctaaatgtaccatggggaattgaagttcgataacgatatggtacgggctaatttggtgatccacttgttaccaaatcaaccctaatggtagcaggtcggattgtcagaacaaataatagtttcaccaaacagaaggggagtatgtatgtgtgtaacattttatagttataaataatagtagagtaaattctgctcgttgtgtaacaactatgcaggtgagtaaaaattggttcagcatattgtatacattatgcccagttcaatgaaaaaaaaactttgttgtttggtgcgt

SEQ ID NO: 31519 - protein, 275 aa, Zea mays subsp. mays
  peptide (1)..(275): Ceres Seq. ID no. 12356838
  misc_feature (92)..(270): NCBI GI NO: 27764671 NR Description: putative hydroxylase
  misc_feature (5)..(269): NCBI GI NO: 20520627 NR Description: putative cytochrome P450
  misc_feature (5)..(269): NCBI GI NO: 38567920 NR Description: OSJNBa0088I22.16
  misc_feature (20)..(269): NCBI GI NO: 30682922 NR Description: cytochrome P450, putative [Arabidopsis thaliana]
  misc_feature (20)..(269): NCBI GI NO: 9502380 NR Description: T12C24.27 [Arabidopsis thaliana]
  misc_feature (27)..(260): NCBI GI NO: 38567916 NR Description: OSJNBa0088I22.12
  misc_feature (92)..(269): NCBI GI NO: 37531698 NR Description: putative cytochrome P450
  misc_feature (7)..(269): NCBI GI NO: 18483228 NR Description: putative cytochrome P450-like protein
  misc_feature (156)..(270): NCBI GI NO: 28564842 NR Description: putative cytochrome P450
  misc_feature (46)..(138): NCBI GI NO: 28564842 NR Description: putative cytochrome P450
CIVKLAMSMDYLAAAVPVTLALGVGSILLVLRWTYCRRRTSAEEVRLPPGSRGLLFLGETLHYLAASSTPGVLPPFFQRRLERYGPIFRTNLVGEDLVVSLDAELNAHVLKQEERGFQIWYPPSFMRVFGADNITAKLGVLHHYMRTLVLRLFGHQTVRSVLLHDVQRSARDELRSWLGRPDVEVRTATSRMIFGVTAKKLISHDDAASGETLWRCFHDWTSGLLSFPVSIPGTTFYRCMQGRKKVMTMLKQQLVERRRNAAERETEDFLRSRDR

SEQ ID NO: 31520 - protein, 269 aa, Zea mays subsp. mays
  peptide (1)..(269): Ceres Seq. ID no. 12356839
  misc_feature (86)..(264): NCBI GI NO: 27764671 NR Description: putative hydroxylase
  misc_feature (1)..(263): NCBI GI NO: 20520627 NR Description: putative cytochrome P450
  misc_feature (1)..(263): NCBI GI NO: 38567920 NR Description: OSJNBa0088I22.16
  misc_feature (14)..(263): NCBI GI NO: 30682922 NR Description: cytochrome P450, putative [Arabidopsis thaliana]
  misc_feature (14)..(263): NCBI GI NO: 9502380 NR Description: T12C24.27 [Arabidopsis thaliana]
  misc_feature (21)..(254): NCBI GI NO: 38567916 NR Description: OSJNBa0088I22.12
  misc_feature (86)..(263): NCBI GI NO: 37531698 NR Description: putative cytochrome P450
  misc_feature (1)..(263): NCBI GI NO: 18483228 NR Description: putative cytochrome P450-like protein
  misc_feature (150)..(264): NCBI GI NO: 28564842 NR Description: putative cytochrome P450
  misc_feature (40)..(132): NCBI GI NO: 28564842 NR Description: putative cytochrome P450
MSMDYLAAAVPVTLALGVGSILLVLRWTYCRRRTSAEEVRLPPGSRGLLFLGETLHYLAASSTPGVLPPFFQRRLERYGPIFRTNLVGEDLVVSLDAELNAHVLKQEERGFQIWYPPSFMRVFGADNITAKLGVLHHYMRTLVLRLFGHQTVRSVLLHDVQRSARDELRSWLGRPDVEVRTATSRMIFGVTAKKLISHDDAASGETLWRCFHDWTSGLLSFPVSIPGTTFYRCMQGRKKVMTMLKQQLVERRRNAAERETEDFLRSRDR

SEQ ID NO: 31521 - protein, 267 aa, Zea mays subsp. mays
  peptide (1)..(267): Ceres Seq. ID no. 12356840
  misc_feature (84)..(262): NCBI GI NO: 27764671 NR Description: putative hydroxylase
  misc_feature (1)..(261): NCBI GI NO: 20520627 NR Description: putative cytochrome P450
  misc_feature (1)..(261): NCBI GI NO: 38567920 NR Description: OSJNBa0088I22.16
  misc_feature (12)..(261): NCBI GI NO: 30682922 NR Description: cytochrome P450, putative [Arabidopsis thaliana]
  misc_feature (12)..(261): NCBI GI NO: 9502380 NR Description: T12C24.27 [Arabidopsis thaliana]
  misc_feature (19)..(252): NCBI GI NO: 38567916 NR Description: OSJNBa0088I22.12
  misc_feature (84)..(261): NCBI GI NO: 37531698 NR Description: putative cytochrome P450
  misc_feature (1)..(261): NCBI GI NO: 18483228 NR Description: putative cytochrome P450-like protein
  misc_feature (148)..(262): NCBI GI NO: 28564842 NR Description: putative cytochrome P450
  misc_feature (38)..(130): NCBI GI NO: 28564842 NR Description: putative cytochrome P450
MDYLAAAVPVTLALGVGSILLVLRWTYCRRRTSAEEVRLPPGSRGLLFLGETLHYLAASSTPGVLPPFFQRRLERYGPIFRTNLVGEDLVVSLDAELNAHVLKQEERGFQIWYPPSFMRVFGADNITAKLGVLHHYMRTLVLRLFGHQTVRSVLLHDVQRSARDELRSWLGRPDVEVRTATSRMIFGVTAKKLISHDDAASGETLWRCFHDWTSGLLSFPVSIPGTTFYRCMQGRKKVMTMLKQQLVERRRNAAERETEDFLRSRDR

SEQ ID NO: 31522 - DNA, 2170 bp, Zea mays subsp. mays
  misc_feature (1)..(2170): Ceres Seq. ID no. 12416076
gcacgagaccattacctagaacatcctaatcgaaaagagacaaccggcacccgccgatcgctcgctggtgggatgaagaaatgctccggcgtgctcttcatcctcacactcgccgtcgtgctcttcctcctctcgccgtcgccctcccccactccaccccccaacaccgcacccaatggcccgatcaccgacctcctccccaccctccccggcctttcggacctctaccctcccgctcccaactccactgcacatctctcctggggcctcctccgcccgctcctctgccgctccgacgcgctcccgggaacctctgcaggcgtcctcgaggcagccgaagcctggcggaatctcaccctggctgtcaccgccgcggcaagcgaggaggaggcgcgtctccaaggactccgctgctcatcgtccgtgggaggggatctacgcacgggacgtgccacactcccctgcgggctctcggagggcgcggcattgacggtggtcgggattctcagggagggggcggccaagttctgggtggaaatgctgggtgcgaacggtgaggttgtgctgcacgtcaatgtgagcctgggagccgcgggggtgttggtggagcagaattcctggacgccagaggaggggtggggggagtgggagcggtgcccgcctgttggtgatgtgagcagcagcaatagcagcttgcagctaagtccagtggacggccttgttcattgcaatgagaaagtgggtgcaaggatcgtccaggagagtaataatactgtggtaaatattactgggaaccaacctgaagattggcagagtcaaacaggacatggtcagttaagtggacgtttctcaattgttgaaggagagccttttacagtaacactgtgggctggtgtagaggggttccatatgacagtaaatgggcggcatgagacatcatttgcctatagagagaggtcagagccatggttggtagcagaagtcatgttttctggtgatttggagctcttgtcattcttggctaatgagttaccagtatcagaagatatagacatggaaaatgttgcagttttgaaggccccacctctgccaaagaagcaaacttttctgctggttggtgttttctctactggaaacaacttcaagcggcggatggctttgaggcgaacatggatgcaatatgaggctgttcgctcaggcgatgtagtagtccgttttttcactggtcttcacaagaatgagcaagtcaatatggagttatggagagaggctcaattatatggtgatatccaattgatgcccttcgttgactactatactttgatcactttgaagaccatatcaatttgcattttcggaacaaaaattgttcctgcaaagtacatcatgaaaacggatgacgatgcttttgttaggatcgatgaagtgatctcgagcctaaagaagagaaattccaatggccttctttatggtctcatttctttccaatcttccccccacagagacaagggtagcaaatggttcatcagtcggaaggaatggcccttcgacatgtacccgccatgggctcatggccctggatacgtaatctcacgtgacatcgctaagtttgtagtccaaggccaccaggaactgactcttcagcttttcaaacttgaagacgtggcaatgggtatttggatccaacagtacaagaacagtgggcagcaagtaaacattgtgactgatgaccggttctacaatgaaggatgcgaagctgactacgtccttgcccactaccagaccccgaggcttatgatgtgtctgtgggagaagctgaagacggaatatcatgctatatgctgtgaatagcatccgaattgcaagtaggaggcgatagaggaatggatagatagaggaatggataggttagccttggttttgaagaagacatttgctccgattttgacgctgtgtggaaaattgttgggactatgcgcaaaaagcctgtaacattgggttctcacttctgttctgtggcctgtgggttcatgttctttgtttttgggtagaaaatgttaatccgtgcaacttgatggatgttgtaaaaagagtgttgtaggacatttgagagagtttatctggcacaacctctcaagttattggatccatatacacctgcactcgtcct

SEQ ID NO: 31523 - protein, 616 aa, Zea mays subsp. mays
  peptide (1)..(616): Ceres Seq. ID no. 12416077
  misc_feature (382)..(576): Pfam Name: Pfam Description:  Galactosyltransferase
  misc_feature (25)..(221): NCBI GI NO: 34894810 NR Description: P0554D10.8
  misc_feature (319)..(512): NCBI GI NO: 34894810 NR Description: P0554D10.8
  misc_feature (548)..(613): NCBI GI NO: 34894810 NR Description: P0554D10.8
  misc_feature (82)..(616): NCBI GI NO: 18397574 NR Description: expressed protein; protein id: At3g06440
  misc_feature (222)..(616): NCBI GI NO: 6437545 NR Description: unknown protein [Arabidopsis thaliana]
  misc_feature (86)..(615): NCBI GI NO: 15223352 NR Description: hypothetical protein; protein id: At1g26810.1
  misc_feature (104)..(615): NCBI GI NO: 34393276 NR Description: putative beta-1,3-galactosyltransferase 5
  misc_feature (174)..(615): NCBI GI NO: 30689779 NR Description: galactosyltransferase family
  misc_feature (166)..(615): NCBI GI NO: 8809658 NR Description: gb|AAD55296
  misc_feature (174)..(615): NCBI GI NO: 26451550 NR Description: unknown protein [Arabidopsis thaliana]
ARDHYLEHPNRKETTGTRRSLAGGMKKCSGVLFILTLAVVLFLLSPSPSPTPPPNTAPNGPITDLLPTLPGLSDLYPPAPNSTAHLSWGLLRPLLCRSDALPGTSAGVLEAAEAWRNLTLAVTAAASEEEARLQGLRCSSSVGGDLRTGRATLPCGLSEGAALTVVGILREGAAKFWVEMLGANGEVVLHVNVSLGAAGVLVEQNSWTPEEGWGEWERCPPVGDVSSSNSSLQLSPVDGLVHCNEKVGARIVQESNNTVVNITGNQPEDWQSQTGHGQLSGRFSIVEGEPFTVTLWAGVEGFHMTVNGRHETSFAYRERSEPWLVAEVMFSGDLELLSFLANELPVSEDIDMENVAVLKAPPLPKKQTFLLVGVFSTGNNFKRRMALRRTWMQYEAVRSGDVVVRFFTGLHKNEQVNMELWREAQLYGDIQLMPFVDYYTLITLKTISICIFGTKIVPAKYIMKTDDDAFVRIDEVISSLKKRNSNGLLYGLISFQSSPHRDKGSKWFISRKEWPFDMYPPWAHGPGYVISRDIAKFVVQGHQELTLQLFKLEDVAMGIWIQQYKNSGQQVNIVTDDRFYNEGCEADYVLAHYQTPRLMMCLWEKLKTEYHAICCE

SEQ ID NO: 31524 - protein, 592 aa, Zea mays subsp. mays
  peptide (1)..(592): Ceres Seq. ID no. 12416078
  misc_feature (358)..(552): Pfam Name: Pfam Description:  Galactosyltransferase
  misc_feature (1)..(197): NCBI GI NO: 34894810 NR Description: P0554D10.8
  misc_feature (295)..(488): NCBI GI NO: 34894810 NR Description: P0554D10.8
  misc_feature (524)..(589): NCBI GI NO: 34894810 NR Description: P0554D10.8
  misc_feature (58)..(592): NCBI GI NO: 18397574 NR Description: expressed protein; protein id: At3g06440
  misc_feature (198)..(592): NCBI GI NO: 6437545 NR Description: unknown protein [Arabidopsis thaliana]
  misc_feature (62)..(591): NCBI GI NO: 15223352 NR Description: hypothetical protein; protein id: At1g26810.1
  misc_feature (80)..(591): NCBI GI NO: 34393276 NR Description: putative beta-1,3-galactosyltransferase 5
  misc_feature (150)..(591): NCBI GI NO: 30689779 NR Description: galactosyltransferase family
  misc_feature (142)..(591): NCBI GI NO: 8809658 NR Description: gb|AAD55296
  misc_feature (150)..(591): NCBI GI NO: 26451550 NR Description: unknown protein [Arabidopsis thaliana]
MKKCSGVLFILTLAVVLFLLSPSPSPTPPPNTAPNGPITDLLPTLPGLSDLYPPAPNSTAHLSWGLLRPLLCRSDALPGTSAGVLEAAEAWRNLTLAVTAAASEEEARLQGLRCSSSVGGDLRTGRATLPCGLSEGAALTVVGILREGAAKFWVEMLGANGEVVLHVNVSLGAAGVLVEQNSWTPEEGWGEWERCPPVGDVSSSNSSLQLSPVDGLVHCNEKVGARIVQESNNTVVNITGNQPEDWQSQTGHGQLSGRFSIVEGEPFTVTLWAGVEGFHMTVNGRHETSFAYRERSEPWLVAEVMFSGDLELLSFLANELPVSEDIDMENVAVLKAPPLPKKQTFLLVGVFSTGNNFKRRMALRRTWMQYEAVRSGDVVVRFFTGLHKNEQVNMELWREAQLYGDIQLMPFVDYYTLITLKTISICIFGTKIVPAKYIMKTDDDAFVRIDEVISSLKKRNSNGLLYGLISFQSSPHRDKGSKWFISRKEWPFDMYPPWAHGPGYVISRDIAKFVVQGHQELTLQLFKLEDVAMGIWIQQYKNSGQQVNIVTDDRFYNEGCEADYVLAHYQTPRLMMCLWEKLKTEYHAICCE

SEQ ID NO: 31525 - protein, 437 aa, Zea mays subsp. mays
  peptide (1)..(437): Ceres Seq. ID no. 12416079
  misc_feature (203)..(397): Pfam Name: Pfam Description:  Galactosyltransferase
  misc_feature (1)..(42): NCBI GI NO: 34894810 NR Description: P0554D10.8
  misc_feature (140)..(333): NCBI GI NO: 34894810 NR Description: P0554D10.8
  misc_feature (369)..(434): NCBI GI NO: 34894810 NR Description: P0554D10.8
  misc_feature (1)..(437): NCBI GI NO: 18397574 NR Description: expressed protein; protein id: At3g06440
  misc_feature (43)..(437): NCBI GI NO: 6437545 NR Description: unknown protein [Arabidopsis thaliana]
  misc_feature (1)..(436): NCBI GI NO: 15223352 NR Description: hypothetical protein; protein id: At1g26810.1
  misc_feature (1)..(436): NCBI GI NO: 34393276 NR Description: putative beta-1,3-galactosyltransferase 5
  misc_feature (1)..(436): NCBI GI NO: 30689779 NR Description: galactosyltransferase family
  misc_feature (1)..(436): NCBI GI NO: 8809658 NR Description: gb|AAD55296
  misc_feature (1)..(436): NCBI GI NO: 26451550 NR Description: unknown protein [Arabidopsis thaliana]
MLGANGEVVLHVNVSLGAAGVLVEQNSWTPEEGWGEWERCPPVGDVSSSNSSLQLSPVDGLVHCNEKVGARIVQESNNTVVNITGNQPEDWQSQTGHGQLSGRFSIVEGEPFTVTLWAGVEGFHMTVNGRHETSFAYRERSEPWLVAEVMFSGDLELLSFLANELPVSEDIDMENVAVLKAPPLPKKQTFLLVGVFSTGNNFKRRMALRRTWMQYEAVRSGDVVVRFFTGLHKNEQVNMELWREAQLYGDIQLMPFVDYYTLITLKTISICIFGTKIVPAKYIMKTDDDAFVRIDEVISSLKKRNSNGLLYGLISFQSSPHRDKGSKWFISRKEWPFDMYPPWAHGPGYVISRDIAKFVVQGHQELTLQLFKLEDVAMGIWIQQYKNSGQQVNIVTDDRFYNEGCEADYVLAHYQTPRLMMCLWEKLKTEYHAICCE

SEQ ID NO: 31526 - DNA, 847 bp, Zea mays subsp. mays
  misc_feature (1)..(847): Ceres Seq. ID no. 12416837
atactccactccagtccccgcgctgcatccttccgcttcctctcgctccctctgctctctcgcggtcgcagtctcgcagatcccgatcgcgcaaggagccagcgtagagggtgatcgacgatggcgggcagcacgcgcgcagcgcacaaggcgttcctgctctgcaactacacgctgctgggtgcagcatcggcgtgcatcttcctcacgctctcgctccgcctcgccccgtccgcgtgcggcctgctcctcgtcttcctccacgcgctcaccgctgtcttcgccgccgcgggctgctcgggctccttcaccgacggcggcgccggggccggccgcgcgcacgccgcgcacacagcgggggccgtgctcaccgccatcttccagggcgccgccgcgctgctcgccttcacccggaccgccgacttcctagccgagctgcggtcctacgtccgggaggaggacggcgaggtcattctcaagctcatcggcgggctcggcaccgccatcttcgtgctcgagtgggccgcgctagcgctcgcattcgcgctccggcttgacgatgatggcaacgaggagattgacggtgagcactgcaagagctgggcgtcagcgtaccatgtctgattctgctctgttcagacaccggagacgcgagagatacaggcacacaaaccagaaattgggggggggggggattttctcttctattatttacagctgtggatctattccgctgttgttacttgttactgtggtcatgaaccgaagtgcaaaggcaaatgttttgctttgcaatgtattcaattcatctcttagaaattgcaataaagtacattcagtgagccgt

SEQ ID NO: 31527 - protein, 167 aa, Zea mays subsp. mays
  peptide (1)..(167): Ceres Seq. ID no. 12416838
  misc_feature (2)..(167): NCBI GI NO: 34907616 NR Description: contains EST C27797(C52876)~unknown protein
  misc_feature (6)..(144): NCBI GI NO: 38345379 NR Description: OSJNBa0067K08.8
  misc_feature (1)..(153): NCBI GI NO: 15239379 NR Description: putative protein; protein id: At5g36710.1
  misc_feature (1)..(153): NCBI GI NO: 15239407 NR Description: putative protein; protein id: At5g36800.1
  misc_feature (9)..(144): NCBI GI NO: 15237310 NR Description: putative protein; protein id: At5g16250
  misc_feature (9)..(144): NCBI GI NO: 21553926 NR Description: unknown [Arabidopsis thaliana]
  misc_feature (9)..(144): NCBI GI NO: 21703131 NR Description: AT5g16250/T21H19_170 [Arabidopsis thaliana]
  misc_feature (9)..(150): NCBI GI NO: 18396262 NR Description: expressed protein; protein id: At3g02640
MAGSTRAAHKAFLLCNYTLLGAASACIFLTLSLRLAPSACGLLLVFLHALTAVFAAAGCSGSFTDGGAGAGRAHAAHTAGAVLTAIFQGAAALLAFTRTADFLAELRSYVREEDGEVILKLIGGLGTAIFVLEWAALALAFALRLDDDGNEEIDGEHCKSWASAYHV

SEQ ID NO: 31528 - protein, 142 aa, Zea mays subsp. mays
  peptide (1)..(142): Ceres Seq. ID no. 12416839
  misc_feature (65)..(142): Pfam Name: Pfam Description:  Cupin
  misc_feature (43)..(142): NCBI GI NO: 38175466 NR Description: putative high-affinity potassium transporter
  misc_feature (65)..(142): NCBI GI NO: 2429362 NR Description: proline rich protein [Santalum album]
  misc_feature (2)..(142): NCBI GI NO: 11359723 NR Description: proteophosphoglycan, membrane-associated
  misc_feature (6)..(142): NCBI GI NO: 11359723 NR Description: proteophosphoglycan, membrane-associated
  misc_feature (2)..(142): NCBI GI NO: 13592175 NR Description: ppg3 [Leishmania major]
  misc_feature (2)..(142): NCBI GI NO: 13592175 NR Description: ppg3 [Leishmania major]
  misc_feature (2)..(142): NCBI GI NO: 13592175 NR Description: ppg3 [Leishmania major]
  misc_feature (57)..(142): NCBI GI NO: 30140331 NR Description: putative arabinagalactan protein [Lotus japonicus]
  misc_feature (10)..(142): NCBI GI NO: 13592175 NR Description: ppg3 [Leishmania major]
YSTPVPALHPSASSRSLCSLAVAVSQIPIAQGASVEGDRRWRAARAQRTRRSCSATTRCWVQHRRASSSRSRSASPRPRAACSSSSSTRSPLSSPPRAARAPSPTAAPGPAARTPRTQRGPCSPPSSRAPPRCSPSPGPPTS

SEQ ID NO: 31529 - protein, 96 aa, Zea mays subsp. mays
  peptide (1)..(96): Ceres Seq. ID no. 12416840
  misc_feature (1)..(11): NCBI GI NO: 38175466 NR Description: putative high-affinity potassium transporter
  misc_feature (1)..(24): NCBI GI NO: 11359723 NR Description: proteophosphoglycan, membrane-associated
  misc_feature (1)..(24): NCBI GI NO: 13592175 NR Description: ppg3 [Leishmania major]
  misc_feature (1)..(24): NCBI GI NO: 13592175 NR Description: ppg3 [Leishmania major]
MMATRRLTVSTARAGRQRTMSDSALFRHRRRERYRHTNQKLGGGGIFSSIIYSCGSIPLLLLVTVVMNRSAKANVLLCNVFNSSLRNCNKVHSVSR

SEQ ID NO: 31530 - DNA, 1912 bp, Zea mays subsp. mays
  misc_feature (1)..(1912): Ceres Seq. ID no. 12374982
gagagaaacgcgctgcggccaccgccctccgccctccgcctaccacctcccacctctgacctcgcgtgccgagttcgggacgaagccaacgacgagctcagcggcgccggcgccgcagcgagaacacccgctccgtcgagaatacgtgtaaactaaattcaaaggcaggaatgtggcgcctctgttgctgcaattgccaggtggacgaaatagatcggcgtgagagtggtcatgtcaaggccacaaccaacaccatctgacggggtgacgaaggggttgagggatgatgctccccctatcgatgtacctgttctgtccttggatggtctgataagaaaaactggtgactttggttcaagagccttgataggtgaaggtatttatgggagactgtactatgcaactcttggtaattgaacaaaaatggcagtaaagaaacttcactctactgaaaatgaacccgctgccgagttcttggcccaggtctcgttggtttcaaggctgaaacatgaaaactttgttgacatgttggggtactatatcgagcgtgatcttcacatagtatcctacaaattcgccaccatgggttctctgcatgatcttctacatggaagaaaaggagttcaaggtgctcaagctggcccagtgcttcgttggatgcaacgagtgtgaattgctgttgatgctgcaaaagggctcgaatatcttcacgggaaagttcagccttccattgtccatagggatattagatcaagcaatatcctcttgtttgaagatgataggaatcgggcggattccctgatcgatctcaggttgtagtggtgggtgattggtggccagggtttgaggcgcgatgcacaacggcggggcgccgtgttcaccgcgcgcaagaggagagacgcgaggaaaggggcggctaggtcacagtaatcttccggctctctctggaaagccgaaacaatcttgtttctgcttaatccctatagagtggtgcttacaattatttatactcccttctagttcttatctaatgagataaatcccctattttctctctaacaaattttatctccttaatcttctaatccttatcatcttctaatccttatctgcatgcctatgctgttgcccggcgcctatagtggcggccgatcataacagaagacttcaaggcaaagatagcagacttcagtctctcaaaccagacttcatatatgtctgtccggttgcacattagctcacctcgggcctatggatatcatgccccagagtatgtaatgactggtaaactaacccagaaaagtgacgtatatagctttggaatagttcttttggagcttttgacaggtagaaagccaatagaccatacaatgcctatagatcagcacaacctgagagcttggaccacaccaatgttaactgaagagaaggtgaagcagtgtgtagatccgcgtttgatgggtgtgtatccagcaaaaggagtcgcaaagctcgctgctgtagcggctttgtgtgtgcaatctgatgctaagctccgcccaaatatgagcgttgtggttcacctatcagatttccatcactaactgcatggaggacgtcataactcattagtactgcactaataactttgcatctgcggctccacagcatgtcaacaatgttcatattcatctctcaggaaatgccagtataaggactagtgactaggtgatgaaatattgtcattagcattgagacttattgcaaagatgcggaattgtagaaaccccttcttttggtggcacaaacgctaatggaatcaccaagtggttcatacatgtccaactgttgtaatggtaattcattccgctgtgaatcggaagacaagcaaagcagaaaagcattacaacagttgaatctcaaaagacatgcg

SEQ ID NO: 31531 - protein, 122 aa, Zea mays subsp. mays
  peptide (1)..(122): Ceres Seq. ID no. 12374983
  misc_feature (1)..(115): NCBI GI NO: 34907668 NR Description: putative protein kinase
  misc_feature (1)..(115): NCBI GI NO: 29838544 NR Description: protein kinase Pti1 [Glycine max]
  misc_feature (1)..(115): NCBI GI NO: 11259776 NR Description: protein kinase-like protein - Arabidopsis thaliana
  misc_feature (1)..(115): NCBI GI NO: 30694970 NR Description: serine/threonine protein kinase, putative
  misc_feature (1)..(115): NCBI GI NO: 30694972 NR Description: serine/threonine protein kinase, putative
  misc_feature (1)..(115): NCBI GI NO: 18406188 NR Description: putative protein kinase; protein id: At2g43230
  misc_feature (1)..(115): NCBI GI NO: 25287594 NR Description: probable protein kinase
  misc_feature (1)..(115): NCBI GI NO: 15222170 NR Description: protein kinase interactor, putative
  misc_feature (1)..(115): NCBI GI NO: 25287624 NR Description: probable protein kinase
  misc_feature (1)..(114): NCBI GI NO: 13877995 NR Description: putative protein kinase interactor
MSVRLHISSPRAYGYHAPEYVMTGKLTQKSDVYSFGIVLLELLTGRKPIDHTMPIDQHNLRAWTTPMLTEEKVKQCVDPRLMGVYPAKGVAKLAAVAALCVQSDAKLRPNMSVVVHLSDFHH

SEQ ID NO: 31532 - protein, 101 aa, Zea mays subsp. mays
  peptide (1)..(101): Ceres Seq. ID no. 12374984
  misc_feature (1)..(94): NCBI GI NO: 34907668 NR Description: putative protein kinase
  misc_feature (1)..(94): NCBI GI NO: 29838544 NR Description: protein kinase Pti1 [Glycine max]
  misc_feature (1)..(94): NCBI GI NO: 11259776 NR Description: protein kinase-like protein - Arabidopsis thaliana
  misc_feature (1)..(94): NCBI GI NO: 30694972 NR Description: serine/threonine protein kinase, putative
  misc_feature (1)..(94): NCBI GI NO: 30694970 NR Description: serine/threonine protein kinase, putative
  misc_feature (1)..(94): NCBI GI NO: 18406188 NR Description: putative protein kinase; protein id: At2g43230
  misc_feature (1)..(94): NCBI GI NO: 25287594 NR Description: probable protein kinase
  misc_feature (1)..(94): NCBI GI NO: 15222170 NR Description: protein kinase interactor, putative
  misc_feature (1)..(94): NCBI GI NO: 25287624 NR Description: probable protein kinase
  misc_feature (1)..(93): NCBI GI NO: 13877995 NR Description: putative protein kinase interactor
MTGKLTQKSDVYSFGIVLLELLTGRKPIDHTMPIDQHNLRAWTTPMLTEEKVKQCVDPRLMGVYPAKGVAKLAAVAALCVQSDAKLRPNMSVVVHLSDFHH

SEQ ID NO: 31533 - protein, 82 aa, Zea mays subsp. mays
  peptide (1)..(82): Ceres Seq. ID no. 12374985
  misc_feature (1)..(82): NCBI GI NO: 34907668 NR Description: putative protein kinase
  misc_feature (1)..(82): NCBI GI NO: 29838544 NR Description: protein kinase Pti1 [Glycine max]
  misc_feature (1)..(82): NCBI GI NO: 11259776 NR Description: protein kinase-like protein - Arabidopsis thaliana
  misc_feature (1)..(82): NCBI GI NO: 30694972 NR Description: serine/threonine protein kinase, putative
  misc_feature (1)..(82): NCBI GI NO: 30694970 NR Description: serine/threonine protein kinase, putative
  misc_feature (1)..(82): NCBI GI NO: 18406188 NR Description: putative protein kinase; protein id: At2g43230
  misc_feature (1)..(82): NCBI GI NO: 25287594 NR Description: probable protein kinase
  misc_feature (1)..(82): NCBI GI NO: 15222170 NR Description: protein kinase interactor, putative
  misc_feature (1)..(82): NCBI GI NO: 25287624 NR Description: probable protein kinase
  misc_feature (1)..(82): NCBI GI NO: 13877995 NR Description: putative protein kinase interactor
MAVKKLHSTENEPAAEFLAQVSLVSRLKHENFVDMLGYYIERDLHIVSYKFATMGSLHDLLHGRKGVQGAQAGPVLRWMQRV

SEQ ID NO: 31534 - DNA, 1626 bp, Zea mays subsp. mays
  misc_feature (1)..(1626): Ceres Seq. ID no. 12374930
ccttttttcccccaccctccttcttttccatactctactattgcatagtagccttcaacaacggtgctggtgctctgtcggtccgtctgtcgttactcacagcgcttcccggcccgccggctcttgttcttgtctctgtttgccccgtggccagctccgcctcgccgccgcagtacatgacgccggcggcgtcgcccgcgcagttcgcgccggcgcccctcaggatggggtacgggcggccggcgcccgtgacgggcatgtggagcagcgagccgttcaaggtcgacagcggcggccacgccacctgcagcgcgtccaccgtcatggaggcggacaccaagctggagacaagcaggctacaagatgatgttccacaggtagcactcgagccagagaggagtacggatcaggaaacgagcaggccgccagagagggtcatgagaaggctcgcgcagaacagagaggctgctcggaagagtcgcctgcggaaaaaggcctacatccagcagctagagacaagccggatgaagctggcccagctagagctggagcttcaacgggctcgacggcagcagggcgcgtacgcaaatgggagcatgggagactcagctctcggatacacagggtcgatcgatccaggcgtcgccgcgttcgagatcgaatacaggcactgggtggacgagcagaagcggcacacggcggagctgatgtcggcgctccaggggcatcagacgtcgacgacgtcggagctggagctccgcttgctggtggagacggggctcagcaactacgagcacctcttcaggatcaaggcggtggccgccaacgcggacgtgttccacgtcatgtcgggcgtgtggaagacccccgccgagaggttcttcctctggatcggcgggttccgcccgtcggaggtcctaaagatcctgagcccgcagctggagccgttggcggaggcgcagcgcatgctcgtgggcggcctccaggcacacgtcaacgcaggcggaggacgcgctgtcgcagggcatggagaagctacagcagaacctcgccgagatcctgaccgccgaggctgaccccttcggggcccccgacgcctacatgctgcagatggccactgcggtggagaagctgaaagagctcgtcaacttcgtcacccaggcggaccatctccggctgatgacgctgcaacagatgcacaagatcctgacgacgcggcaggcggccaggggcctgctggcgctcggcgactacttccagcgcctccgcacgctgagctcgctgtgggcggcgcgcccgcgggaggcggcgattagctagatgcccgcggtgtgggtgtggccagccaaaggcccaccaaagaacacgacgacgacgaatagtagcagttcgctgtatactttcccaagctgtaaagtccagtggaggacgaagaaatcgacctcacagtcactggggttcggttccgacgaaaggatgcaaggcttttaagtcaatggcggtgcctgcgcctgcgctgcgtttcctcgctcgtctctccgcagcagcagcagcagcagcaagcggtgtgcgtttgtcaagcgaagcgactagagaataaaacggaaatggattgaggccttctcc

SEQ ID NO: 31535 - protein, 357 aa, Zea mays subsp. mays
  peptide (1)..(357): Ceres Seq. ID no. 12374931
  misc_feature (140)..(197): Pfam Name: Pfam Description:  bZIP transcription factor
  misc_feature (75)..(328): NCBI GI NO: 39545747 NR Description: OSJNBb0034I13.13
  misc_feature (62)..(327): NCBI GI NO: 7488719 NR Description: transcription factor STGA1 - soybean
  misc_feature (62)..(322): NCBI GI NO: 15148922 NR Description: TGA-type basic leucine zipper protein TGA1.1
  misc_feature (68)..(328): NCBI GI NO: 15238046 NR Description: bZIP transcription factor, OBF4
  misc_feature (63)..(328): NCBI GI NO: 15238367 NR Description: bZIP transcription factor, TGA1
  misc_feature (68)..(328): NCBI GI NO: 1076422 NR Description: transcription factor OBF4 - Arabidopsis thaliana
  misc_feature (63)..(328): NCBI GI NO: 320563 NR Description: transcription factor tga1 - Arabidopsis thaliana
  misc_feature (86)..(328): NCBI GI NO: 21592661 NR Description: DNA binding protein TGA1a homolog
  misc_feature (75)..(328): NCBI GI NO: 18395068 NR Description: bZIP transcription factor, TGA3
  misc_feature (75)..(328): NCBI GI NO: 21592831 NR Description: transcription factor [Arabidopsis thaliana]
FFPPPSFFSILYYCIVAFNNGAGALSVRLSLLTALPGPPALVLVSVCPVASSASPPQYMTPAASPAQFAPAPLRMGYGRPAPVTGMWSSEPFKVDSGGHATCSASTVMEADTKLETSRLQDDVPQVALEPERSTDQETSRPPERVMRRLAQNREAARKSRLRKKAYIQQLETSRMKLAQLELELQRARRQQGAYANGSMGDSALGYTGSIDPGVAAFEIEYRHWVDEQKRHTAELMSALQGHQTSTTSELELRLLVETGLSNYEHLFRIKAVAANADVFHVMSGVWKTPAERFFLWIGGFRPSEVLKILSPQLEPLAEAQRMLVGGLQAHVNAGGGRAVAGHGEATAEPRRDPDRRG

SEQ ID NO: 31536 - protein, 299 aa, Zea mays subsp. mays
  peptide (1)..(299): Ceres Seq. ID no. 12374932
  misc_feature (82)..(139): Pfam Name: Pfam Description:  bZIP transcription factor
  misc_feature (17)..(270): NCBI GI NO: 39545747 NR Description: OSJNBb0034I13.13
  misc_feature (4)..(269): NCBI GI NO: 7488719 NR Description: transcription factor STGA1 - soybean
  misc_feature (4)..(264): NCBI GI NO: 15148922 NR Description: TGA-type basic leucine zipper protein TGA1.1
  misc_feature (10)..(270): NCBI GI NO: 15238046 NR Description: bZIP transcription factor, OBF4
  misc_feature (5)..(270): NCBI GI NO: 15238367 NR Description: bZIP transcription factor, TGA1
  misc_feature (10)..(270): NCBI GI NO: 1076422 NR Description: transcription factor OBF4 - Arabidopsis thaliana
  misc_feature (5)..(270): NCBI GI NO: 320563 NR Description: transcription factor tga1 - Arabidopsis thaliana
  misc_feature (28)..(270): NCBI GI NO: 21592661 NR Description: DNA binding protein TGA1a homolog
  misc_feature (17)..(270): NCBI GI NO: 18395068 NR Description: bZIP transcription factor, TGA3
  misc_feature (17)..(270): NCBI GI NO: 21592831 NR Description: transcription factor [Arabidopsis thaliana]
MTPAASPAQFAPAPLRMGYGRPAPVTGMWSSEPFKVDSGGHATCSASTVMEADTKLETSRLQDDVPQVALEPERSTDQETSRPPERVMRRLAQNREAARKSRLRKKAYIQQLETSRMKLAQLELELQRARRQQGAYANGSMGDSALGYTGSIDPGVAAFEIEYRHWVDEQKRHTAELMSALQGHQTSTTSELELRLLVETGLSNYEHLFRIKAVAANADVFHVMSGVWKTPAERFFLWIGGFRPSEVLKILSPQLEPLAEAQRMLVGGLQAHVNAGGGRAVAGHGEATAEPRRDPDRRG

SEQ ID NO: 31537 - protein, 283 aa, Zea mays subsp. mays
  peptide (1)..(283): Ceres Seq. ID no. 12374933
  misc_feature (66)..(123): Pfam Name: Pfam Description:  bZIP transcription factor
  misc_feature (1)..(254): NCBI GI NO: 39545747 NR Description: OSJNBb0034I13.13
  misc_feature (1)..(253): NCBI GI NO: 7488719 NR Description: transcription factor STGA1 - soybean
  misc_feature (1)..(248): NCBI GI NO: 15148922 NR Description: TGA-type basic leucine zipper protein TGA1.1
  misc_feature (1)..(254): NCBI GI NO: 15238046 NR Description: bZIP transcription factor, OBF4
  misc_feature (1)..(254): NCBI GI NO: 15238367 NR Description: bZIP transcription factor, TGA1
  misc_feature (1)..(254): NCBI GI NO: 1076422 NR Description: transcription factor OBF4 - Arabidopsis thaliana
  misc_feature (1)..(254): NCBI GI NO: 320563 NR Description: transcription factor tga1 - Arabidopsis thaliana
  misc_feature (12)..(254): NCBI GI NO: 21592661 NR Description: DNA binding protein TGA1a homolog
  misc_feature (1)..(254): NCBI GI NO: 18395068 NR Description: bZIP transcription factor, TGA3
  misc_feature (1)..(254): NCBI GI NO: 21592831 NR Description: transcription factor [Arabidopsis thaliana]
MGYGRPAPVTGMWSSEPFKVDSGGHATCSASTVMEADTKLETSRLQDDVPQVALEPERSTDQETSRPPERVMRRLAQNREAARKSRLRKKAYIQQLETSRMKLAQLELELQRARRQQGAYANGSMGDSALGYTGSIDPGVAAFEIEYRHWVDEQKRHTAELMSALQGHQTSTTSELELRLLVETGLSNYEHLFRIKAVAANADVFHVMSGVWKTPAERFFLWIGGFRPSEVLKILSPQLEPLAEAQRMLVGGLQAHVNAGGGRAVAGHGEATAEPRRDPDRRG

SEQ ID NO: 31538 - DNA, 737 bp, Zea mays subsp. mays
  misc_feature (1)..(737): Ceres Seq. ID no. 12387469
attttcttgttctctactcgggaaacagacaggacagggacggaggccaaacccaacccaaagcccaagccgaagaggaaaggataggagacggatagggtacccgcgatgaggcccgccgccgccagtaccggcgggttccatctcgtgctccccgcggcgcacaggctgcctcctagtcttcctagcatcagtagccgaagaggtgtaaggatacgagcggcggcggcagcaggcggtggcggcgcgctgctggggcgtcccatggaggacgtgtacaaggtgcgcgtggagcgaggcgaggtggcgcgggcacggatggaggcgctgcgggtcatggagacgtggtcgtcgtggcgcacgggtggccggtgccggatgccgtgggactggcaggtcgaccagctcgtgtacatcgtgtccggggaggtgaaggtcatccccgccggcgctgtccacggcgacgactacatgcacttcgtggccggggatctggtcaggtacccgcgctggttcgaggccgacctctacttcgacggcccgtacgaggagcgctaccggtttctcgcctacggagacgacaactagttagtacatctgcatttcaagcagctttgcctagaccctagagtatccatctaccggcaatgcatgcgttgtaatgttcctctgtaatgtattggtgtggcgtagtcaggcaccgaaataaaccaatcattccaatgtttgcgaatttt

SEQ ID NO: 31539 - protein, 159 aa, Zea mays subsp. mays
  peptide (1)..(159): Ceres Seq. ID no. 12387470
  misc_feature (70)..(149): Pfam Name: DUF861 Pfam Description: Protein of unknown function
  misc_feature (51)..(158): NCBI GI NO: 15225202 NR Description: hypothetical protein; protein id: At2g32180.1
  misc_feature (51)..(158): NCBI GI NO: 18403036 NR Description: expressed protein; protein id: At2g32650
  misc_feature (51)..(158): NCBI GI NO: 21592432 NR Description: unknown [Arabidopsis thaliana]
MRPAAASTGGFHLVLPAAHRLPPSLPSISSRRGVRIRAAAAAGGGGALLGRPMEDVYKVRVERGEVARARMEALRVMETWSSWRTGGRCRMPWDWQVDQLVYIVSGEVKVIPAGAVHGDDYMHFVAGDLVRYPRWFEADLYFDGPYEERYRFLAYGDDN

SEQ ID NO: 31540 - protein, 107 aa, Zea mays subsp. mays
  peptide (1)..(107): Ceres Seq. ID no. 12387471
  misc_feature (18)..(97): Pfam Name: DUF861 Pfam Description: Protein of unknown function
  misc_feature (1)..(106): NCBI GI NO: 15225202 NR Description: hypothetical protein; protein id: At2g32180.1
  misc_feature (1)..(106): NCBI GI NO: 18403036 NR Description: expressed protein; protein id: At2g32650
  misc_feature (1)..(106): NCBI GI NO: 21592432 NR Description: unknown [Arabidopsis thaliana]
MEDVYKVRVERGEVARARMEALRVMETWSSWRTGGRCRMPWDWQVDQLVYIVSGEVKVIPAGAVHGDDYMHFVAGDLVRYPRWFEADLYFDGPYEERYRFLAYGDDN

SEQ ID NO: 31541 - protein, 89 aa, Zea mays subsp. mays
  peptide (1)..(89): Ceres Seq. ID no. 12387472
  misc_feature (1)..(79): Pfam Name: DUF861 Pfam Description: Protein of unknown function
  misc_feature (1)..(88): NCBI GI NO: 15225202 NR Description: hypothetical protein; protein id: At2g32180.1
  misc_feature (1)..(88): NCBI GI NO: 18403036 NR Description: expressed protein; protein id: At2g32650
  misc_feature (1)..(88): NCBI GI NO: 21592432 NR Description: unknown [Arabidopsis thaliana]
MEALRVMETWSSWRTGGRCRMPWDWQVDQLVYIVSGEVKVIPAGAVHGDDYMHFVAGDLVRYPRWFEADLYFDGPYEERYRFLAYGDDN

SEQ ID NO: 31542 - DNA, 1121 bp, Zea mays subsp. mays
  misc_feature (1)..(1121): Ceres Seq. ID no. 12367994
gcacgagaccattacctagaacatcctaatcgaaaacctcagtttacgccgcacgaaccgacgcactagaccgacccgcgaatcccccgcgcgcgcgccgtgcggtcaccgtccgaggccacggcaccgccggcccccgcccccgccccggccgccaagagcaaaggcaaggccgacgcttcctcctcgtcgtcctcctcctccactccaccgaggtcgcgccgcgcgcttgccgtcgtgatggccgcgtcgctgctcgtgctcgccgtggcgttcttggttggctctggctccggggggatcgatgggggcgcagcggctcccgtcgaggtggagggcaccgaggtggcctacggtagtgtgatcaagctgatgcacgagaagacgaagcaccgtctgcactcgcacgatgtgccctacggctcaggcagcggtcagcagtctgtcaccgggtttcctgaaggcgatgactcaaatagctactggatcataaggcccactccagattcatcgtctaagcaaggtgatgccatcgaaactggtggcatcatcaggttgcaacacatgaggacacggaggtggttgcacagtcacctgcacgcttcaccgttgtctggtaaccttgaggttagctgtttcggcggggatgaattgtcagatagtggtgaccattggaggctagaaattgaaggaagtggaaaagtatggaaaagagatcaaaaggtgcgacttagacatgttgacaccggaggttatctgcatagtcacaacaagaagtacaatcgccttggcggtgggcagcaagaggtctgcggtgtccgagagaagcgagctgagaacatttggttgacagcagagggtgtttatctcccagttaacgggagcaagtgaaaaagcactttctagcatttactatttttaatgttaatcagtataggatcagatattttgccagctttcattcgtccttgtcttaagaaaaacgaacatgggacctgaccccctagtgatatgtttaagttggaatgtttggatatcgatgatgtcgacaagaccaggacagcgcatgcttgtaattgatatttataatccatatatgaccgtgtagatacccagaggcc

SEQ ID NO: 31543 - protein, 216 aa, Zea mays subsp. mays
  peptide (1)..(216): Ceres Seq. ID no. 12367995
  misc_feature (153)..(207): Pfam Name: Pfam Description:  MIR domain
  misc_feature (1)..(215): NCBI GI NO: 18400721 NR Description: expressed protein; protein id: At2g25110
  misc_feature (1)..(215): NCBI GI NO: 21593658 NR Description: unknown [Arabidopsis thaliana]
  misc_feature (45)..(215): NCBI GI NO: 25412278 NR Description: hypothetical protein At2g25110
  misc_feature (5)..(210): NCBI GI NO: 24644197 NR Description: CG11999-PA [Drosophila melanogaster]
  misc_feature (36)..(216): NCBI GI NO: 29840881 NR Description: similar to GenBank Accession Number AE003603CG11999 gene product in Drosop hila melanogaster
  misc_feature (36)..(210): NCBI GI NO: 33416393 NR Description: Unknown (protein for MGC:66291) [Danio rerio]
  misc_feature (1)..(210): NCBI GI NO: 11275391 NR Description: SDF2 like protein 1 [Mus musculus]
  misc_feature (1)..(210): NCBI GI NO: 11612505 NR Description: stromal cell-derived factor 2-like 1
  misc_feature (21)..(210): NCBI GI NO: 11545743 NR Description: stromal cell-derived factor 2-like 1
  misc_feature (21)..(210): NCBI GI NO: 13623295 NR Description: stromal cell-derived factor 2-like 1
MAASLLVLAVAFLVGSGSGGIDGGAAAPVEVEGTEVAYGSVIKLMHEKTKHRLHSHDVPYGSGSGQQSVTGFPEGDDSNSYWIIRPTPDSSSKQGDAIETGGIIRLQHMRTRRWLHSHLHASPLSGNLEVSCFGGDELSDSGDHWRLEIEGSGKVWKRDQKVRLRHVDTGGYLHSHNKKYNRLGGGQQEVCGVREKRAENIWLTAEGVYLPVNGSK

SEQ ID NO: 31544 - protein, 172 aa, Zea mays subsp. mays
  peptide (1)..(172): Ceres Seq. ID no. 12367996
  misc_feature (109)..(163): Pfam Name: Pfam Description:  MIR domain
  misc_feature (1)..(171): NCBI GI NO: 18400721 NR Description: expressed protein; protein id: At2g25110
  misc_feature (1)..(171): NCBI GI NO: 21593658 NR Description: unknown [Arabidopsis thaliana]
  misc_feature (1)..(171): NCBI GI NO: 25412278 NR Description: hypothetical protein At2g25110
  misc_feature (1)..(166): NCBI GI NO: 24644197 NR Description: CG11999-PA [Drosophila melanogaster]
  misc_feature (1)..(172): NCBI GI NO: 29840881 NR Description: similar to GenBank Accession Number AE003603CG11999 gene product in Drosop hila melanogaster
  misc_feature (1)..(166): NCBI GI NO: 33416393 NR Description: Unknown (protein for MGC:66291) [Danio rerio]
  misc_feature (1)..(166): NCBI GI NO: 11275391 NR Description: SDF2 like protein 1 [Mus musculus]
  misc_feature (1)..(166): NCBI GI NO: 11612505 NR Description: stromal cell-derived factor 2-like 1
  misc_feature (1)..(166): NCBI GI NO: 11545743 NR Description: stromal cell-derived factor 2-like 1
  misc_feature (1)..(166): NCBI GI NO: 13623295 NR Description: stromal cell-derived factor 2-like 1
MHEKTKHRLHSHDVPYGSGSGQQSVTGFPEGDDSNSYWIIRPTPDSSSKQGDAIETGGIIRLQHMRTRRWLHSHLHASPLSGNLEVSCFGGDELSDSGDHWRLEIEGSGKVWKRDQKVRLRHVDTGGYLHSHNKKYNRLGGGQQEVCGVREKRAENIWLTAEGVYLPVNGSK

SEQ ID NO: 31545 - protein, 108 aa, Zea mays subsp. mays
  peptide (1)..(108): Ceres Seq. ID no. 12367997
  misc_feature (45)..(99): Pfam Name: Pfam Description:  MIR domain
  misc_feature (1)..(107): NCBI GI NO: 18400721 NR Description: expressed protein; protein id: At2g25110
  misc_feature (1)..(107): NCBI GI NO: 21593658 NR Description: unknown [Arabidopsis thaliana]
  misc_feature (1)..(107): NCBI GI NO: 25412278 NR Description: hypothetical protein At2g25110
  misc_feature (1)..(102): NCBI GI NO: 24644197 NR Description: CG11999-PA [Drosophila melanogaster]
  misc_feature (1)..(108): NCBI GI NO: 29840881 NR Description: similar to GenBank Accession Number AE003603CG11999 gene product in Drosop hila melanogaster
  misc_feature (1)..(102): NCBI GI NO: 33416393 NR Description: Unknown (protein for MGC:66291) [Danio rerio]
  misc_feature (1)..(102): NCBI GI NO: 11275391 NR Description: SDF2 like protein 1 [Mus musculus]
  misc_feature (1)..(102): NCBI GI NO: 11612505 NR Description: stromal cell-derived factor 2-like 1
  misc_feature (1)..(102): NCBI GI NO: 11545743 NR Description: stromal cell-derived factor 2-like 1
  misc_feature (1)..(102): NCBI GI NO: 13623295 NR Description: stromal cell-derived factor 2-like 1
MRTRRWLHSHLHASPLSGNLEVSCFGGDELSDSGDHWRLEIEGSGKVWKRDQKVRLRHVDTGGYLHSHNKKYNRLGGGQQEVCGVREKRAENIWLTAEGVYLPVNGSK

SEQ ID NO: 31546 - DNA, 1135 bp, Zea mays subsp. mays
  misc_feature (1)..(1135): Ceres Seq. ID no. 13496182
gtacgacaggctgtaccgaggttcagttcggtagtgtagttgtaggttgcgatcgcgaggcggctgctggcggcggtcgccatagtagtcgtggccgccgcgctcgcgtgcggcgcgggcgcgcagctctcggcggggttctactcgtcgagctgccccgccgtgcacagcatcgtgcgccaggccatgtcgcaggccgtcacgaacaacacgcgcagcgccgccgccgtgctccgcgtcttcttccacgactgcttcgtcaatggctgcgacgcctcgctgctgctggacgacacgcccacgacgcccggcgagaagggcgccggccccaacgccggcggctccaccgtcggcttcgacctcatcgacaccatcaaggcgcaggtcgaggccgcctgccccgccaccgtctcctgcgccgacatcctggcgctcaccgcgcgcgacggcgtcaacctgctcggcggcccgagctgggccgtgccgctgggccggcgcgacgcgacgttccccaacagcacgggcgcggcgacggacctcccgggcccggactccgacctggccggcctggtggccgggttcgccgccaagggcctgagcccgcgcgacctcgcggcgctgtcgggcgcgcacacggtggggatggcgcgctgcgccagcttccgcacccgcgtctactgcgacgacaacgtgagcccggcgttcgccgcgcagcagcgccaggcctgcccgtcggccgacgccgacgacgcgctcgcgccgctcgactcgctcacccccgaccagttcgacaacggctactaccggagcctcatggccggcgccggcctgctgcactcggaccaggagctcttcagcaacggcgcactcgactcgctcgtgcgcctctacggcaccaacgccgacgccttctcgtcggacttcgccgcgtccatggtcaagctcggcaacatcggcccgctcacgggttccgcgggggaggtcaggctcaactgcaggacggtgaattcgaattcgtgacttcaggacggtgaatgccaccatttttaattctttttccctacaaggagttgtagaatttgcattccttcaacgatttcgaatttcgaatttgctgtgagtcagctgaagtggc

SEQ ID NO: 31547 - protein, 343 aa, Zea mays subsp. mays
  peptide (1)..(343): Ceres Seq. ID no. 13496183
  misc_feature (10)..(299): NCBI GI NO: 23018055 NR Description: hypothetical protein [Thermobifida fusca]
TTGCTEVQFGSVVVGCDREAAAGGGRHSSRGRRARVRRGRAALGGVLLVELPRRAQHRAPGHVAGRHEQHAQRRRRAPRLLPRLLRQWLRRLAAAGRHAHDARREGRRPQRRRLHRRLRPHRHHQGAGRGRLPRHRLLRRHPGAHRARRRQPARRPELGRAAGPARRDVPQQHGRGDGPPGPGLRPGRPGGRVRRQGPEPARPRGAVGRAHGGDGALRQLPHPRLLRRQREPGVRRAAAPGLPVGRRRRRARAARLAHPRPVRQRLLPEPHGRRRPAALGPGALQQRRTRLARAPLRHQRRRLLVGLRRVHGQARQHRPAHGFRGGGQAQLQDGEFEFVTSGR

SEQ ID NO: 31548 - protein, 277 aa, Zea mays subsp. mays
  peptide (1)..(277): Ceres Seq. ID no. 13496184
  misc_feature (1)..(238): Pfam Name: Pfam Description:  Peroxidase
  misc_feature (1)..(274): NCBI GI NO: 5453379 NR Description: bacterial-induced peroxidase precursor
  misc_feature (1)..(274): NCBI GI NO: 7433049 NR Description: peroxidase (EC 1.11.1.7) - flax (fragment)
  misc_feature (1)..(276): NCBI GI NO: 34903770 NR Description: unnamed protein product
  misc_feature (1)..(274): NCBI GI NO: 7433047 NR Description: probable peroxidase (EC 1
  misc_feature (1)..(274): NCBI GI NO: 2117619 NR Description: peroxidase (EC 1.11.1.7) 4 precursor - wheat
  misc_feature (1)..(274): NCBI GI NO: 4760704 NR Description: peroxidase 3 [Scutellaria baicalensis]
  misc_feature (1)..(274): NCBI GI NO: 7433048 NR Description: probable peroxidase (EC 1
  misc_feature (1)..(274): NCBI GI NO: 5381253 NR Description: peroxidase [Nicotiana tabacum]
  misc_feature (1)..(274): NCBI GI NO: 34393249 NR Description: putative peroxidase precursor
  misc_feature (1)..(274): NCBI GI NO: 577503 NR Description: cationic peroxidase
MSQAVTNNTRSAAAVLRVFFHDCFVNGCDASLLLDDTPTTPGEKGAGPNAGGSTVGFDLIDTIKAQVEAACPATVSCADILALTARDGVNLLGGPSWAVPLGRRDATFPNSTGAATDLPGPDSDLAGLVAGFAAKGLSPRDLAALSGAHTVGMARCASFRTRVYCDDNVSPAFAAQQRQACPSADADDALAPLDSLTPDQFDNGYYRSLMAGAGLLHSDQELFSNGALDSLVRLYGTNADAFSSDFAASMVKLGNIGPLTGSAGEVRLNCRTVNSNS

SEQ ID NO: 31549 - DNA, 1391 bp, Zea mays subsp. mays
  misc_feature (1)..(1391): Ceres Seq. ID no. 13504058
  misc_feature (1379)..(1379): n is a, c, t, g, unknown, or other
agcgcagggtcaggagaggcagaggcctcagagatacgccgggacgcaacacgtcgtgccgcgcggagggttttgccgagattttccctcaaaagggtattgccacccgcaccgagaaaagaaaacgatacacaccgagataaaaacataccctctccatcctctcctcttcttcctcctcccgtagcggcttcccccgatttgcatccgggcgcggccccatccccacctggccgccgcgcgccgccatggacggcctgcacggtacggacgcatgcttctcccccgcgagggctatctcgccgcaggtgaggccccccgggccgccggacgtaggcagtcagtacctggcggagctgctgcaggagcaccagaagctggggcccttcatgcaggtgctcccaatctgcagcaggctgctgaatcaagaaatagtgcgggtgtcgaatatacggcgccaacatggtgttgctggcgactttgagaggtttccagccgcaagccccaaccagatgcatccggcaccccccatgacaaacttttgtggaaacggttttagtccatggaatgggatgcattcagagagagtaggtgttccgcaaggagctatgggttggcaaggacccccacagagcccctcttcttatattgtcaagaagattttgcggttggaagtaccgacagaagcataccctaatttcaattttatcggccgtcttcttggaccaaggggaaactctttaaagatgattgaagcctccacaggctgtcgtgttttcatcagagggaaaggctcaattaaagattctggcaaggaggaacaactcaagggaagacctggctatgaacacttgagtgaacccctccatatcttgattgaagctgagttacctgctaatgtgattgatgcaagacttgcaaaggcacaagagatccttgaagagctgttgaaaccagtggacgaatcacaagactactacaagagacagcaactgcgagaacttgcaatgctaaattcgccactccgagaggagagtccacatccaggtggtgctcctcctagtcccttcagtaacggcggcatgaaaagagtgaaacaatgacaccgccgaggctcgttcctccatcttgactccccagcaaccccaatgcagtccataccttcacaccctatttttcaatgagcaagctttcatgacggtgttggtagtgtgtgacattcttcactgtactagcaggtgaattttgatctcccatcccatgttacattaaccttgagtgacagatgactatgcgtagtgtatcctctatggcagtataactagaacatttgatttatttgttactggtaatgctgagatatagtactgtgcagattntgagttacggtg

SEQ ID NO: 31550 - protein, 284 aa, Zea mays subsp. mays
  peptide (1)..(284): Ceres Seq. ID no. 13504059
  misc_feature (140)..(193): Pfam Name: Pfam Description:  KH domain
  misc_feature (1)..(284): NCBI GI NO: 34909270 NR Description: P0454H12.18
  misc_feature (3)..(284): NCBI GI NO: 34900448 NR Description: contains EST C27129
  misc_feature (1)..(283): NCBI GI NO: 12322716 NR Description: unknown protein; 28504-31237
  misc_feature (1)..(283): NCBI GI NO: 30680583 NR Description: KH domain protein [Arabidopsis thaliana]
  misc_feature (1)..(283): NCBI GI NO: 40645104 NR Description: hypothetical protein [Nicotiana tabacum]
  misc_feature (1)..(283): NCBI GI NO: 15224909 NR Description: KH domain protein [Arabidopsis thaliana]
  misc_feature (18)..(283): NCBI GI NO: 16930473 NR Description: At1g09660/F21M12_5 [Arabidopsis thaliana]
  misc_feature (18)..(283): NCBI GI NO: 22329449 NR Description: KH domain quaking protein, putative
  misc_feature (61)..(283): NCBI GI NO: 34907446 NR Description: P0434C04.5
  misc_feature (1)..(283): NCBI GI NO: 15236738 NR Description: KH domain protein [Arabidopsis thaliana]
MDGLHGTDACFSPARAISPQVRPPGPPDVGSQYLAELLQEHQKLGPFMQVLPICSRLLNQEIVRVSNIRRQHGVAGDFERFPAASPNQMHPAPPMTNFCGNGFSPWNGMHSERVGVPQGAMGWQGPPQSPSSYIVKKILRLEVPTEAYPNFNFIGRLLGPRGNSLKMIEASTGCRVFIRGKGSIKDSGKEEQLKGRPGYEHLSEPLHILIEAELPANVIDARLAKAQEILEELLKPVDESQDYYKRQQLRELAMLNSPLREESPHPGGAPPSPFSNGGMKRVKQ

SEQ ID NO: 31551 - protein, 237 aa, Zea mays subsp. mays
  peptide (1)..(237): Ceres Seq. ID no. 13504060
  misc_feature (93)..(146): Pfam Name: Pfam Description:  KH domain
  misc_feature (1)..(237): NCBI GI NO: 34909270 NR Description: P0454H12.18
  misc_feature (1)..(237): NCBI GI NO: 34900448 NR Description: contains EST C27129
  misc_feature (1)..(236): NCBI GI NO: 12322716 NR Description: unknown protein; 28504-31237
  misc_feature (1)..(236): NCBI GI NO: 30680583 NR Description: KH domain protein [Arabidopsis thaliana]
  misc_feature (1)..(236): NCBI GI NO: 40645104 NR Description: hypothetical protein [Nicotiana tabacum]
  misc_feature (1)..(236): NCBI GI NO: 15224909 NR Description: KH domain protein [Arabidopsis thaliana]
  misc_feature (1)..(236): NCBI GI NO: 16930473 NR Description: At1g09660/F21M12_5 [Arabidopsis thaliana]
  misc_feature (1)..(236): NCBI GI NO: 22329449 NR Description: KH domain quaking protein, putative
  misc_feature (14)..(236): NCBI GI NO: 34907446 NR Description: P0434C04.5
  misc_feature (1)..(236): NCBI GI NO: 15236738 NR Description: KH domain protein [Arabidopsis thaliana]
MQVLPICSRLLNQEIVRVSNIRRQHGVAGDFERFPAASPNQMHPAPPMTNFCGNGFSPWNGMHSERVGVPQGAMGWQGPPQSPSSYIVKKILRLEVPTEAYPNFNFIGRLLGPRGNSLKMIEASTGCRVFIRGKGSIKDSGKEEQLKGRPGYEHLSEPLHILIEAELPANVIDARLAKAQEILEELLKPVDESQDYYKRQQLRELAMLNSPLREESPHPGGAPPSPFSNGGMKRVKQ

SEQ ID NO: 31552 - protein, 196 aa, Zea mays subsp. mays
  peptide (1)..(196): Ceres Seq. ID no. 13504061
  misc_feature (52)..(105): Pfam Name: Pfam Description:  KH domain
  misc_feature (1)..(196): NCBI GI NO: 34909270 NR Description: P0454H12.18
  misc_feature (1)..(196): NCBI GI NO: 34900448 NR Description: contains EST C27129
  misc_feature (1)..(195): NCBI GI NO: 12322716 NR Description: unknown protein; 28504-31237
  misc_feature (1)..(195): NCBI GI NO: 30680583 NR Description: KH domain protein [Arabidopsis thaliana]
  misc_feature (1)..(195): NCBI GI NO: 40645104 NR Description: hypothetical protein [Nicotiana tabacum]
  misc_feature (1)..(195): NCBI GI NO: 15224909 NR Description: KH domain protein [Arabidopsis thaliana]
  misc_feature (1)..(195): NCBI GI NO: 16930473 NR Description: At1g09660/F21M12_5 [Arabidopsis thaliana]
  misc_feature (1)..(195): NCBI GI NO: 22329449 NR Description: KH domain quaking protein, putative
  misc_feature (1)..(195): NCBI GI NO: 34907446 NR Description: P0434C04.5
  misc_feature (1)..(195): NCBI GI NO: 15236738 NR Description: KH domain protein [Arabidopsis thaliana]
MHPAPPMTNFCGNGFSPWNGMHSERVGVPQGAMGWQGPPQSPSSYIVKKILRLEVPTEAYPNFNFIGRLLGPRGNSLKMIEASTGCRVFIRGKGSIKDSGKEEQLKGRPGYEHLSEPLHILIEAELPANVIDARLAKAQEILEELLKPVDESQDYYKRQQLRELAMLNSPLREESPHPGGAPPSPFSNGGMKRVKQ

SEQ ID NO: 31553 - DNA, 1365 bp, Zea mays subsp. mays
  misc_feature (1)..(1365): Ceres Seq. ID no. 12374978
aacagtggtacttgaagtcgaaggcagcgcagcaggtacgccaggacgccattagcagcggttggccaccacccgacgccggaggcccggaggaggaggcggcgatggcggggaagcacgggcgcaacggcttcgacgacgacaacgtcaaccctttcgcgggaggaagtgttccacctgccaccaattctcgtctctcacctctatcacatgaaccggctgatttctacaatgtggacattcctctcgactcatcaaaggatctgaagaaaaaggagaaagaactccaggctatggaggctgagctaaacaaaagagaacgggaattgaaaaggaaggaagaggcggcatcccgagctggcgttgtgatagaagagaaaaactggcctccctttttccccctcatccaccacgacatttccaatgaaatacctatccatctacaaaggatgcagtaccttgcattctcatcattcttgggattgatagcgtgtctcttttggaatgtcatagcaactacaacagcatggattaaaggggaaggtgttatgatctggctgcttgccattatctacttcatatctggtgcgcctggggcttatgtgctatggtatcgacctctttataatgcaatgagaactgagagcgctttgaagtttgggtggtttttcctattttacatgattcatataatcttctgtgtgtgggcagctgtggctcctccatttcctttcaaaggaaaatctttggctgggattttaccagcaattgatgtcataagcaagaatgctattgttgggatattttacttcgttggatttggcttgttctgccttgaatcacttctgagcatcggtgtcattcagcaagtctacatgtatttccgtggaagtggaaaaagctgcagagatgaaacgtgaggcagcacgtagtgctctaagttcagccttctgatgaacatagggcggtctgattagagcagtagatggataagggaagggaacgagatgtgccaattaagccacgcggtcttgtacatcactgcagtacgtggatttggatcgctgaaagcgtacagctgatcgtctttttgctcttctgtaaaatatgaacaatcatcatatggtccggatgcgtcagggtgttgtttcatttcttgccatggtttagatgtggttgatagggaaaacggtgaagtattttttggagcagctaatataatgtatcttcatcatacttttacatgtgagtgtaatagcttatttcttgtggtaggaatacagctttgctgtgttttcgggaatgacatttgttgtgtaaggctattcacaatggctatttcataatactcttttcaatactgcc

SEQ ID NO: 31554 - protein, 305 aa, Zea mays subsp. mays
  peptide (1)..(305): Ceres Seq. ID no. 12374979
  misc_feature (124)..(298): Pfam Name: Pfam Description:  SCAMP family
  misc_feature (35)..(300): NCBI GI NO: 7109232 NR Description: secretory carrier membrane protein [Oryza sativa]
  misc_feature (56)..(305): NCBI GI NO: 34899754 NR Description: putative secretory carrier membrane protein
  misc_feature (35)..(299): NCBI GI NO: 15219893 NR Description: secretory carrier membrane protein
  misc_feature (35)..(300): NCBI GI NO: 15220305 NR Description: secretory carrier membrane protein, putative
  misc_feature (38)..(300): NCBI GI NO: 15226410 NR Description: putative secretory carrier-associated membraneprotein
  misc_feature (35)..(300): NCBI GI NO: 3941289 NR Description: similarity to SCAMP37 [Pisum sativum]
  misc_feature (38)..(300): NCBI GI NO: 18379111 NR Description: expressed protein; protein id: At1g03550
  misc_feature (35)..(300): NCBI GI NO: 25402653 NR Description: hypothetical protein
  misc_feature (39)..(297): NCBI GI NO: 15222550 NR Description: secretory carrier membrane protein, putative
  misc_feature (39)..(297): NCBI GI NO: 38347080 NR Description: OSJNBa0006A01.21
QWYLKSKAAQQVRQDAISSGWPPPDAGGPEEEAAMAGKHGRNGFDDDNVNPFAGGSVPPATNSRLSPLSHEPADFYNVDIPLDSSKDLKKKEKELQAMEAELNKRERELKRKEEAASRAGVVIEEKNWPPFFPLIHHDISNEIPIHLQRMQYLAFSSFLGLIACLFWNVIATTTAWIKGEGVMIWLLAIIYFISGAPGAYVLWYRPLYNAMRTESALKFGWFFLFYMIHIIFCVWAAVAPPFPFKGKSLAGILPAIDVISKNAIVGIFYFVGFGLFCLESLLSIGVIQQVYMYFRGSGKSCRDET

SEQ ID NO: 31555 - protein, 271 aa, Zea mays subsp. mays
  peptide (1)..(271): Ceres Seq. ID no. 12374980
  misc_feature (90)..(264): Pfam Name: Pfam Description:  SCAMP family
  misc_feature (1)..(266): NCBI GI NO: 7109232 NR Description: secretory carrier membrane protein [Oryza sativa]
  misc_feature (22)..(271): NCBI GI NO: 34899754 NR Description: putative secretory carrier membrane protein
  misc_feature (1)..(265): NCBI GI NO: 15219893 NR Description: secretory carrier membrane protein
  misc_feature (1)..(266): NCBI GI NO: 15220305 NR Description: secretory carrier membrane protein, putative
  misc_feature (4)..(266): NCBI GI NO: 15226410 NR Description: putative secretory carrier-associated membraneprotein
  misc_feature (1)..(266): NCBI GI NO: 3941289 NR Description: similarity to SCAMP37 [Pisum sativum]
  misc_feature (4)..(266): NCBI GI NO: 18379111 NR Description: expressed protein; protein id: At1g03550
  misc_feature (1)..(266): NCBI GI NO: 25402653 NR Description: hypothetical protein
  misc_feature (5)..(263): NCBI GI NO: 15222550 NR Description: secretory carrier membrane protein, putative
  misc_feature (5)..(263): NCBI GI NO: 38347080 NR Description: OSJNBa0006A01.21
MAGKHGRNGFDDDNVNPFAGGSVPPATNSRLSPLSHEPADFYNVDIPLDSSKDLKKKEKELQAMEAELNKRERELKRKEEAASRAGVVIEEKNWPPFFPLIHHDISNEIPIHLQRMQYLAFSSFLGLIACLFWNVIATTTAWIKGEGVMIWLLAIIYFISGAPGAYVLWYRPLYNAMRTESALKFGWFFLFYMIHIIFCVWAAVAPPFPFKGKSLAGILPAIDVISKNAIVGIFYFVGFGLFCLESLLSIGVIQQVYMYFRGSGKSCRDET

SEQ ID NO: 31556 - protein, 208 aa, Zea mays subsp. mays
  peptide (1)..(208): Ceres Seq. ID no. 12374981
  misc_feature (27)..(201): Pfam Name: Pfam Description:  SCAMP family
  misc_feature (1)..(203): NCBI GI NO: 7109232 NR Description: secretory carrier membrane protein [Oryza sativa]
  misc_feature (1)..(208): NCBI GI NO: 34899754 NR Description: putative secretory carrier membrane protein
  misc_feature (1)..(202): NCBI GI NO: 15219893 NR Description: secretory carrier membrane protein
  misc_feature (1)..(203): NCBI GI NO: 15220305 NR Description: secretory carrier membrane protein, putative
  misc_feature (1)..(203): NCBI GI NO: 15226410 NR Description: putative secretory carrier-associated membraneprotein
  misc_feature (1)..(203): NCBI GI NO: 3941289 NR Description: similarity to SCAMP37 [Pisum sativum]
  misc_feature (1)..(203): NCBI GI NO: 18379111 NR Description: expressed protein; protein id: At1g03550
  misc_feature (1)..(203): NCBI GI NO: 25402653 NR Description: hypothetical protein
  misc_feature (1)..(200): NCBI GI NO: 15222550 NR Description: secretory carrier membrane protein, putative
  misc_feature (1)..(200): NCBI GI NO: 38347080 NR Description: OSJNBa0006A01.21
MEAELNKRERELKRKEEAASRAGVVIEEKNWPPFFPLIHHDISNEIPIHLQRMQYLAFSSFLGLIACLFWNVIATTTAWIKGEGVMIWLLAIIYFISGAPGAYVLWYRPLYNAMRTESALKFGWFFLFYMIHIIFCVWAAVAPPFPFKGKSLAGILPAIDVISKNAIVGIFYFVGFGLFCLESLLSIGVIQQVYMYFRGSGKSCRDET

SEQ ID NO: 31557 - DNA, 1628 bp, Zea mays subsp. mays
  misc_feature (1)..(1628): Ceres Seq. ID no. 12416798
gcacgagaccattacctagaacatcctaatcgaaaaattatttttttaataaatcttcccaggcgtccagcgtcctcccggcgacgacgcttcccgagctctctccttcccgcgaccctctcctctgccccgctccgctagggttttgccgcagacctctcgctcgcttccggttccgcgaggcaaccgtccgaccggtcggaatggtggatgtggaggagaccgggaacaagttgcaatcgcagatgcgcctccacgcggagccggaggacgacgccgccgacctccccctcccggccctcttcgatagggcgtcgcggctccacgccctggcctccagctccgccctcgaccaggatgggatccgcacgggggttgacctgctgcggcgctgcgatgacatggtcagcaagctcgggcctcttctcccccaacgagaccaaggaggacgtctccacagcaaacctcaagtacctactggtcccatattaccttgcagaaatgaccgaaaagatagcacaggaggatcggatcccggttcttaagacgtcacaggaccatctgaaggagttcattgctctatgtgaagtactagagcttatcccagaggatgagctagaattgtctaggcagaagcagccagatactctgacaaacagaagagcgcagaaggttgcccggttcaaacgtcaaaaggctgcagaaacgaagctccaagagatcagagagagaaaagaaaggcgtggacgctcattgagagcagctgctttgtctgccccaattgaagctggagaggaagatgacctggagaatgatggggaggaagaaagagaggcttggttagctaccatctcattggctctctgcaaggcatttgatcttctcgacatgctaaagaaggaagaagaaatgcttcaagctgtaaaggaaaggaaggcaaaggatgggaatgcatttgctcgtgaaatgcttgatgaacgaacgaagaaggccgaaacatggcaccataatgctgccaaccgtgtggcatattccaaaccagcggatcctatcacttgtgcaacatttgctcaagatgtcattgaaggtagagcaagcgtttcacaagctcacgagcacaaacaccagcccctgatatttggacctgcaagtattgttggtggtggtctaacaagtgaaagggaaagaatgacagcgcaagtttttcagcctagttacaggatgccaacaatgagcattgaagaagctggtttgcgcgagatgaaaatgatggagaaatggcaagaaaggaccgctgaggtgatgaaagaatcaacctccgcgtggcacaaggatggcagcagctcggcccaagaggatgaggacgccgaggaggaaaaagcaagagcgtgggacgactggaaggatgacaaccctcgtggcgcaggcaacaagaagctcacgccctgtggttaatttgtgaaacacgctgtgtattgatactccacatggaacatgatgctcatgtagacggtaggatgtttaattttatcattgttgccgtgttttttctgtagtgatgttgagtgtatcgtagcctgtttgtgcaagtgcaatatgtcctccctaatacgacacgtttttctggc

SEQ ID NO: 31558 - protein, 414 aa, Zea mays subsp. mays
  peptide (1)..(414): Ceres Seq. ID no. 12416799
  misc_feature (71)..(402): Pfam Name: Pfam Description:  TAP42-like family
  misc_feature (70)..(414): NCBI GI NO: 29367365 NR Description: PP2A regulatory subunit-like protein
  misc_feature (71)..(414): NCBI GI NO: 18423459 NR Description: PP2A regulatory subunit; protein id: At5g53000
  misc_feature (71)..(414): NCBI GI NO: 21553995 NR Description: PP2A regulatory subunit [Arabidopsis thaliana]
  misc_feature (71)..(414): NCBI GI NO: 8809589 NR Description: PP2A regulatory subunit [Arabidopsis thaliana]
  misc_feature (70)..(244): NCBI GI NO: 7489459 NR Description: chilling-induced protein - rice
  misc_feature (320)..(414): NCBI GI NO: 7489459 NR Description: chilling-induced protein - rice
  misc_feature (71)..(259): NCBI GI NO: 19075479 NR Description: putative phosphatase component
  misc_feature (320)..(407): NCBI GI NO: 19075479 NR Description: putative phosphatase component
  misc_feature (54)..(252): NCBI GI NO: 4557663 NR Description: immunoglobulin
  misc_feature (54)..(252): NCBI GI NO: 30584781 NR Description: Homo sapiens immunoglobulin
MWRRPGTSCNRRCASTRSRRTTPPTSPSRPSSIGRRGSTPWPPAPPSTRMGSARGLTCCGAAMTWSASSGLFSPNETKEDVSTANLKYLLVPYYLAEMTEKIAQEDRIPVLKTSQDHLKEFIALCEVLELIPEDELELSRQKQPDTLTNRRAQKVARFKRQKAAETKLQEIRERKERRGRSLRAAALSAPIEAGEEDDLENDGEEEREAWLATISLALCKAFDLLDMLKKEEEMLQAVKERKAKDGNAFAREMLDERTKKAETWHHNAANRVAYSKPADPITCATFAQDVIEGRASVSQAHEHKHQPLIFGPASIVGGGLTSERERMTAQVFQPSYRMPTMSIEEAGLREMKMMEKWQERTAEVMKESTSAWHKDGSSSAQEDEDAEEEKARAWDDWKDDNPRGAGNKKLTPCG

SEQ ID NO: 31559 - protein, 365 aa, Zea mays subsp. mays
  peptide (1)..(365): Ceres Seq. ID no. 12416800
  misc_feature (22)..(353): Pfam Name: Pfam Description:  TAP42-like family
  misc_feature (21)..(365): NCBI GI NO: 29367365 NR Description: PP2A regulatory subunit-like protein
  misc_feature (22)..(365): NCBI GI NO: 18423459 NR Description: PP2A regulatory subunit; protein id: At5g53000
  misc_feature (22)..(365): NCBI GI NO: 21553995 NR Description: PP2A regulatory subunit [Arabidopsis thaliana]
  misc_feature (22)..(365): NCBI GI NO: 8809589 NR Description: PP2A regulatory subunit [Arabidopsis thaliana]
  misc_feature (21)..(195): NCBI GI NO: 7489459 NR Description: chilling-induced protein - rice
  misc_feature (271)..(365): NCBI GI NO: 7489459 NR Description: chilling-induced protein - rice
  misc_feature (22)..(210): NCBI GI NO: 19075479 NR Description: putative phosphatase component
  misc_feature (271)..(358): NCBI GI NO: 19075479 NR Description: putative phosphatase component
  misc_feature (5)..(203): NCBI GI NO: 4557663 NR Description: immunoglobulin
  misc_feature (5)..(203): NCBI GI NO: 30584781 NR Description: Homo sapiens immunoglobulin
MGSARGLTCCGAAMTWSASSGLFSPNETKEDVSTANLKYLLVPYYLAEMTEKIAQEDRIPVLKTSQDHLKEFIALCEVLELIPEDELELSRQKQPDTLTNRRAQKVARFKRQKAAETKLQEIRERKERRGRSLRAAALSAPIEAGEEDDLENDGEEEREAWLATISLALCKAFDLLDMLKKEEEMLQAVKERKAKDGNAFAREMLDERTKKAETWHHNAANRVAYSKPADPITCATFAQDVIEGRASVSQAHEHKHQPLIFGPASIVGGGLTSERERMTAQVFQPSYRMPTMSIEEAGLREMKMMEKWQERTAEVMKESTSAWHKDGSSSAQEDEDAEEEKARAWDDWKDDNPRGAGNKKLTPCG

SEQ ID NO: 31560 - protein, 352 aa, Zea mays subsp. mays
  peptide (1)..(352): Ceres Seq. ID no. 12416801
  misc_feature (9)..(340): Pfam Name: Pfam Description:  TAP42-like family
  misc_feature (8)..(352): NCBI GI NO: 29367365 NR Description: PP2A regulatory subunit-like protein
  misc_feature (9)..(352): NCBI GI NO: 18423459 NR Description: PP2A regulatory subunit; protein id: At5g53000
  misc_feature (9)..(352): NCBI GI NO: 21553995 NR Description: PP2A regulatory subunit [Arabidopsis thaliana]
  misc_feature (9)..(352): NCBI GI NO: 8809589 NR Description: PP2A regulatory subunit [Arabidopsis thaliana]
  misc_feature (8)..(182): NCBI GI NO: 7489459 NR Description: chilling-induced protein - rice
  misc_feature (258)..(352): NCBI GI NO: 7489459 NR Description: chilling-induced protein - rice
  misc_feature (9)..(197): NCBI GI NO: 19075479 NR Description: putative phosphatase component
  misc_feature (258)..(345): NCBI GI NO: 19075479 NR Description: putative phosphatase component
  misc_feature (1)..(190): NCBI GI NO: 4557663 NR Description: immunoglobulin
  misc_feature (1)..(190): NCBI GI NO: 30584781 NR Description: Homo sapiens immunoglobulin
MTWSASSGLFSPNETKEDVSTANLKYLLVPYYLAEMTEKIAQEDRIPVLKTSQDHLKEFIALCEVLELIPEDELELSRQKQPDTLTNRRAQKVARFKRQKAAETKLQEIRERKERRGRSLRAAALSAPIEAGEEDDLENDGEEEREAWLATISLALCKAFDLLDMLKKEEEMLQAVKERKAKDGNAFAREMLDERTKKAETWHHNAANRVAYSKPADPITCATFAQDVIEGRASVSQAHEHKHQPLIFGPASIVGGGLTSERERMTAQVFQPSYRMPTMSIEEAGLREMKMMEKWQERTAEVMKESTSAWHKDGSSSAQEDEDAEEEKARAWDDWKDDNPRGAGNKKLTPCG

SEQ ID NO: 31561 - DNA, 1536 bp, Zea mays subsp. mays
  misc_feature (1)..(1536): Ceres Seq. ID no. 12416469
  misc_feature (1530)..(1530): n is a, c, t, g, unknown, or other
  misc_feature (1481)..(1481): n is a, c, t, g, unknown, or other
  misc_feature (1421)..(1421): n is a, c, t, g, unknown, or other
  misc_feature (806)..(806): n is a, c, t, g, unknown, or other
  misc_feature (355)..(355): n is a, c, t, g, unknown, or other
  misc_feature (787)..(787): n is a, c, t, g, unknown, or other
aatccgctccgggcgtcatcgttgtatccaaagcgccgtgctagattccacacctagacaggacgccgcacacggcagccacccccttgtgtgcgtgactgcgtctcgcgcgggcaagagtgcacgggcagagccatggacgtagaagcgcgcaaggccgacgcgccgctcgcgcaaggcaaggcgatgcaccgctttctcgtagcgctcaactgcgggatgctggcggtgggagccatcggcgggccgctcctgagccggctctacttcagcaagggtgggcaccggcagtggctgtccgcgtggctggagaccggcgggtggccgctgctggtgattcccgtggcggcgtcgntcgtggcccgccgcgcgcgcgacaggggcgccccggttcctgctcgcgccgccgcggatcctgctggccgccgcgggcctcggcgtggccacgggcgcggacgacttcatctacgcctacgggctcgcgtacctcccggtgtccacgtccgcgatcctgatctcgacgcagctggcgttcacggtgttcttcgcgttcctcgtggtgcggcagcgcctgacggccgcgtccgtgaacgccgtggcgctgctgacggtgggcaccgtggtgctgggcctgcacgtctcgtcggaccggcccccgggcgtcaccaggggccagtactggctgggcttcgtgctgacgctcggcgccgcggcgctctacggcctcgtcctgccgctcgtggagctcgcctacaggcgcgccgcgggcgccggcggccgcgccgtnacgtacgcgctggtggtgnagatgcagctggtgatgggcttcttcgccaccgcgttctgcaccgtcggcatggtcgtcaacaaggatttccaggcgatcccgagggaggcgaggcggtacgcgctgggggaggcgcggtactacgcggtgctggcgtggtcggcggtgatgtggcagtgcttcttcctgggcgcggtgggcgtcatcttctgcgtgcacacgctgctggcgggcatcctcatcgcggtgttcatcccggtgacggaggtggcggccgtcatcttcctgcgcgagaggttcagcagcgagaaaggcgtggcgctggtgctctcgctctggggcctcgcgtcctactcctacggcgagtggagcgaggccagggccaagaagaggaagaggacgaggacggaggagggcgccgccgccgcggaggccctgcagcaggcgaacccgtgatgctgctgcggactttggcctggcctcttcgatcttccccgttgtgtgtatatcagtatatgttgtgattgtgatcgctgctgtgtgctacgtggatagcgtcctgaatcgtcgtcacctgcagctgtcgcttctggtgtgggtgctcttctgttcggcggtggacgttggccaatantgtgctgcatggtgtgtagatgtaccttggcagtaccacgttcggttcggacagtaagtntggaccggcgcactttgtgggccgatcccagtacaggactgatctaatntgaacg

SEQ ID NO: 31562 - protein, 391 aa, Zea mays subsp. mays
  peptide (1)..(391): Ceres Seq. ID no. 12416470
  misc_feature (32)..(82): Pfam Name: Pfam Description:  Integral membrane protein DUF6
  misc_feature (18)..(78): NCBI GI NO: 15217872 NR Description: purine permease, putative; protein id: At1g28220.1
  misc_feature (18)..(82): NCBI GI NO: 15217873 NR Description: purine permease; protein id: At1g28230
  misc_feature (18)..(82): NCBI GI NO: 7620007 NR Description: purine permease [Arabidopsis thaliana]
  misc_feature (1)..(83): NCBI GI NO: 34902418 NR Description: Hypothetical protein
  misc_feature (18)..(78): NCBI GI NO: 25350217 NR Description: hypothetical protein At2g33750
  misc_feature (18)..(78): NCBI GI NO: 30685825 NR Description: purine permease family [Arabidopsis thaliana]
  misc_feature (39)..(69): NCBI GI NO: 15224103 NR Description: hypothetical protein; protein id: At2g24220.1
  misc_feature (30)..(68): NCBI GI NO: 18397682 NR Description: expressed protein; protein id: At1g30840
  misc_feature (11)..(70): NCBI GI NO: 15219436 NR Description: hypothetical protein; protein id: At1g44750
  misc_feature (4)..(66): NCBI GI NO: 38344290 NR Description: OSJNBa0013K16.22
  misc_feature (74)..(74): Xaa is any aa, unknown or other
  misc_feature (218)..(218): Xaa is any aa, unknown or other
  misc_feature (224)..(224): Xaa is any aa, unknown or other
MDVEARKADAPLAQGKAMHRFLVALNCGMLAVGAIGGPLLSRLYFSKGGHRQWLSAWLETGGWPLLVIPVAASXVARRARDRGAPVPARAAADPAGRRGPRRGHGRGRLHLRLRARVPPGVHVRDPDLDAAGVHGVLRVPRGAAAPDGRVRERRGAADGGHRGAGPARLVGPAPGRHQGPVLAGLRADARRRGALRPRPAARGARLQARRGRRRPRRXVRAGGXDAAGDGLLRHRVLHRRHGRQQGFPGDPEGGEAVRAGGGAVLRGAGVVGGDVAVLLPGRGGRHLLRAHAAGGHPHRGVHPGDGGGGRHLPAREVQQRERRGAGALALGPRVLLLRRVERGQGQEEEEDEDGGGRRRRGGPAAGEPVMLLRTLAWPLRSSPLCVYQYML

SEQ ID NO: 31563 - protein, 374 aa, Zea mays subsp. mays
  peptide (1)..(374): Ceres Seq. ID no. 12416471
  misc_feature (15)..(65): Pfam Name: Pfam Description:  Integral membrane protein DUF6
  misc_feature (1)..(61): NCBI GI NO: 15217872 NR Description: purine permease, putative; protein id: At1g28220.1
  misc_feature (1)..(65): NCBI GI NO: 15217873 NR Description: purine permease; protein id: At1g28230
  misc_feature (1)..(65): NCBI GI NO: 7620007 NR Description: purine permease [Arabidopsis thaliana]
  misc_feature (1)..(66): NCBI GI NO: 34902418 NR Description: Hypothetical protein
  misc_feature (1)..(61): NCBI GI NO: 25350217 NR Description: hypothetical protein At2g33750
  misc_feature (1)..(61): NCBI GI NO: 30685825 NR Description: purine permease family [Arabidopsis thaliana]
  misc_feature (22)..(52): NCBI GI NO: 15224103 NR Description: hypothetical protein; protein id: At2g24220.1
  misc_feature (13)..(51): NCBI GI NO: 18397682 NR Description: expressed protein; protein id: At1g30840
  misc_feature (1)..(53): NCBI GI NO: 15219436 NR Description: hypothetical protein; protein id: At1g44750
  misc_feature (1)..(49): NCBI GI NO: 38344290 NR Description: OSJNBa0013K16.22
  misc_feature (57)..(57): Xaa is any aa, unknown or other
  misc_feature (201)..(201): Xaa is any aa, unknown or other
  misc_feature (207)..(207): Xaa is any aa, unknown or other
MHRFLVALNCGMLAVGAIGGPLLSRLYFSKGGHRQWLSAWLETGGWPLLVIPVAASXVARRARDRGAPVPARAAADPAGRRGPRRGHGRGRLHLRLRARVPPGVHVRDPDLDAAGVHGVLRVPRGAAAPDGRVRERRGAADGGHRGAGPARLVGPAPGRHQGPVLAGLRADARRRGALRPRPAARGARLQARRGRRRPRRXVRAGGXDAAGDGLLRHRVLHRRHGRQQGFPGDPEGGEAVRAGGGAVLRGAGVVGGDVAVLLPGRGGRHLLRAHAAGGHPHRGVHPGDGGGGRHLPAREVQQRERRGAGALALGPRVLLLRRVERGQGQEEEEDEDGGGRRRRGGPAAGEPVMLLRTLAWPLRSSPLCVYQYML

SEQ ID NO: 31564 - protein, 363 aa, Zea mays subsp. mays
  peptide (1)..(363): Ceres Seq. ID no. 12416472
  misc_feature (4)..(54): Pfam Name: Pfam Description:  Integral membrane protein DUF6
  misc_feature (1)..(50): NCBI GI NO: 15217872 NR Description: purine permease, putative; protein id: At1g28220.1
  misc_feature (1)..(54): NCBI GI NO: 15217873 NR Description: purine permease; protein id: At1g28230
  misc_feature (1)..(54): NCBI GI NO: 7620007 NR Description: purine permease [Arabidopsis thaliana]
  misc_feature (1)..(55): NCBI GI NO: 34902418 NR Description: Hypothetical protein
  misc_feature (1)..(50): NCBI GI NO: 25350217 NR Description: hypothetical protein At2g33750
  misc_feature (1)..(50): NCBI GI NO: 30685825 NR Description: purine permease family [Arabidopsis thaliana]
  misc_feature (11)..(41): NCBI GI NO: 15224103 NR Description: hypothetical protein; protein id: At2g24220.1
  misc_feature (2)..(40): NCBI GI NO: 18397682 NR Description: expressed protein; protein id: At1g30840
  misc_feature (1)..(42): NCBI GI NO: 15219436 NR Description: hypothetical protein; protein id: At1g44750
  misc_feature (1)..(38): NCBI GI NO: 38344290 NR Description: OSJNBa0013K16.22
  misc_feature (46)..(46): Xaa is any aa, unknown or other
  misc_feature (190)..(190): Xaa is any aa, unknown or other
  misc_feature (196)..(196): Xaa is any aa, unknown or other
MLAVGAIGGPLLSRLYFSKGGHRQWLSAWLETGGWPLLVIPVAASXVARRARDRGAPVPARAAADPAGRRGPRRGHGRGRLHLRLRARVPPGVHVRDPDLDAAGVHGVLRVPRGAAAPDGRVRERRGAADGGHRGAGPARLVGPAPGRHQGPVLAGLRADARRRGALRPRPAARGARLQARRGRRRPRRXVRAGGXDAAGDGLLRHRVLHRRHGRQQGFPGDPEGGEAVRAGGGAVLRGAGVVGGDVAVLLPGRGGRHLLRAHAAGGHPHRGVHPGDGGGGRHLPAREVQQRERRGAGALALGPRVLLLRRVERGQGQEEEEDEDGGGRRRRGGPAAGEPVMLLRTLAWPLRSSPLCVYQYML

SEQ ID NO: 31565 - DNA, 1242 bp, Zea mays subsp. mays
  misc_feature (1)..(1242): Ceres Seq. ID no. 12356776
atattgcaactttgccaaacacgcacacagcagatccgtctagtgcactagggctcacaatctcgaaggtagctatatcttctcttagtttgctcgtcaccaccggcaatggctacggcgacgactaagccggcggcggggcgcggcgggaggcgctacgcgctgctgctggcgctctgggactcggagtacgcgaaggaggtgtacggcgggtactacaacgtctttgtcgccgctttcggcgccgacgacgtcgtcgtcggcggtggggagggcccggccggcgataggtggcactgcttccgtgtgatcgccggcgagttccctgcgccggaggacctggcgtcgtacgacggcttcgtggtgagcggcagcccgcaggacgcgcacggcgacgaaacatggatccggcgcctctgcgcgctcatccagaccgtccacgccatgaggaagcgggtgctcggcgtctgcttcggccaccaggttctgtgccgagcactgggcgggagggtcggcagggctaggaacggctgggacgtcggggtgaggaaggtgacgtttgcgcgagaccgcctggagagccttgagttcctcggggacctcgtccaggagcttccccggaggcgcctccctcatcgaggttcaccaggacgaggtgtgggagatcccgcctgcggcgacggtgctggcctactcggagaagacgcgcgtggaggtgttcgcggtcggggagcacgcgctgggcatccagggccacccggagtacaccgtcgacatccttcacaacctcatcgaccgcctcaccaagcagaacgacatccggaggagcgtcggcgaggaggcgcggcggacggtcgccgagaccggcgggccggaccgcgctttctggaccgcgctctgcaaaggttttctcggagggggaggggcgggaggagaccgtccgcagccgtctgctgctctgcctgcggtgcgggagacggcgccgccggaggtgacgactagctgcgccgtcgctggttgcttcgccagcgccgcaggtgcaatggtccagatggcgcgcagcaactagttatggctagggctgcccaaaatcttgagtacctggttcctttttgctgcaggattgcactctgtactgcagttcgattttctgttgacagaaagatgtactctagttctcctctaaattattggtgatgtactatactagctagaaactactgcctttgattgatcagtgcc

SEQ ID NO: 31566 - protein, 297 aa, Zea mays subsp. mays
  peptide (1)..(297): Ceres Seq. ID no. 12356777
  misc_feature (28)..(170): Pfam Name: Pfam Description:  Glutamine amidotransferase class-I
  misc_feature (15)..(170): NCBI GI NO: 15234767 NR Description: putative protein; protein id: At4g30550
  misc_feature (15)..(166): NCBI GI NO: 15224079 NR Description: unknown protein; protein id: At2g23970.1
  misc_feature (15)..(170): NCBI GI NO: 17381294 NR Description: AT4g30550/F17I23_110 [Arabidopsis thaliana]
  misc_feature (15)..(170): NCBI GI NO: 21555885 NR Description: unknown [Arabidopsis thaliana]
  misc_feature (15)..(169): NCBI GI NO: 15234765 NR Description: putative protein; protein id: At4g30540.1
  misc_feature (15)..(168): NCBI GI NO: 15234763 NR Description: putative protein; protein id: At4g30530
  misc_feature (15)..(168): NCBI GI NO: 21593315 NR Description: defense-related protein [Arabidopsis thaliana]
  misc_feature (15)..(168): NCBI GI NO: 14009290 NR Description: defense-related protein [Brassica carinata]
  misc_feature (15)..(166): NCBI GI NO: 15224078 NR Description: unknown protein; protein id: At2g23960.1
  misc_feature (1)..(197): NCBI GI NO: 13174241 NR Description: putative glutamine synthetase [Oryza sativa]
MATATTKPAAGRGGRRYALLLALWDSEYAKEVYGGYYNVFVAAFGADDVVVGGGEGPAGDRWHCFRVIAGEFPAPEDLASYDGFVVSGSPQDAHGDETWIRRLCALIQTVHAMRKRVLGVCFGHQVLCRALGGRVGRARNGWDVGVRKVTFARDRLESLEFLGDLVQELPRRRLPHRGSPGRGVGDPACGDGAGLLGEDARGGVRGRGARAGHPGPPGVHRRHPSQPHRPPHQAERHPEERRRGGAADGRRDRRAGPRFLDRALQRFSRRGRGGRRPSAAVCCSACGAGDGAAGGDD

SEQ ID NO: 31567 - protein, 185 aa, Zea mays subsp. mays
  peptide (1)..(185): Ceres Seq. ID no. 12356778
  misc_feature (1)..(58): Pfam Name: Pfam Description:  Glutamine amidotransferase class-I
  misc_feature (1)..(58): NCBI GI NO: 15234767 NR Description: putative protein; protein id: At4g30550
  misc_feature (1)..(54): NCBI GI NO: 15224079 NR Description: unknown protein; protein id: At2g23970.1
  misc_feature (1)..(58): NCBI GI NO: 17381294 NR Description: AT4g30550/F17I23_110 [Arabidopsis thaliana]
  misc_feature (1)..(58): NCBI GI NO: 21555885 NR Description: unknown [Arabidopsis thaliana]
  misc_feature (1)..(57): NCBI GI NO: 15234765 NR Description: putative protein; protein id: At4g30540.1
  misc_feature (1)..(56): NCBI GI NO: 15234763 NR Description: putative protein; protein id: At4g30530
  misc_feature (1)..(56): NCBI GI NO: 21593315 NR Description: defense-related protein [Arabidopsis thaliana]
  misc_feature (1)..(56): NCBI GI NO: 14009290 NR Description: defense-related protein [Brassica carinata]
  misc_feature (1)..(54): NCBI GI NO: 15224078 NR Description: unknown protein; protein id: At2g23960.1
  misc_feature (1)..(85): NCBI GI NO: 13174241 NR Description: putative glutamine synthetase [Oryza sativa]
MRKRVLGVCFGHQVLCRALGGRVGRARNGWDVGVRKVTFARDRLESLEFLGDLVQELPRRRLPHRGSPGRGVGDPACGDGAGLLGEDARGGVRGRGARAGHPGPPGVHRRHPSQPHRPPHQAERHPEERRRGGAADGRRDRRAGPRFLDRALQRFSRRGRGGRRPSAAVCCSACGAGDGAAGGDD

SEQ ID NO: 31568 - DNA, 1534 bp, Zea mays subsp. mays
  misc_feature (1)..(1534): Ceres Seq. ID no. 12416465
  misc_feature (1238)..(1238): n is a, c, t, g, unknown, or other
  misc_feature (300)..(300): n is a, c, t, g, unknown, or other
agaacgccccagccttccacctcgaactccgcggtgcccagcgccctcggtaaccgccctccgccctgccacagagacaggtcgacgagacagacaaaggccggccgccatgggagaggacaagaaggcgggcaacaaggacgccgccggcggcgacaagaagaaggacgccggcgccggggccgcgccgcagcccatcgtgctgaaggtcgacttgcactgcgccggctgcgccaacaaggtccgcaaggccatcaagcacgccccaggtgtggagtcggtgacgccggacatggcggngggtaaggtggtcgtgaccggtccggcggacgcggtggagctcaaggagcgcatcgaggccagggcgaagaagcccgtgcagatcgtctccgccggcgccggcccacccaagtaaggagaaggataagaaagcggacggcggcgagaagaaggcggacaaagagaagggcggcggcggcggagagaagaaggccgacaaggagaagggcggcggagagaagaaggccgacaaggagaagggcggcggagagaagaaggccgacaaggagaagggcggcggcgagaagaaggccgacaaggagaagggtgccgacaagcccaaggaggagaagaagaagcccaaggaggagactgtgacgctgaagatccggctgcactgtgacggctgcatcgagcgcatcaagcgccgcatctccaagatcaaaggcgtgaaggacgtggcgttcgacgccgccaaggacctggtgaaggtgaccggcaccatggacggcgccgctctgccggcgtacctcagggagaagctcagccgggacgtggaagtggtggcgcccggcaagaaggacggcggcggcggcggtggtgacaagaaggacaagggcgcaggagacgggggagagaagaagaaggacggtggcggcggcggcggcggcggcggcgccgaggaaaagaaggacaaggccggggccgcggccgcctccgcgtcggtggcgccgacgcccctggccgacgccggcatgtaccaggtgccgccgcactacgggtacgcgccgtaccaccagccggctccaggcggctactacggtgccgccccaccgcccatccaccacgccggcttctaccccaacggcggcgtccattacccgcccgcgccagcctacgcgtacggccccacccacctccacgcgccccagatgttcagcgacgagaaccccaacgcntgctccgtcatgtgaactcgctcgcttcgccggtttgccgccgccgccgccgccgcgcctaggctcccccttcctccgtgtgagaccaagaaccatgggcttggcctgggattagcggtgtctttagttaaaattatcagtgagtagtagctagcttaagcagtgctccgatccgagatcagttccagcagacctgtgtaaatgagagtcccgccgctccgcgccggcccatcccggtgtaacgaatcgtcatgtgtaaaatgtatccggacccgataaagttttgcccttctgcc

SEQ ID NO: 31569 - protein, 156 aa, Zea mays subsp. mays
  peptide (1)..(156): Ceres Seq. ID no. 12416466
  misc_feature (1)..(131): Pfam Name: Pfam Description:  MARCKS family
  misc_feature (1)..(156): NCBI GI NO: 37534752 NR Description: putative metal-binding protein
  misc_feature (1)..(156): NCBI GI NO: 38344582 NR Description: OSJNBa0053B21.14
  misc_feature (1)..(114): NCBI GI NO: 18404283 NR Description: expressed protein; protein id: At2g36950
  misc_feature (1)..(156): NCBI GI NO: 4097571 NR Description: GMFP5 [Glycine max]
  misc_feature (1)..(114): NCBI GI NO: 25408515 NR Description: probable farnesylated protein
  misc_feature (1)..(156): NCBI GI NO: 27529838 NR Description: hypothetical protein [Nicotiana tabacum]
  misc_feature (1)..(107): NCBI GI NO: 15242741 NR Description: expressed protein; protein id: At5g03380
  misc_feature (120)..(156): NCBI GI NO: 22327990 NR Description: expressed protein; protein id: At5g60800.1
  misc_feature (1)..(102): NCBI GI NO: 22327990 NR Description: expressed protein; protein id: At5g60800.1
  misc_feature (1)..(48): NCBI GI NO: 37532382 NR Description: putative ATFP3
  misc_feature (152)..(152): Xaa is any aa, unknown or other
MDGAALPAYLREKLSRDVEVVAPGKKDGGGGGGDKKDKGAGDGGEKKKDGGGGGGGGGAEEKKDKAGAAAASASVAPTPLADAGMYQVPPHYGYAPYHQPAPGGYYGAAPPPIHHAGFYPNGGVHYPPAPAYAYGPTHLHAPQMFSDENPNXCSVM

SEQ ID NO: 31570 - protein, 137 aa, Zea mays subsp. mays
  peptide (1)..(137): Ceres Seq. ID no. 12416467
  misc_feature (66)..(128): Pfam Name: Pfam Description:  Heavy-metal-associated domain
  misc_feature (25)..(137): NCBI GI NO: 38344582 NR Description: OSJNBa0053B21.14
  misc_feature (32)..(137): NCBI GI NO: 18404283 NR Description: expressed protein; protein id: At2g36950
  misc_feature (72)..(137): NCBI GI NO: 25408515 NR Description: probable farnesylated protein
  misc_feature (37)..(137): NCBI GI NO: 37534752 NR Description: putative metal-binding protein
  misc_feature (37)..(137): NCBI GI NO: 22327990 NR Description: expressed protein; protein id: At5g60800.1
  misc_feature (37)..(137): NCBI GI NO: 37532382 NR Description: putative ATFP3
  misc_feature (39)..(130): NCBI GI NO: 15241256 NR Description: copper chaperone
  misc_feature (113)..(137): NCBI GI NO: 9837379 NR Description: retinitis pigmentosa GTPase regulator
  misc_feature (90)..(137): NCBI GI NO: 29367499 NR Description: unknown [Oryza sativa (japonica cultivar-group)]
  misc_feature (29)..(137): NCBI GI NO: 22327990 NR Description: expressed protein; protein id: At5g60800.1
  misc_feature (100)..(100): Xaa is any aa, unknown or other
ERPSLPPRTPRCPAPSVTALRPATETGRRDRQRPAAMGEDKKAGNKDAAGGDKKKDAGAGAAPQPIVLKVDLHCAGCANKVRKAIKHAPGVESVTPDMAXGKVVVTGPADAVELKERIEARAKKPVQIVSAGAGPPK

SEQ ID NO: 31571 - protein, 101 aa, Zea mays subsp. mays
  peptide (1)..(101): Ceres Seq. ID no. 12416468
  misc_feature (30)..(92): Pfam Name: Pfam Description:  Heavy-metal-associated domain
  misc_feature (1)..(101): NCBI GI NO: 38344582 NR Description: OSJNBa0053B21.14
  misc_feature (1)..(101): NCBI GI NO: 18404283 NR Description: expressed protein; protein id: At2g36950
  misc_feature (36)..(101): NCBI GI NO: 25408515 NR Description: probable farnesylated protein
  misc_feature (1)..(101): NCBI GI NO: 37534752 NR Description: putative metal-binding protein
  misc_feature (1)..(101): NCBI GI NO: 22327990 NR Description: expressed protein; protein id: At5g60800.1
  misc_feature (1)..(101): NCBI GI NO: 37532382 NR Description: putative ATFP3
  misc_feature (3)..(94): NCBI GI NO: 15241256 NR Description: copper chaperone
  misc_feature (77)..(101): NCBI GI NO: 9837379 NR Description: retinitis pigmentosa GTPase regulator
  misc_feature (54)..(101): NCBI GI NO: 29367499 NR Description: unknown [Oryza sativa (japonica cultivar-group)]
  misc_feature (1)..(101): NCBI GI NO: 22327990 NR Description: expressed protein; protein id: At5g60800.1
  misc_feature (64)..(64): Xaa is any aa, unknown or other
MGEDKKAGNKDAAGGDKKKDAGAGAAPQPIVLKVDLHCAGCANKVRKAIKHAPGVESVTPDMAXGKVVVTGPADAVELKERIEARAKKPVQIVSAGAGPPK

SEQ ID NO: 31572 - DNA, 1432 bp, Zea mays subsp. mays
  misc_feature (1)..(1432): Ceres Seq. ID no. 12382187
atgacaagtaaattagagattgatgcacgcagtagtaattaagacaggaatcgtaatccccccttgtttttggtttagtagtaaatctgcctgctgctccaagtagtagttaaaaaaacccagagaagcgcggtgggctgcgtataaatagccggccggccggaaagggggaaacgggcaggcaaacaaacaacacacactcgcgaggagcaggagcaggagcgatcaggacaacgctttggactcctggactggacctaccccgatggcgccagcctcctctccgatgagacagtaatccagcgagcgcgagtgagaggcaaccagcaaccatgaggccagacacggcggcctccgcctctccgactccgaagaagaaacccgacagtaaagccgcgctggacctcgcgtcgtggagcttcaacgtcaccacgtccgtcgggctcatcatggtcaacaaggctctaatggcgacgtacgggttcacgttcgccacgacgttaacggggctgcatttcgcgaccaccaccgtgatgaccctcgtgttccggtgggtcggcctgagccagccgtcgcagcttccgttaccggacctagccaagttcgtggtgttctccaacctgtccatcgtggggatgaacgtcagcctgatgtggaactccgtcggcttctaccaggtagccaagctgtgcatgatcccggcgtcgtgcctcctggaggtggtcttggaccgcgtgcactactcccgggacaccaggctcagcatcgcggtcgtgctcgctggagtggcggtgtgcaccgtcactgacgtgagcgtcaacgccagaggcctggtcgcggccgtcgtggctgtctggagcacggctctgcagcagtattatgttcatttcctccagcgcaagcactctctcaactcgttcagcctgctgggccacacggcgccggcgcaggcagggtcgctgctgctggcagggccgttcgttgactacctgctgacagggcaaagggtggaccacttcagcttctcgtctctcgctctgttgttcctcgcgctgtcgtgcttcatcgcgatcggggtcaacctgagccagttcatctgcatcggccgcttctccgccgtgtccttccaggtcctgggccacatgaagaccgtgctcgtcctctccctcggcttcctcttcttcggcaaggaaggcctcagcctccaggtcgtcgtcgggatggccctcgccgtcctcgggatggtgtggtacgggaacgcgtccgctaaaccgggcggcaaggagcgccgcggcaaagacctgccggtgagcctcaaacaagacaaggacgacactgacaaataatcatttgttatagttacaggtatacgtgtaatcgtttaatcacatggtgcaattgtttgccaaatcattgaacaatttcctgtggt

SEQ ID NO: 31573 - protein, 337 aa, Zea mays subsp. mays
  peptide (1)..(337): Ceres Seq. ID no. 12382188
  misc_feature (16)..(337): NCBI GI NO: 18420440 NR Description: putative protein; protein id: At4g39390
  misc_feature (16)..(337): NCBI GI NO: 21593003 NR Description: unknown [Arabidopsis thaliana]
  misc_feature (16)..(337): NCBI GI NO: 7486049 NR Description: hypothetical protein F23K16
  misc_feature (13)..(336): NCBI GI NO: 30313364 NR Description: putative transmembrane protein [Oryza sativa]
  misc_feature (13)..(336): NCBI GI NO: 18399097 NR Description: expressed protein; protein id: At1g34020
  misc_feature (13)..(330): NCBI GI NO: 15234794 NR Description: hypothetical protein; protein id: At4g09810.1
  misc_feature (13)..(336): NCBI GI NO: 21595054 NR Description: unknown [Arabidopsis thaliana]
  misc_feature (14)..(325): NCBI GI NO: 18394949 NR Description: expressed protein; protein id: At1g21070
  misc_feature (14)..(325): NCBI GI NO: 21536703 NR Description: unknown [Arabidopsis thaliana]
  misc_feature (15)..(336): NCBI GI NO: 18411172 NR Description: expressed protein; protein id: At1g76670
MRPDTAASASPTPKKKPDSKAALDLASWSFNVTTSVGLIMVNKALMATYGFTFATTLTGLHFATTTVMTLVFRWVGLSQPSQLPLPDLAKFVVFSNLSIVGMNVSLMWNSVGFYQVAKLCMIPASCLLEVVLDRVHYSRDTRLSIAVVLAGVAVCTVTDVSVNARGLVAAVVAVWSTALQQYYVHFLQRKHSLNSFSLLGHTAPAQAGSLLLAGPFVDYLLTGQRVDHFSFSSLALLFLALSCFIAIGVNLSQFICIGRFSAVSFQVLGHMKTVLVLSLGFLFFGKEGLSLQVVVGMALAVLGMVWYGNASAKPGGKERRGKDLPVSLKQDKDDTDK

SEQ ID NO: 31574 - protein, 298 aa, Zea mays subsp. mays
  peptide (1)..(298): Ceres Seq. ID no. 12382189
  misc_feature (1)..(298): NCBI GI NO: 18420440 NR Description: putative protein; protein id: At4g39390
  misc_feature (1)..(298): NCBI GI NO: 21593003 NR Description: unknown [Arabidopsis thaliana]
  misc_feature (1)..(298): NCBI GI NO: 7486049 NR Description: hypothetical protein F23K16
  misc_feature (1)..(297): NCBI GI NO: 30313364 NR Description: putative transmembrane protein [Oryza sativa]
  misc_feature (1)..(297): NCBI GI NO: 18399097 NR Description: expressed protein; protein id: At1g34020
  misc_feature (1)..(291): NCBI GI NO: 15234794 NR Description: hypothetical protein; protein id: At4g09810.1
  misc_feature (1)..(297): NCBI GI NO: 21595054 NR Description: unknown [Arabidopsis thaliana]
  misc_feature (1)..(286): NCBI GI NO: 18394949 NR Description: expressed protein; protein id: At1g21070
  misc_feature (1)..(286): NCBI GI NO: 21536703 NR Description: unknown [Arabidopsis thaliana]
  misc_feature (1)..(297): NCBI GI NO: 18411172 NR Description: expressed protein; protein id: At1g76670
MVNKALMATYGFTFATTLTGLHFATTTVMTLVFRWVGLSQPSQLPLPDLAKFVVFSNLSIVGMNVSLMWNSVGFYQVAKLCMIPASCLLEVVLDRVHYSRDTRLSIAVVLAGVAVCTVTDVSVNARGLVAAVVAVWSTALQQYYVHFLQRKHSLNSFSLLGHTAPAQAGSLLLAGPFVDYLLTGQRVDHFSFSSLALLFLALSCFIAIGVNLSQFICIGRFSAVSFQVLGHMKTVLVLSLGFLFFGKEGLSLQVVVGMALAVLGMVWYGNASAKPGGKERRGKDLPVSLKQDKDDTDK

SEQ ID NO: 31575 - protein, 292 aa, Zea mays subsp. mays
  peptide (1)..(292): Ceres Seq. ID no. 12382190
  misc_feature (1)..(292): NCBI GI NO: 18420440 NR Description: putative protein; protein id: At4g39390
  misc_feature (1)..(292): NCBI GI NO: 21593003 NR Description: unknown [Arabidopsis thaliana]
  misc_feature (1)..(292): NCBI GI NO: 7486049 NR Description: hypothetical protein F23K16
  misc_feature (1)..(291): NCBI GI NO: 30313364 NR Description: putative transmembrane protein [Oryza sativa]
  misc_feature (1)..(291): NCBI GI NO: 18399097 NR Description: expressed protein; protein id: At1g34020
  misc_feature (1)..(285): NCBI GI NO: 15234794 NR Description: hypothetical protein; protein id: At4g09810.1
  misc_feature (1)..(291): NCBI GI NO: 21595054 NR Description: unknown [Arabidopsis thaliana]
  misc_feature (1)..(280): NCBI GI NO: 18394949 NR Description: expressed protein; protein id: At1g21070
  misc_feature (1)..(280): NCBI GI NO: 21536703 NR Description: unknown [Arabidopsis thaliana]
  misc_feature (1)..(291): NCBI GI NO: 18411172 NR Description: expressed protein; protein id: At1g76670
MATYGFTFATTLTGLHFATTTVMTLVFRWVGLSQPSQLPLPDLAKFVVFSNLSIVGMNVSLMWNSVGFYQVAKLCMIPASCLLEVVLDRVHYSRDTRLSIAVVLAGVAVCTVTDVSVNARGLVAAVVAVWSTALQQYYVHFLQRKHSLNSFSLLGHTAPAQAGSLLLAGPFVDYLLTGQRVDHFSFSSLALLFLALSCFIAIGVNLSQFICIGRFSAVSFQVLGHMKTVLVLSLGFLFFGKEGLSLQVVVGMALAVLGMVWYGNASAKPGGKERRGKDLPVSLKQDKDDTDK

SEQ ID NO: 31576 - DNA, 1499 bp, Zea mays subsp. mays
  misc_feature (1)..(1499): Ceres Seq. ID no. 12356783
agggccagttccgtccgacgcgtcgcaacaacccccagggctcaattgacgcgcgggggcgtttcggtcatccagtcatccccctcccctgccaaaggcgaagagcagaagcagaagcagcagcagcaggcgaagaggcagtggtagacatgccaaggtcatcagccggggcgtcatgcacagcagttgaccattctgagcagagcagaaaggatgatgaatatgagaggctggttacaagagctcaacatgcaacatctgatgttggcacgacaattttatctgagcaaccaaagtcaagatctttcatttggtggatgaaagttctgcttggctgcttccttcttatattagtgggctatgtcttcgtgaaatggggggtcccctttgtctttgagaaggttctcttgccaatcatgcaatgggaagccagtgcttttgggcgtccagtattagctattgttctcgttgcatctttggctctctttccagttattctagttccttctggaccttctatgtggttagcaggaatgatctttggatatggttggggtttcttgattataatggccgggagtactattggcatggtggttccatattggattggttcattgttccgtgaacgtctgcatgtatggctgacaaagtggcctcagcagatagcactaataaaactcgcgggtgaaggaaattggttccagcagtttcgggttgtcgcgcttttcagaatctcaccattcccatatacaatttttaattatgccgtgactgtgacagaaattaagttcaacccttatctatgtggttctgttgctggaatggtacctgaggccttcatttatatctacagtgggcgtttaatacgtacattggctgacatgaagtacggcaactataaaatgacaccagtggaaatagcatacaacgccatttccttcgtcatcgctatcgccctcacggtcgccttcacggtgtacgcgaagagagctctgggtgacataaaaagtccggacgatggcatcggtaaagacgaagaagatcacggcccaaatggctcaggggtgcgtatgaatcgtcgtcaggagcgtgccgacgcacgttacatagaactagatgatatgtgatggtgtgttggcccggatcttgcttggaaggaggcaccagtaggtcattaggtgcacggctacggtaggtagctagctatagtttacaagaggaggctaaaataatccacacccagctgacgtggtttgcgtgattcgtttcgtgtgctttgcccactgcactgccatactgtctgaatctgaaggtgcagggctactcactactgagttactgaccgagcgatgctgctctcaacgatgtttctgtgaccatcagcgtatcatccagtccttgatctgaagcctacactggagcttcatgttgaagcatacattggacttgagtagtacatttgtatataacgtaactgctaatagagttagcatatg

SEQ ID NO: 31577 - protein, 375 aa, Zea mays subsp. mays
  peptide (1)..(375): Ceres Seq. ID no. 12356784
  misc_feature (50)..(370): NCBI GI NO: 31249711 NR Description: hypothetical protein
  misc_feature (62)..(347): NCBI GI NO: 18395356 NR Description: expressed protein; protein id: At2g02370
  misc_feature (99)..(373): NCBI GI NO: 34913316 NR Description: P0519E12.36
  misc_feature (95)..(342): NCBI GI NO: 30685958 NR Description: expressed protein [Arabidopsis thaliana]
  misc_feature (66)..(339): NCBI GI NO: 15221330 NR Description: hypothetical protein; protein id: At1g12450.1
  misc_feature (64)..(342): NCBI GI NO: 15234386 NR Description: putative protein; protein id: At4g12000
  misc_feature (214)..(347): NCBI GI NO: 25410981 NR Description: hypothetical protein At2g02370
  misc_feature (66)..(213): NCBI GI NO: 8778630 NR Description: F5O11.19 [Arabidopsis thaliana]
  misc_feature (283)..(339): NCBI GI NO: 8778630 NR Description: F5O11.19 [Arabidopsis thaliana]
  misc_feature (186)..(342): NCBI GI NO: 7486891 NR Description: hypothetical protein T12H17
GQFRPTRRNNPQGSIDARGRFGHPVIPLPCQRRRAEAEAAAAGEEAVVDMPRSSAGASCTAVDHSEQSRKDDEYERLVTRAQHATSDVGTTILSEQPKSRSFIWWMKVLLGCFLLILVGYVFVKWGVPFVFEKVLLPIMQWEASAFGRPVLAIVLVASLALFPVILVPSGPSMWLAGMIFGYGWGFLIIMAGSTIGMVVPYWIGSLFRERLHVWLTKWPQQIALIKLAGEGNWFQQFRVVALFRISPFPYTIFNYAVTVTEIKFNPYLCGSVAGMVPEAFIYIYSGRLIRTLADMKYGNYKMTPVEIAYNAISFVIAIALTVAFTVYAKRALGDIKSPDDGIGKDEEDHGPNGSGVRMNRRQERADARYIELDDM

SEQ ID NO: 31578 - protein, 326 aa, Zea mays subsp. mays
  peptide (1)..(326): Ceres Seq. ID no. 12356785
  misc_feature (1)..(321): NCBI GI NO: 31249711 NR Description: hypothetical protein
  misc_feature (13)..(298): NCBI GI NO: 18395356 NR Description: expressed protein; protein id: At2g02370
  misc_feature (50)..(324): NCBI GI NO: 34913316 NR Description: P0519E12.36
  misc_feature (46)..(293): NCBI GI NO: 30685958 NR Description: expressed protein [Arabidopsis thaliana]
  misc_feature (17)..(290): NCBI GI NO: 15221330 NR Description: hypothetical protein; protein id: At1g12450.1
  misc_feature (15)..(293): NCBI GI NO: 15234386 NR Description: putative protein; protein id: At4g12000
  misc_feature (165)..(298): NCBI GI NO: 25410981 NR Description: hypothetical protein At2g02370
  misc_feature (17)..(164): NCBI GI NO: 8778630 NR Description: F5O11.19 [Arabidopsis thaliana]
  misc_feature (234)..(290): NCBI GI NO: 8778630 NR Description: F5O11.19 [Arabidopsis thaliana]
  misc_feature (137)..(293): NCBI GI NO: 7486891 NR Description: hypothetical protein T12H17
MPRSSAGASCTAVDHSEQSRKDDEYERLVTRAQHATSDVGTTILSEQPKSRSFIWWMKVLLGCFLLILVGYVFVKWGVPFVFEKVLLPIMQWEASAFGRPVLAIVLVASLALFPVILVPSGPSMWLAGMIFGYGWGFLIIMAGSTIGMVVPYWIGSLFRERLHVWLTKWPQQIALIKLAGEGNWFQQFRVVALFRISPFPYTIFNYAVTVTEIKFNPYLCGSVAGMVPEAFIYIYSGRLIRTLADMKYGNYKMTPVEIAYNAISFVIAIALTVAFTVYAKRALGDIKSPDDGIGKDEEDHGPNGSGVRMNRRQERADARYIELDDM

SEQ ID NO: 31579 - protein, 270 aa, Zea mays subsp. mays
  peptide (1)..(270): Ceres Seq. ID no. 12356786
  misc_feature (1)..(265): NCBI GI NO: 31249711 NR Description: hypothetical protein
  misc_feature (1)..(242): NCBI GI NO: 18395356 NR Description: expressed protein; protein id: At2g02370
  misc_feature (1)..(268): NCBI GI NO: 34913316 NR Description: P0519E12.36
  misc_feature (1)..(237): NCBI GI NO: 30685958 NR Description: expressed protein [Arabidopsis thaliana]
  misc_feature (1)..(234): NCBI GI NO: 15221330 NR Description: hypothetical protein; protein id: At1g12450.1
  misc_feature (1)..(237): NCBI GI NO: 15234386 NR Description: putative protein; protein id: At4g12000
  misc_feature (109)..(242): NCBI GI NO: 25410981 NR Description: hypothetical protein At2g02370
  misc_feature (1)..(108): NCBI GI NO: 8778630 NR Description: F5O11.19 [Arabidopsis thaliana]
  misc_feature (178)..(234): NCBI GI NO: 8778630 NR Description: F5O11.19 [Arabidopsis thaliana]
  misc_feature (81)..(237): NCBI GI NO: 7486891 NR Description: hypothetical protein T12H17
MKVLLGCFLLILVGYVFVKWGVPFVFEKVLLPIMQWEASAFGRPVLAIVLVASLALFPVILVPSGPSMWLAGMIFGYGWGFLIIMAGSTIGMVVPYWIGSLFRERLHVWLTKWPQQIALIKLAGEGNWFQQFRVVALFRISPFPYTIFNYAVTVTEIKFNPYLCGSVAGMVPEAFIYIYSGRLIRTLADMKYGNYKMTPVEIAYNAISFVIAIALTVAFTVYAKRALGDIKSPDDGIGKDEEDHGPNGSGVRMNRRQERADARYIELDDM

SEQ ID NO: 31580 - DNA, 839 bp, Zea mays subsp. mays
  misc_feature (1)..(839): Ceres Seq. ID no. 12354220
acagtctcgcagccgccgcgatctgctagcccccgaaccctagctcaatgggaaccgccgcttctccttctccctcactttccctagacacagccgcctcccgtcctgatcctccttccccggaggccaccgctacaccagccaaagaagatcaccagcactccgcctccgacgccgcgaccgccgcagctggcggcggcgcagacgatgcggcggcggctccttctgttggaggcggcgcggaagaggctgctgagacggtggtcatcgatgcctccgcggtggccagcggagcaggggagggggaggaggaggaggagcaaggggagtgcgggttctgtctcttcatgaagggcggcggctgcaaggacgagttcgtcgcgtgggagaagtgcgtggaggagacggatgccgcggatgccagcattgacgtcgtggagcggtgccaagacgtcacggccgcgctgcggaagtgcatggacgcgcacgccgcctactacgagcctatcctccgggccgagcgcgccatggctgcggacctcgaggcctttcaggcccaagaagccgcctccgactccgcggcgtcggaggaaggccagaaggaggcggcagcggcggccgaggcagcgccgcgtccgtcagacgaaggccagaataagcaggtggctgaggcggcagttgcggaggagagcagagatcctgcagcctgattgggcgaaaaaaggcagcggcgtcttcaattttttgtgagggatttgaggatatgaattccgtttgtaccttaggagagcatcaattaacattttgtgagggggatagatttctgtccttttctcttt

SEQ ID NO: 31581 - protein, 220 aa, Zea mays subsp. mays
  peptide (1)..(220): Ceres Seq. ID no. 12354221
  misc_feature (40)..(220): NCBI GI NO: 34394883 NR Description: unknown protein
  misc_feature (1)..(194): NCBI GI NO: 8778401 NR Description: F16A14.27 [Arabidopsis thaliana]
  misc_feature (1)..(194): NCBI GI NO: 30683589 NR Description: expressed protein [Arabidopsis thaliana]
  misc_feature (23)..(194): NCBI GI NO: 21592562 NR Description: unknown [Arabidopsis thaliana]
  misc_feature (43)..(172): NCBI GI NO: 15242783 NR Description: putative protein; protein id: At5g57570.1
  misc_feature (87)..(215): NCBI GI NO: 15242817 NR Description: putative protein; protein id: At5g57640.1
  misc_feature (62)..(166): NCBI GI NO: 15241716 NR Description: putative protein; protein id: At5g02210.1
MGTAASPSPSLSLDTAASRPDPPSPEATATPAKEDHQHSASDAATAAAGGGADDAAAAPSVGGGAEEAAETVVIDASAVASGAGEGEEEEEQGECGFCLFMKGGGCKDEFVAWEKCVEETDAADASIDVVERCQDVTAALRKCMDAHAAYYEPILRAERAMAADLEAFQAQEAASDSAASEEGQKEAAAAAEAAPRPSDEGQNKQVAEAAVAEESRDPAA

SEQ ID NO: 31582 - protein, 120 aa, Zea mays subsp. mays
  peptide (1)..(120): Ceres Seq. ID no. 12354222
  misc_feature (1)..(120): NCBI GI NO: 34394883 NR Description: unknown protein
  misc_feature (1)..(94): NCBI GI NO: 8778401 NR Description: F16A14.27 [Arabidopsis thaliana]
  misc_feature (1)..(94): NCBI GI NO: 30683589 NR Description: expressed protein [Arabidopsis thaliana]
  misc_feature (1)..(94): NCBI GI NO: 21592562 NR Description: unknown [Arabidopsis thaliana]
  misc_feature (1)..(72): NCBI GI NO: 15242783 NR Description: putative protein; protein id: At5g57570.1
  misc_feature (1)..(115): NCBI GI NO: 15242817 NR Description: putative protein; protein id: At5g57640.1
  misc_feature (1)..(66): NCBI GI NO: 15241716 NR Description: putative protein; protein id: At5g02210.1
MKGGGCKDEFVAWEKCVEETDAADASIDVVERCQDVTAALRKCMDAHAAYYEPILRAERAMAADLEAFQAQEAASDSAASEEGQKEAAAAAEAAPRPSDEGQNKQVAEAAVAEESRDPAA

SEQ ID NO: 31583 - protein, 113 aa, Zea mays subsp. mays
  peptide (1)..(113): Ceres Seq. ID no. 12354223
MPRMPALTSWSGAKTSRPRCGSAWTRTPPTTSLSSGPSAPWLRTSRPFRPKKPPPTPRRRRKARRRRQRRPRQRRVRQTKARISRWLRRQLRRRAEILQPDWAKKGSGVFNFL

SEQ ID NO: 31584 - DNA, 839 bp, Zea mays subsp. mays
  misc_feature (1)..(839): Ceres Seq. ID no. 12359809
agcctctcgctctcccgccgacgcgcacgtcctccgcgccgagcccagaggcagacagaggacgcggccatggcgtccatcccgtgcaccttccagctgagcacggcggcgtcgaggagggtgtcgccgcgggtggcggcgcaggggagaggccaaggaggagggggagcggtgctgaggacgccgctgctgggcgcggggaggcggggcctggggtggctgcggccgtcgcggttgagccgcgtggtgccggcgagcgagagcgggcgggcgggtcccacctgctggttcaagttcggcaacaaggacgccgagggtgccggcatctacggcagccaggccagggacgacttcgaccgcgacgacgtcgagcagtacttcaactacatggggatgctggcggtggagggcacctacgacaagatggaggcgctgctgaaccaggacatccaccccgtggacatcctcctcatgctggcagcctccgagggcgaccgccccaagatcgaggagctgctccgcgccggcgccaggttcgacgtcaaggacgtcgacggccggacggcgctcgaccgggccaccgacgagaccagagagttcatcctcggcttcgccgccaagaaggcctgaacgaccatgtgcaggtcaatcgtgcccggttcttctggacatttggctgcatgtaactaaattcttcgttttctggaatcggtggagtgttcaaccgggggtgaacaagctgtttgcagaggtagctttccgtagtcagctgtattcttactgaagactgaggggtgtactgcgacctgccaaattgctcaataaggtcatgcttcgtt

SEQ ID NO: 31585 - protein, 227 aa, Zea mays subsp. mays
  peptide (1)..(227): Ceres Seq. ID no. 12359810
  misc_feature (40)..(207): NCBI GI NO: 29367367 NR Description: calmodulin-related protein
PLALPPTRTSSAPSPEADRGRGHGVHPVHLPAEHGGVEEGVAAGGGAGERPRRRGSGAEDAAAGRGEAGPGVAAAVAVEPRGAGERERAGGSHLLVQVRQQGRRGCRHLRQPGQGRLRPRRRRAVLQLHGDAGGGGHLRQDGGAAEPGHPPRGHPPHAGSLRGRPPQDRGAAPRRRQVRRQGRRRPDGARPGHRRDQRVHPRLRRQEGLNDHVQVNRARFFWTFGCM

SEQ ID NO: 31586 - protein, 209 aa, Zea mays subsp. mays
  peptide (1)..(209): Ceres Seq. ID no. 12359811
  misc_feature (24)..(209): NCBI GI NO: 34901972 NR Description: hypothetical protein~similar to Arabidopsisthaliana chromosome 1
  misc_feature (14)..(209): NCBI GI NO: 25373264 NR Description: unknown protein [imported] - Arabidopsis thaliana
  misc_feature (67)..(209): NCBI GI NO: 18403267 NR Description: expressed protein; protein id: At1g50900
  misc_feature (130)..(209): NCBI GI NO: 33146521 NR Description: unknown protein
SLSLSRRRARPPRRAQRQTEDAAMASIPCTFQLSTAASRRVSPRVAAQGRGQGGGGAVLRTPLLGAGRRGLGWLRPSRLSRVVPASESGRAGPTCWFKFGNKDAEGAGIYGSQARDDFDRDDVEQYFNYMGMLAVEGTYDKMEALLNQDIHPVDILLMLAASEGDRPKIEELLRAGARFDVKDVDGRTALDRATDETREFILGFAAKKA

SEQ ID NO: 31587 - protein, 186 aa, Zea mays subsp. mays
  peptide (1)..(186): Ceres Seq. ID no. 12359812
  misc_feature (1)..(186): NCBI GI NO: 34901972 NR Description: hypothetical protein~similar to Arabidopsisthaliana chromosome 1
  misc_feature (1)..(186): NCBI GI NO: 25373264 NR Description: unknown protein [imported] - Arabidopsis thaliana
  misc_feature (44)..(186): NCBI GI NO: 18403267 NR Description: expressed protein; protein id: At1g50900
  misc_feature (107)..(186): NCBI GI NO: 33146521 NR Description: unknown protein
MASIPCTFQLSTAASRRVSPRVAAQGRGQGGGGAVLRTPLLGAGRRGLGWLRPSRLSRVVPASESGRAGPTCWFKFGNKDAEGAGIYGSQARDDFDRDDVEQYFNYMGMLAVEGTYDKMEALLNQDIHPVDILLMLAASEGDRPKIEELLRAGARFDVKDVDGRTALDRATDETREFILGFAAKKA

SEQ ID NO: 31588 - DNA, 896 bp, Zea mays subsp. mays
  misc_feature (1)..(896): Ceres Seq. ID no. 12354413
aaagattacgctgtcagggccctggtcaacgctgtcgaccatcttggcacagtggcctacaagctgacagacctatacgaagagcaggcttcagaaataacaaccctcgagttgaaagtagcatgcttgaaccagcaagtccgtacctgccagacatacacggacaaagaaggcctcagacaacagcagatgatgggggctgccagaagacaccataaccattacatcgtaccatatgcgggaaacaaaagaatgcaggccttctctgttacgcaagccgatgctgatttcgacccaacgccaaggcctttctcttcagcaaggacccttgagtggcatttggtttccgagaagaattccaaaaccagtagaccagatcagtctgaaattgccttaggagaaacaaaaactactaaggcttcgtcaagtggtttccgccttctcggcaaggaatcatctgcatctcccttgtccaggaatgtgcagtccaacataaccagtttggatattgtcagtgccggcatgaaggatcagcccacgaccaggcacttgtcatcgttcagttctttggacaaccccaggggccgacaaatccagaaggctccgcttcgcacaaaaagtatgctagccgctttctttgtcaaacacagatcagcaaagatgaaaaacgtctctgtgcgttgatcaactgcaagccaagcctgtattttgctccagccaaaccgacgtggaagtgttaagggcatgagatgtatacatgtttgtatatggtatttgggtcttgtatgctagtgctctagagataaacctttacggatgcctttcaatctagagtctttggcatcttgctcatgaccttaatgtaatgatttatatggatatatattactagtttt

SEQ ID NO: 31589 - protein, 227 aa, Zea mays subsp. mays
  peptide (1)..(227): Ceres Seq. ID no. 12354414
  misc_feature (1)..(227): NCBI GI NO: 34912804 NR Description: P0501G01.11
  misc_feature (1)..(222): NCBI GI NO: 18407012 NR Description: expressed protein; protein id: At2g46225
  misc_feature (1)..(222): NCBI GI NO: 26452761 NR Description: unknown protein [Arabidopsis thaliana]
  misc_feature (1)..(167): NCBI GI NO: 25408977 NR Description: hypothetical protein At2g46220
  misc_feature (1)..(96): NCBI GI NO: 15229112 NR Description: putative protein; protein id: At3g49290.1
  misc_feature (1)..(84): NCBI GI NO: 30689382 NR Description: expressed protein [Arabidopsis thaliana]
  misc_feature (1)..(84): NCBI GI NO: 10177091 NR Description: emb|CAB66408
  misc_feature (1)..(85): NCBI GI NO: 34913914 NR Description: OSJNBa0066C06.8
  misc_feature (1)..(174): NCBI GI NO: 34904432 NR Description: unnamed protein product
  misc_feature (1)..(89): NCBI GI NO: 15238265 NR Description: putative protein; protein id: At5g42030
KDYAVRALVNAVDHLGTVAYKLTDLYEEQASEITTLELKVACLNQQVRTCQTYTDKEGLRQQQMMGAARRHHNHYIVPYAGNKRMQAFSVTQADADFDPTPRPFSSARTLEWHLVSEKNSKTSRPDQSEIALGETKTTKASSSGFRLLGKESSASPLSRNVQSNITSLDIVSAGMKDQPTTRHLSSFSSLDNPRGRQIQKAPLRTKSMLAAFFVKHRSAKMKNVSVR

SEQ ID NO: 31590 - protein, 164 aa, Zea mays subsp. mays
  peptide (1)..(164): Ceres Seq. ID no. 12354415
  misc_feature (1)..(164): NCBI GI NO: 34912804 NR Description: P0501G01.11
  misc_feature (1)..(159): NCBI GI NO: 18407012 NR Description: expressed protein; protein id: At2g46225
  misc_feature (1)..(159): NCBI GI NO: 26452761 NR Description: unknown protein [Arabidopsis thaliana]
  misc_feature (1)..(104): NCBI GI NO: 25408977 NR Description: hypothetical protein At2g46220
  misc_feature (1)..(33): NCBI GI NO: 15229112 NR Description: putative protein; protein id: At3g49290.1
  misc_feature (1)..(21): NCBI GI NO: 30689382 NR Description: expressed protein [Arabidopsis thaliana]
  misc_feature (1)..(21): NCBI GI NO: 10177091 NR Description: emb|CAB66408
  misc_feature (1)..(22): NCBI GI NO: 34913914 NR Description: OSJNBa0066C06.8
  misc_feature (1)..(111): NCBI GI NO: 34904432 NR Description: unnamed protein product
  misc_feature (1)..(26): NCBI GI NO: 15238265 NR Description: putative protein; protein id: At5g42030
MMGAARRHHNHYIVPYAGNKRMQAFSVTQADADFDPTPRPFSSARTLEWHLVSEKNSKTSRPDQSEIALGETKTTKASSSGFRLLGKESSASPLSRNVQSNITSLDIVSAGMKDQPTTRHLSSFSSLDNPRGRQIQKAPLRTKSMLAAFFVKHRSAKMKNVSVR

SEQ ID NO: 31591 - protein, 163 aa, Zea mays subsp. mays
  peptide (1)..(163): Ceres Seq. ID no. 12354416
  misc_feature (1)..(163): NCBI GI NO: 34912804 NR Description: P0501G01.11
  misc_feature (1)..(158): NCBI GI NO: 18407012 NR Description: expressed protein; protein id: At2g46225
  misc_feature (1)..(158): NCBI GI NO: 26452761 NR Description: unknown protein [Arabidopsis thaliana]
  misc_feature (1)..(103): NCBI GI NO: 25408977 NR Description: hypothetical protein At2g46220
  misc_feature (1)..(32): NCBI GI NO: 15229112 NR Description: putative protein; protein id: At3g49290.1
  misc_feature (1)..(20): NCBI GI NO: 30689382 NR Description: expressed protein [Arabidopsis thaliana]
  misc_feature (1)..(20): NCBI GI NO: 10177091 NR Description: emb|CAB66408
  misc_feature (1)..(21): NCBI GI NO: 34913914 NR Description: OSJNBa0066C06.8
  misc_feature (1)..(110): NCBI GI NO: 34904432 NR Description: unnamed protein product
  misc_feature (1)..(25): NCBI GI NO: 15238265 NR Description: putative protein; protein id: At5g42030
MGAARRHHNHYIVPYAGNKRMQAFSVTQADADFDPTPRPFSSARTLEWHLVSEKNSKTSRPDQSEIALGETKTTKASSSGFRLLGKESSASPLSRNVQSNITSLDIVSAGMKDQPTTRHLSSFSSLDNPRGRQIQKAPLRTKSMLAAFFVKHRSAKMKNVSVR

SEQ ID NO: 31592 - DNA, 1209 bp, Zea mays subsp. mays
  misc_feature (1)..(1209): Ceres Seq. ID no. 12374731
ctcactgccaaccacacgttcccaagccagccattggttggtagcaagccaagctaatcaagttagctttagatacccgctcccgctcttcttccctccgacgaaggcagctgacgacacagcaggctagcttcggagttcggagcactcagccatggccattgccggcgctctcctcctcctgctcggactcctcgcgcgggaggccgctgccggcggggtggcagagcgcgcacgccacgttctacggcggcggggacgcgtccggcacaatgggcggcgcttgcgggtacggcaacctgtacagcacggggtacggcacgagcacggcggcgctgagcacggcgctgttcaacgacggcgcggcgtgcgggtcctgctacgagctgcggtgcgacaacgacgggcggtggtgcctgccgggcaccatcaccgtcacggccaccaacttctgcccgcccaactacggcctccccagcgacgacggcggctggtgcaacccgccgcgcccgcacttcgacatggccgagccggccttcctccgcatcgcgcagtaccgcgccggcatcgtgcccgtcgcgttcaggagagtgccgtgcgtgaagaagggcggcatccggttcaccatcaacgggcactcctacttcaacctggtgctggtgaccaacgtggcgggcgccggcgacgtgcgctccgtctccatccggggctcccgcacggggtggcagcccatgtcccggaactggggccagaactggcagagcaactcgtacctggacaggcaggcgctctcgttccaggtcaccgccagcgacggccgcaccgtcaccagcaacggcgccgtccccgctggctggcagttcagccagaccttcgagggcggccagttctgaggatgaacagctagcgcgcgcgcggctagctattggataattaattacggtactgtcgatttggtttttttgccttgttttttttttgcgcgacgacgacgaagaggaggatgaagacgaagatgaagacgaggcctctcttcgggtatattgaaggaaggagaaggcttttgcgcgcgctatgctgaggctgctaatctagcacccgcctagacgtttcccttttctctggtggattacggactggatcggaccaaagatcgatccagctcctagtactaataatatagttgtacttgagaaaatgaataattgc

SEQ ID NO: 31593 - protein, 250 aa, Zea mays subsp. mays
  peptide (1)..(250): Ceres Seq. ID no. 12374732
MAIAGALLLLLGLLAREAAAGGVAERARHVLRRRGRVRHNGRRLRVRQPVQHGVRHEHGGAEHGAVQRRRGVRVLLRAAVRQRRAVVPAGHHHRHGHQLLPAQLRPPQRRRRLVQPAAPALRHGRAGLPPHRAVPRRHRARRVQESAVREEGRHPVHHQRALLLQPGAGDQRGGRRRRALRLHPGLPHGVAAHVPELGPELAEQLVPGQAGALVPGHRQRRPHRHQQRRRPRWLAVQPDLRGRPVLRMNS

SEQ ID NO: 31594 - protein, 206 aa, Zea mays subsp. mays
  peptide (1)..(206): Ceres Seq. ID no. 12374733
  misc_feature (115)..(192): Pfam Name: Pfam Description:  Pollen allergen
  misc_feature (1)..(206): NCBI GI NO: 14193751 NR Description: alpha-expansin [Zea mays]
  misc_feature (1)..(206): NCBI GI NO: 7489470 NR Description: expansin - rice
  misc_feature (1)..(206): NCBI GI NO: 16517029 NR Description: alpha-expansin [Oryza sativa]
  misc_feature (1)..(206): NCBI GI NO: 14193759 NR Description: alpha-expansin 5 [Zea mays]
  misc_feature (1)..(206): NCBI GI NO: 34907844 NR Description: alpha-expansin
  misc_feature (1)..(206): NCBI GI NO: 7489471 NR Description: expansin 2 - rice
  misc_feature (1)..(206): NCBI GI NO: 38710245 NR Description: expansin WEXPA1P [Triticum aestivum]
  misc_feature (1)..(206): NCBI GI NO: 40217880 NR Description: expansin-3 [Petunia x hybrida]
  misc_feature (1)..(206): NCBI GI NO: 38046728 NR Description: alpha-expansin 2
  misc_feature (1)..(206): NCBI GI NO: 29467503 NR Description: expansin [Pyrus communis]
MGGACGYGNLYSTGYGTSTAALSTALFNDGAACGSCYELRCDNDGRWCLPGTITVTATNFCPPNYGLPSDDGGWCNPPRPHFDMAEPAFLRIAQYRAGIVPVAFRRVPCVKKGGIRFTINGHSYFNLVLVTNVAGAGDVRSVSIRGSRTGWQPMSRNWGQNWQSNSYLDRQALSFQVTASDGRTVTSNGAVPAGWQFSQTFEGGQF

SEQ ID NO: 31595 - DNA, 1139 bp, Zea mays subsp. mays
  misc_feature (1)..(1139): Ceres Seq. ID no. 12355294
aacggctcgaccgcactgccagagcagcgtaaagccagggtagggtaacacaatgtcgagcgtcatgacggccgcgaaagaggacgatatggtcgtgcacgacttcgccccgctactccttgtatacaagagcgggcgcctggaacgcccactggccatgccggcggtctcgtccggccgcgacgtcgacacgggcgtcgtgtccaaggacgtggccctctcgcaggactccttatcggtgcgcctgtacctcccgcccgccgctaccacagcgcccgaaaggaggctcccagtggtcgtgtacttccacggcggtggcttcgtcgtcgggtcggccaggtccgccgtgtaccaccgctgcctgaacgacctcgccgccgcttgccccgctgtggccgtttccgtcgactaccgccttgcaccagagcacccggtgcccgccgcgtacgagggactccctggcggccctcaagtgggcgttggcgccgtcgtccgcgaccgactcgtggcttgcagtgcatggcgaccctgcgcgcgtgttcctcgccggcgacagcgcggggggcaacatctgccaccaccttgccatgcacccagacatccgggacgctggcctcaggggcgtcgtgctcatccacccctggttctggggcagggaccccatccctggggagccaccgctgaaccccgcctcaaagcagcagaagggcctatgggagttcgtgtgccccgaggcggtggacggcgcggacgaccccaggatgaacccgacagcgccgagcgccccagggttggacaacctggcgtgccagaaggtgatggtgtgcgtggccgagggggacatccttcgatggcgcgggaagctgtacgcagaggcggtggcgcgggcgaggggcaccgaaaaggacgtggagctattcgaatccgaaggggtcgggcatgtgttctacctgctggagcccgtgcaggagaaggccaaggagctattggacaagatcgcgacgtttgtcaggacggaatgaggagggatgcattggtggtggtggtccggtggacactgtcacactggacatcatgtatcgttaacgtactactactacatactccatccgttctttttatttatcgttgcttagtcc

SEQ ID NO: 31596 - protein, 362 aa, Zea mays subsp. mays
  peptide (1)..(362): Ceres Seq. ID no. 12355295
  misc_feature (11)..(133): NCBI GI NO: 15228426 NR Description: putative protein; protein id: At3g48700.1
  misc_feature (11)..(133): NCBI GI NO: 18086341 NR Description: AT3g48690/T8P19_200 [Arabidopsis thaliana]
  misc_feature (11)..(133): NCBI GI NO: 15228425 NR Description: putative protein; protein id: At3g48690
  misc_feature (11)..(133): NCBI GI NO: 15227669 NR Description: putative esterase; protein id: At2g03550.1
  misc_feature (14)..(133): NCBI GI NO: 28393060 NR Description: putative esterase [Arabidopsis thaliana]
  misc_feature (17)..(133): NCBI GI NO: 18401743 NR Description: expressed protein; protein id: At1g47480
  misc_feature (17)..(133): NCBI GI NO: 21536771 NR Description: unknown [Arabidopsis thaliana]
  misc_feature (14)..(132): NCBI GI NO: 34393323 NR Description: putative cell death associated protein
  misc_feature (11)..(133): NCBI GI NO: 34393904 NR Description: putative cell death associated protein
  misc_feature (14)..(133): NCBI GI NO: 21537287 NR Description: putative esterase [Arabidopsis thaliana]
MSSVMTAAKEDDMVVHDFAPLLLVYKSGRLERPLAMPAVSSGRDVDTGVVSKDVALSQDSLSVRLYLPPAATTAPERRLPVVVYFHGGGFVVGSARSAVYHRCLNDLAAACPAVAVSVDYRLAPEHPVPAAYEGLPGGPQVGVGAVVRDRLVACSAWRPCARVPRRRQRGGQHLPPPCHAPRHPGRWPQGRRAHPPLVLGQGPHPWGATAEPRLKAAEGPMGVRVPRGGGRRGRPQDEPDSAERPRVGQPGVPEGDGVRGRGGHPSMAREAVRRGGGAGEGHRKGRGAIRIRRGRACVLPAGARAGEGQGAIGQDRDVCQDGMRRDALVVVVRWTLSHWTSCIVNVLLLHTPSVLFIYRCLV

SEQ ID NO: 31597 - protein, 358 aa, Zea mays subsp. mays
  peptide (1)..(358): Ceres Seq. ID no. 12355296
  misc_feature (7)..(129): NCBI GI NO: 15228426 NR Description: putative protein; protein id: At3g48700.1
  misc_feature (7)..(129): NCBI GI NO: 18086341 NR Description: AT3g48690/T8P19_200 [Arabidopsis thaliana]
  misc_feature (7)..(129): NCBI GI NO: 15228425 NR Description: putative protein; protein id: At3g48690
  misc_feature (7)..(129): NCBI GI NO: 15227669 NR Description: putative esterase; protein id: At2g03550.1
  misc_feature (10)..(129): NCBI GI NO: 28393060 NR Description: putative esterase [Arabidopsis thaliana]
  misc_feature (13)..(129): NCBI GI NO: 18401743 NR Description: expressed protein; protein id: At1g47480
  misc_feature (13)..(129): NCBI GI NO: 21536771 NR Description: unknown [Arabidopsis thaliana]
  misc_feature (10)..(128): NCBI GI NO: 34393323 NR Description: putative cell death associated protein
  misc_feature (7)..(129): NCBI GI NO: 34393904 NR Description: putative cell death associated protein
  misc_feature (10)..(129): NCBI GI NO: 21537287 NR Description: putative esterase [Arabidopsis thaliana]
MTAAKEDDMVVHDFAPLLLVYKSGRLERPLAMPAVSSGRDVDTGVVSKDVALSQDSLSVRLYLPPAATTAPERRLPVVVYFHGGGFVVGSARSAVYHRCLNDLAAACPAVAVSVDYRLAPEHPVPAAYEGLPGGPQVGVGAVVRDRLVACSAWRPCARVPRRRQRGGQHLPPPCHAPRHPGRWPQGRRAHPPLVLGQGPHPWGATAEPRLKAAEGPMGVRVPRGGGRRGRPQDEPDSAERPRVGQPGVPEGDGVRGRGGHPSMAREAVRRGGGAGEGHRKGRGAIRIRRGRACVLPAGARAGEGQGAIGQDRDVCQDGMRRDALVVVVRWTLSHWTSCIVNVLLLHTPSVLFIYRCLV

SEQ ID NO: 31598 - protein, 350 aa, Zea mays subsp. mays
  peptide (1)..(350): Ceres Seq. ID no. 12355297
  misc_feature (1)..(121): NCBI GI NO: 15228426 NR Description: putative protein; protein id: At3g48700.1
  misc_feature (1)..(121): NCBI GI NO: 18086341 NR Description: AT3g48690/T8P19_200 [Arabidopsis thaliana]
  misc_feature (1)..(121): NCBI GI NO: 15228425 NR Description: putative protein; protein id: At3g48690
  misc_feature (1)..(121): NCBI GI NO: 15227669 NR Description: putative esterase; protein id: At2g03550.1
  misc_feature (2)..(121): NCBI GI NO: 28393060 NR Description: putative esterase [Arabidopsis thaliana]
  misc_feature (5)..(121): NCBI GI NO: 18401743 NR Description: expressed protein; protein id: At1g47480
  misc_feature (5)..(121): NCBI GI NO: 21536771 NR Description: unknown [Arabidopsis thaliana]
  misc_feature (2)..(120): NCBI GI NO: 34393323 NR Description: putative cell death associated protein
  misc_feature (1)..(121): NCBI GI NO: 34393904 NR Description: putative cell death associated protein
  misc_feature (2)..(121): NCBI GI NO: 21537287 NR Description: putative esterase [Arabidopsis thaliana]
MVVHDFAPLLLVYKSGRLERPLAMPAVSSGRDVDTGVVSKDVALSQDSLSVRLYLPPAATTAPERRLPVVVYFHGGGFVVGSARSAVYHRCLNDLAAACPAVAVSVDYRLAPEHPVPAAYEGLPGGPQVGVGAVVRDRLVACSAWRPCARVPRRRQRGGQHLPPPCHAPRHPGRWPQGRRAHPPLVLGQGPHPWGATAEPRLKAAEGPMGVRVPRGGGRRGRPQDEPDSAERPRVGQPGVPEGDGVRGRGGHPSMAREAVRRGGGAGEGHRKGRGAIRIRRGRACVLPAGARAGEGQGAIGQDRDVCQDGMRRDALVVVVRWTLSHWTSCIVNVLLLHTPSVLFIYRCLV

SEQ ID NO: 31599 - DNA, 1330 bp, Zea mays subsp. mays
  misc_feature (1)..(1330): Ceres Seq. ID no. 12354315
attccgggtgctcaatccactagaaccgaacaggccctaaatagatccgtagccgtagcctggcgcgcacattgcagaaagatcgagcggaaggtcggcagcaggcgcatagatgcaggggtgagggcacgggcggcagcgcttgacgggcgacgagtaaaccctaacgctttgattgcgggcgtcgtcgtctgagccagtcccgagtcgatacgctgtcatgcctgtcaatcctcctccgccacctcctgggtcgtcgtctttggctccggcgggggccagctacttcccgctccctttccacctgcagcagcaccagccgccgccgccgcaggtgccgccgcctatggcggcgagcagctatcagcagtatcagcaacagctgcatcaggcccatcagctcttccagcgggacgcgcagaccataacccccgaagcgctgcagagcgtcaaggctgccctcgccaccagcgacgtcctcgaccccgtcgccgccgccaacgccaggctctccgatccctctaccagcaagaagcccatcccccgtcgcgctgccggacaatcctgggaggatcctaccctcactgaatggcccgaaaacgactaccggctgttctgtggagatctaggcaacgaagttaatgatgatgttctctccaaagcattttcacggtttccatcctttaacatggcaagggttgttagagataagaggactggcaaaactaaaggctatggatttgtgagcttttcaaaccctactgacctggctgcagcaataaaagagatgaatggaaagtatgttgggaaccgccctattaaattgcgtaagagtaactggaaggagaggacagatgttgaggctctggaaagacaaaagaatcatgtcaagaggaagcctaaaattcccaagaagactattcttcacaagtagagatacaaaggccctaccgagggtgaatgccagctcatgtgctgccttgggatgatgctaccttctggaatctctttactctctgcaatgctcggggtggaatcacgcaatgctcggggtggaatcacacgcaagggctgttgtttcatgtaaggtgtagtttggaaacttaaattcttttgggatacctgtcttttatcaggatgagtaacccagggatataatttaaataagacatttagttatttaggagatggtttctctctctggtttgacttccccttccaaactaggtctaaggccatcttcagcagatcgtgtaaatggacgtgtaaagtactgttttgcattgtatattgtaactagttgtgtgcccgtgcgttgcaacaggaacat

SEQ ID NO: 31600 - protein, 237 aa, Zea mays subsp. mays
  peptide (1)..(237): Ceres Seq. ID no. 12354316
  misc_feature (131)..(202): Pfam Name: a.k.a. RRM, RBD, or RNP domain Pfam Description: RNA recognition motif.
  misc_feature (1)..(237): NCBI GI NO: 15229308 NR Description: RRM-containing protein; protein id: At3g04500.1
  misc_feature (16)..(226): NCBI GI NO: 2098575 NR Description: F25451_2 [Homo sapiens]
  misc_feature (16)..(226): NCBI GI NO: 19526864 NR Description: RIKEN cDNA 3100004P22 [Mus musculus]
  misc_feature (16)..(226): NCBI GI NO: 21359951 NR Description: hypothetical protein MGC10433 [Homo sapiens]
  misc_feature (16)..(226): NCBI GI NO: 12804031 NR Description: Unknown (protein for MGC:10433) [Homo sapiens]
  misc_feature (16)..(226): NCBI GI NO: 21594922 NR Description: hypothetical protein MGC10433 [Homo sapiens]
  misc_feature (16)..(226): NCBI GI NO: 34855705 NR Description: similar to RIKEN cDNA 3100004P22
  misc_feature (1)..(224): NCBI GI NO: 39582665 NR Description: Hypothetical protein CBG21313
  misc_feature (1)..(220): NCBI GI NO: 21357051 NR Description: CG2931-PA [Drosophila melanogaster]
  misc_feature (1)..(224): NCBI GI NO: 17556216 NR Description: RNA recognition motif containing protein
MPVNPPPPPPGSSSLAPAGASYFPLPFHLQQHQPPPPQVPPPMAASSYQQYQQQLHQAHQLFQRDAQTITPEALQSVKAALATSDVLDPVAAANARLSDPSTSKKPIPRRAAGQSWEDPTLTEWPENDYRLFCGDLGNEVNDDVLSKAFSRFPSFNMARVVRDKRTGKTKGYGFVSFSNPTDLAAAIKEMNGKYVGNRPIKLRKSNWKERTDVEALERQKNHVKRKPKIPKKTILHK

SEQ ID NO: 31601 - protein, 195 aa, Zea mays subsp. mays
  peptide (1)..(195): Ceres Seq. ID no. 12354317
  misc_feature (89)..(160): Pfam Name: a.k.a. RRM, RBD, or RNP domain Pfam Description: RNA recognition motif.
  misc_feature (1)..(195): NCBI GI NO: 15229308 NR Description: RRM-containing protein; protein id: At3g04500.1
  misc_feature (1)..(184): NCBI GI NO: 2098575 NR Description: F25451_2 [Homo sapiens]
  misc_feature (1)..(184): NCBI GI NO: 21594922 NR Description: hypothetical protein MGC10433 [Homo sapiens]
  misc_feature (1)..(184): NCBI GI NO: 21359951 NR Description: hypothetical protein MGC10433 [Homo sapiens]
  misc_feature (1)..(184): NCBI GI NO: 19526864 NR Description: RIKEN cDNA 3100004P22 [Mus musculus]
  misc_feature (1)..(184): NCBI GI NO: 12804031 NR Description: Unknown (protein for MGC:10433) [Homo sapiens]
  misc_feature (1)..(184): NCBI GI NO: 34855705 NR Description: similar to RIKEN cDNA 3100004P22
  misc_feature (1)..(182): NCBI GI NO: 39582665 NR Description: Hypothetical protein CBG21313
  misc_feature (1)..(178): NCBI GI NO: 21357051 NR Description: CG2931-PA [Drosophila melanogaster]
  misc_feature (1)..(182): NCBI GI NO: 17556216 NR Description: RNA recognition motif containing protein
MAASSYQQYQQQLHQAHQLFQRDAQTITPEALQSVKAALATSDVLDPVAAANARLSDPSTSKKPIPRRAAGQSWEDPTLTEWPENDYRLFCGDLGNEVNDDVLSKAFSRFPSFNMARVVRDKRTGKTKGYGFVSFSNPTDLAAAIKEMNGKYVGNRPIKLRKSNWKERTDVEALERQKNHVKRKPKIPKKTILHK

SEQ ID NO: 31602 - DNA, 1031 bp, Zea mays subsp. mays
  misc_feature (1)..(1031): Ceres Seq. ID no. 12367726
gtcggacgaggtaaccatggccgcggggggcaccgccgacttcttctaccgcgagtcgcagcgtctgggctacgtcgccccgctctgcgtttaagctgatccagatgcagaagcagcacaagctcatcgcgccgggcgccgctgtactcgacctcggctgcgcccccggcgcgtggcttcaggtggcttgtcagaacctgggtcccctcgagaagggtggcatcgtcgtcggcgtcgatgttaagaaggtgaaagtgccctctgcgcactgtgactcacgggtcaggacggtctgtgcagatgtcatgacgctgatgaagcggcaggctcgggcaatgtcgccacaggaacgaggattctctgtgatactgtcagacatgtgccccccagtttcagggatcacgactaaagatggagctatatcttgtgagttgggcatgcacgctctctcgttggcagtagggaagataaagttaaaagattctaattacagtgataccctagagaagtatctgagctccactgagcctgagtctgacgaggatggcgttcttcgacgtggaggcaacctggtagtgaagtttcttgagaatgaggacatatcagggtttggcaaattctgcaaggtgaagttcaagaaagtatcgttgttgagacccaaggcgactcgacctagctcgagggagatctacatgatctgcgaaggtttgcggtagaaaggagggctcttcagaaggcaagcgaagactccaagaagctaggtcagttgagttgccctgaactgggcgctgttagttctagcctgctggtgcaggtgctggctgattggcaatgtgatacagctgtttgatgctgatagcctcccagagcaagttaccacaaagctttgtgtgattgaaccatgctagtagttcgtctagatgttacctgtaataattttgttgaactgtgatactagttcgtctaggagaaacaagcatttgacttgagccctttctgagaacctgaaacacccttgctttttatgttgc

SEQ ID NO: 31603 - protein, 203 aa, Zea mays subsp. mays
  peptide (1)..(203): Ceres Seq. ID no. 12367727
  misc_feature (1)..(203): Pfam Name: Pfam Description:  FtsJ-like methyltransferase
  misc_feature (1)..(201): NCBI GI NO: 34897416 NR Description: putative FtsJ cell division protein
  misc_feature (1)..(203): NCBI GI NO: 15240727 NR Description: FtsJ (dbj|BAA83750.1); protein id: At5g13830.1
  misc_feature (1)..(123): NCBI GI NO: 11499633 NR Description: cell division protein (ftsJ)
  misc_feature (149)..(203): NCBI GI NO: 11499633 NR Description: cell division protein (ftsJ)
  misc_feature (1)..(138): NCBI GI NO: 15669566 NR Description: cell division protein FtsJ
  misc_feature (1)..(118): NCBI GI NO: 23057977 NR Description: hypothetical protein
  misc_feature (149)..(203): NCBI GI NO: 23057977 NR Description: hypothetical protein
  misc_feature (1)..(122): NCBI GI NO: 23470949 NR Description: hypothetical protein
  misc_feature (149)..(203): NCBI GI NO: 23470949 NR Description: hypothetical protein
  misc_feature (1)..(122): NCBI GI NO: 15599946 NR Description: cell division protein FtsJ
MQKQHKLIAPGAAVLDLGCAPGAWLQVACQNLGPLEKGGIVVGVDVKKVKVPSAHCDSRVRTVCADVMTLMKRQARAMSPQERGFSVILSDMCPPVSGITTKDGAISCELGMHALSLAVGKIKLKDSNYSDTLEKYLSSTEPESDEDGVLRRGGNLVVKFLENEDISGFGKFCKVKFKKVSLLRPKATRPSSREIYMICEGLR

SEQ ID NO: 31604 - protein, 136 aa, Zea mays subsp. mays
  peptide (1)..(136): Ceres Seq. ID no. 12367728
  misc_feature (1)..(136): Pfam Name: Pfam Description:  FtsJ-like methyltransferase
  misc_feature (1)..(134): NCBI GI NO: 34897416 NR Description: putative FtsJ cell division protein
  misc_feature (1)..(136): NCBI GI NO: 15240727 NR Description: FtsJ (dbj|BAA83750.1); protein id: At5g13830.1
  misc_feature (1)..(56): NCBI GI NO: 11499633 NR Description: cell division protein (ftsJ)
  misc_feature (82)..(136): NCBI GI NO: 11499633 NR Description: cell division protein (ftsJ)
  misc_feature (1)..(71): NCBI GI NO: 15669566 NR Description: cell division protein FtsJ
  misc_feature (1)..(51): NCBI GI NO: 23057977 NR Description: hypothetical protein
  misc_feature (82)..(136): NCBI GI NO: 23057977 NR Description: hypothetical protein
  misc_feature (1)..(55): NCBI GI NO: 23470949 NR Description: hypothetical protein
  misc_feature (82)..(136): NCBI GI NO: 23470949 NR Description: hypothetical protein
  misc_feature (1)..(55): NCBI GI NO: 15599946 NR Description: cell division protein FtsJ
MTLMKRQARAMSPQERGFSVILSDMCPPVSGITTKDGAISCELGMHALSLAVGKIKLKDSNYSDTLEKYLSSTEPESDEDGVLRRGGNLVVKFLENEDISGFGKFCKVKFKKVSLLRPKATRPSSREIYMICEGLR

SEQ ID NO: 31605 - protein, 133 aa, Zea mays subsp. mays
  peptide (1)..(133): Ceres Seq. ID no. 12367729
  misc_feature (1)..(133): Pfam Name: Pfam Description:  FtsJ-like methyltransferase
  misc_feature (1)..(131): NCBI GI NO: 34897416 NR Description: putative FtsJ cell division protein
  misc_feature (1)..(133): NCBI GI NO: 15240727 NR Description: FtsJ (dbj|BAA83750.1); protein id: At5g13830.1
  misc_feature (1)..(53): NCBI GI NO: 11499633 NR Description: cell division protein (ftsJ)
  misc_feature (79)..(133): NCBI GI NO: 11499633 NR Description: cell division protein (ftsJ)
  misc_feature (1)..(68): NCBI GI NO: 15669566 NR Description: cell division protein FtsJ
  misc_feature (1)..(48): NCBI GI NO: 23057977 NR Description: hypothetical protein
  misc_feature (79)..(133): NCBI GI NO: 23057977 NR Description: hypothetical protein
  misc_feature (1)..(52): NCBI GI NO: 23470949 NR Description: hypothetical protein
  misc_feature (79)..(133): NCBI GI NO: 23470949 NR Description: hypothetical protein
  misc_feature (1)..(52): NCBI GI NO: 15599946 NR Description: cell division protein FtsJ
MKRQARAMSPQERGFSVILSDMCPPVSGITTKDGAISCELGMHALSLAVGKIKLKDSNYSDTLEKYLSSTEPESDEDGVLRRGGNLVVKFLENEDISGFGKFCKVKFKKVSLLRPKATRPSSREIYMICEGLR

SEQ ID NO: 31606 - DNA, 1112 bp, Zea mays subsp. mays
  misc_feature (1)..(1112): Ceres Seq. ID no. 13493585
cttccctagaacatcctaatcgaaaaaccagccactagctaggacgtcgctgcttgcttccacgcctccttacggtttatccaagcacagcgagagacctttgcgcgtgtgcgctctcgttcgagctagcagcggcggcatgctgacgaggcggcacggagggttccggctcggccggaagctgctcagcgtctggcgctgggcgctctgccgccgccggcgccgccgcgttcgcggccgcgggtacctccgcctgcagccgtgccaacgaggaggaggcaccaccaaatccccgtccccgtcccccatggcggcgcatgcagtggtaagcatcaagatgatgcagcagcagcagcagaagcacgacgactctgctggctcgccgcggatgctcacgtgggggcggtcgctggcgcggcgggtgaggctcctgcgccggcgcgggggaggaggagggaaggaccggctgctggaggacgccgccgcggatgccaccacgcccaaggggcaggtggccgtgtacgtggtcggcgggggcgagtcgatgcgctacgtggtccccgtggtgtacttcaaccacccgctcttcggggagctgctgcgcgaggccgaggaggagttcggcttccagcaccccggcgggatcaccatcccgtgcgcggcctcgcggttcgagcgcgccgccgccgtggccgccgcaggcggcggcgccgccgccgggaagaaggtgccttctgtctggtggtagcagcacgtggccacacggtggccggtgtacatacatacacacgtgcatgcccatcaggatcaggccgcagccggccctcaggaggatcccgatcgattcccatgggaaatggggactgacgatccttctatatattttttctctccttctcgtttgacttttcctttttgccctcttgcgccgtttgcttgtgtggattgagcatgtgcatgggatgcgaggaggatggatagttgtagtttgtttgagagatgaacaaggcttttttttaatttagggtcagcataaacatgttcccattccccccccaacttgcaaagtccatcatcatatatatccatttattagagagcatctaatatgc

SEQ ID NO: 31607 - protein, 202 aa, Zea mays subsp. mays
  peptide (1)..(202): Ceres Seq. ID no. 13493586
  misc_feature (85)..(180): Pfam Name: Pfam Description:  Auxin responsive protein
  misc_feature (84)..(188): NCBI GI NO: 38567865 NR Description: OSJNBa0091D06.3
  misc_feature (1)..(53): NCBI GI NO: 38567865 NR Description: OSJNBa0091D06.3
  misc_feature (83)..(190): NCBI GI NO: 15232400 NR Description: auxin-induced
  misc_feature (83)..(191): NCBI GI NO: 15225432 NR Description: auxin-induced
  misc_feature (65)..(187): NCBI GI NO: 15235723 NR Description: auxin-induced
  misc_feature (121)..(178): NCBI GI NO: 18411465 NR Description: auxin-induced
  misc_feature (89)..(187): NCBI GI NO: 15234550 NR Description: auxin-induced
  misc_feature (111)..(178): NCBI GI NO: 15226485 NR Description: auxin-induced
  misc_feature (105)..(178): NCBI GI NO: 15238736 NR Description: auxin-induced
  misc_feature (118)..(183): NCBI GI NO: 15226484 NR Description: auxin-induced
MLTRRHGGFRLGRKLLSVWRWALCRRRRRRVRGRGYLRLQPCQRGGGTTKSPSPSPMAAHAVVSIKMMQQQQQKHDDSAGSPRMLTWGRSLARRVRLLRRRGGGGGKDRLLEDAAADATTPKGQVAVYVVGGGESMRYVVPVVYFNHPLFGELLREAEEEFGFQHPGGITIPCAASRFERAAAVAAAGGGAAAGKKVPSVWW

SEQ ID NO: 31608 - protein, 146 aa, Zea mays subsp. mays
  peptide (1)..(146): Ceres Seq. ID no. 13493587
  misc_feature (29)..(124): Pfam Name: Pfam Description:  Auxin responsive protein
  misc_feature (28)..(132): NCBI GI NO: 38567865 NR Description: OSJNBa0091D06.3
  misc_feature (27)..(134): NCBI GI NO: 15232400 NR Description: auxin-induced
  misc_feature (27)..(135): NCBI GI NO: 15225432 NR Description: auxin-induced
  misc_feature (9)..(131): NCBI GI NO: 15235723 NR Description: auxin-induced
  misc_feature (65)..(122): NCBI GI NO: 18411465 NR Description: auxin-induced
  misc_feature (33)..(131): NCBI GI NO: 15234550 NR Description: auxin-induced
  misc_feature (55)..(122): NCBI GI NO: 15226485 NR Description: auxin-induced
  misc_feature (49)..(122): NCBI GI NO: 15238736 NR Description: auxin-induced
  misc_feature (62)..(127): NCBI GI NO: 15226484 NR Description: auxin-induced
  misc_feature (65)..(128): NCBI GI NO: 15236188 NR Description: auxin-induced
MAAHAVVSIKMMQQQQQKHDDSAGSPRMLTWGRSLARRVRLLRRRGGGGGKDRLLEDAAADATTPKGQVAVYVVGGGESMRYVVPVVYFNHPLFGELLREAEEEFGFQHPGGITIPCAASRFERAAAVAAAGGGAAAGKKVPSVWW

SEQ ID NO: 31609 - protein, 138 aa, Zea mays subsp. mays
  peptide (1)..(138): Ceres Seq. ID no. 13493588
  misc_feature (1)..(65): Pfam Name: Pfam Description:  Cupin
  misc_feature (1)..(79): NCBI GI NO: 13376335 NR Description: hypothetical protein FLJ14280 [Homo sapiens]
MPPRPRGRWPCTWSAGASRCATWSPWCTSTTRSSGSCCARPRRSSASSTPAGSPSRARPRGSSAPPPWPPQAAAPPPGRRCLLSGGSSTWPHGGRCTYIHTCMPIRIRPQPALRRIPIDSHGKWGLTILLYIFSLLLV

SEQ ID NO: 31610 - DNA, 1032 bp, Zea mays subsp. mays
  misc_feature (1)..(1032): Ceres Seq. ID no. 12415130
  misc_feature (646)..(646): n is a, c, t, g, unknown, or other
  misc_feature (622)..(622): n is a, c, t, g, unknown, or other
  misc_feature (614)..(614): n is a, c, t, g, unknown, or other
agctagctcgctgtggcaggctggcagcatgttccgatctgccgtggcagcgtctcgtcagggccagcgggaagagtacggccgacccagccgccgccgcgtccgctttcttcctcagtcgcttctccgcggcgggccgggccgccatcgccacagaggctggctggaaaggtagcgctgatcatcggcagggcaactggggcgccacgtcgccgcggagctgagcctgctgggggggcccggcccggcggcggccgtccactacacccgctgcgacgtgaccgacgaggcgcaggtcgcggcggcggtggacctggccgtggagctgcacggccgcctcgacgtgatgctcagcaacgccggcatcagcggcagcctggcgccggcccccgtggcggcgctggacctggccgacttcgaccgcgtcatggccgtgaacgcccgcgccgcggtggcgggcgtcaagcacgcggcgcgcgtcatggtgccccgccgcgccggcagcatcgtgtgcacggccagcgtggccggcgtgctgggcggcgtcgcgctgccgccctacagcgtgtccaaggccgccgtgctgggcctggtgcgcgccgtggccgggcagntcgcgcgntcgggcgtccgcgtcaacgccatntcgcccacctacatccccacgccgctcgtcatgggcgccatggccgagtggttccccggcgccaccgccgaggagcgcaggcggatcgtggagaaggacatgaacgagatggacggccccgtgctccaggtggaggacgtggccagcgccgccctgtacctggcgtccgatgagtccaagtgtgtcaatggccacaacctcgtcgtcgacggcggcttcacggtggggaaggcgcccaatatgccgccgcctggaaactactgagcagctaccacttgccaatctaaaggcacggtggatgactttctattgagcatttctttttcttttgcgattggaaaacttaggtaatatagttaaaagaactcgatcacgcgttttctttc

SEQ ID NO: 31611 - protein, 187 aa, Zea mays subsp. mays
  peptide (1)..(187): Ceres Seq. ID no. 12415131
  misc_feature (1)..(187): NCBI GI NO: 33354194 NR Description: putative sex determination protein tasselseed 2
  misc_feature (1)..(187): NCBI GI NO: 34899190 NR Description: alcohol dehydrogenase-like protein
  misc_feature (1)..(184): NCBI GI NO: 34899188 NR Description: similar to alcohol dehydrogenase
  misc_feature (1)..(184): NCBI GI NO: 33146507 NR Description: putative short-chain alcohol dehydrogenase
  misc_feature (1)..(186): NCBI GI NO: 34899230 NR Description: alcohol dehydrogenase-like protein
  misc_feature (1)..(186): NCBI GI NO: 34899228 NR Description: alcohol dehydrogenase-like protein
  misc_feature (1)..(180): NCBI GI NO: 34899216 NR Description: alcohol dehydrogenase-like protein
  misc_feature (1)..(184): NCBI GI NO: 34899220 NR Description: alcohol dehydrogenase-like protein
  misc_feature (1)..(181): NCBI GI NO: 34899218 NR Description: alcohol dehydrogenase-like protein~contains ESTAU165528
  misc_feature (1)..(182): NCBI GI NO: 33354197 NR Description: putative sex determination protein tasselseed 2
  misc_feature (90)..(90): Xaa is any aa, unknown or other
  misc_feature (92)..(92): Xaa is any aa, unknown or other
  misc_feature (100)..(100): Xaa is any aa, unknown or other
MLSNAGISGSLAPAPVAALDLADFDRVMAVNARAAVAGVKHAARVMVPRRAGSIVCTASVAGVLGGVALPPYSVSKAAVLGLVRAVAGQXAXSGVRVNAXSPTYIPTPLVMGAMAEWFPGATAEERRRIVEKDMNEMDGPVLQVEDVASAALYLASDESKCVNGHNLVVDGGFTVGKAPNMPPPGNY

SEQ ID NO: 31612 - protein, 160 aa, Zea mays subsp. mays
  peptide (1)..(160): Ceres Seq. ID no. 12415132
  misc_feature (1)..(160): NCBI GI NO: 33354194 NR Description: putative sex determination protein tasselseed 2
  misc_feature (1)..(160): NCBI GI NO: 34899190 NR Description: alcohol dehydrogenase-like protein
  misc_feature (1)..(157): NCBI GI NO: 34899188 NR Description: similar to alcohol dehydrogenase
  misc_feature (1)..(157): NCBI GI NO: 33146507 NR Description: putative short-chain alcohol dehydrogenase
  misc_feature (1)..(159): NCBI GI NO: 34899230 NR Description: alcohol dehydrogenase-like protein
  misc_feature (1)..(159): NCBI GI NO: 34899228 NR Description: alcohol dehydrogenase-like protein
  misc_feature (1)..(153): NCBI GI NO: 34899216 NR Description: alcohol dehydrogenase-like protein
  misc_feature (1)..(157): NCBI GI NO: 34899220 NR Description: alcohol dehydrogenase-like protein
  misc_feature (1)..(154): NCBI GI NO: 34899218 NR Description: alcohol dehydrogenase-like protein~contains ESTAU165528
  misc_feature (1)..(155): NCBI GI NO: 33354197 NR Description: putative sex determination protein tasselseed 2
  misc_feature (63)..(63): Xaa is any aa, unknown or other
  misc_feature (65)..(65): Xaa is any aa, unknown or other
  misc_feature (73)..(73): Xaa is any aa, unknown or other
MAVNARAAVAGVKHAARVMVPRRAGSIVCTASVAGVLGGVALPPYSVSKAAVLGLVRAVAGQXAXSGVRVNAXSPTYIPTPLVMGAMAEWFPGATAEERRRIVEKDMNEMDGPVLQVEDVASAALYLASDESKCVNGHNLVVDGGFTVGKAPNMPPPGNY

SEQ ID NO: 31613 - protein, 142 aa, Zea mays subsp. mays
  peptide (1)..(142): Ceres Seq. ID no. 12415133
  misc_feature (1)..(142): NCBI GI NO: 33354194 NR Description: putative sex determination protein tasselseed 2
  misc_feature (1)..(142): NCBI GI NO: 34899190 NR Description: alcohol dehydrogenase-like protein
  misc_feature (1)..(139): NCBI GI NO: 34899188 NR Description: similar to alcohol dehydrogenase
  misc_feature (1)..(139): NCBI GI NO: 33146507 NR Description: putative short-chain alcohol dehydrogenase
  misc_feature (1)..(141): NCBI GI NO: 34899230 NR Description: alcohol dehydrogenase-like protein
  misc_feature (1)..(141): NCBI GI NO: 34899228 NR Description: alcohol dehydrogenase-like protein
  misc_feature (1)..(135): NCBI GI NO: 34899216 NR Description: alcohol dehydrogenase-like protein
  misc_feature (1)..(139): NCBI GI NO: 34899220 NR Description: alcohol dehydrogenase-like protein
  misc_feature (1)..(136): NCBI GI NO: 34899218 NR Description: alcohol dehydrogenase-like protein~contains ESTAU165528
  misc_feature (1)..(137): NCBI GI NO: 33354197 NR Description: putative sex determination protein tasselseed 2
  misc_feature (45)..(45): Xaa is any aa, unknown or other
  misc_feature (47)..(47): Xaa is any aa, unknown or other
  misc_feature (55)..(55): Xaa is any aa, unknown or other
MVPRRAGSIVCTASVAGVLGGVALPPYSVSKAAVLGLVRAVAGQXAXSGVRVNAXSPTYIPTPLVMGAMAEWFPGATAEERRRIVEKDMNEMDGPVLQVEDVASAALYLASDESKCVNGHNLVVDGGFTVGKAPNMPPPGNY

SEQ ID NO: 31614 - DNA, 1180 bp, Zea mays subsp. mays
  misc_feature (1)..(1180): Ceres Seq. ID no. 12357243
attcctctccgccccctcccaccccacccgcttctaggacgcagcagcgcacccccgatcctcgcctgtcgcctccatctccattcgcaggcctgagaccctcgcctgcaccgcgctgccgccagccatgggaatggggcctctgcgagaacgccgcgtcggccgccgctgagtccgcggccttgccggaggccggcgccgcctcggcagcgggctcgtacgcggtgctgcagtgcggcgaggactcggagtacgtgcggcagaagtacggcggctacttcgccgtcttccgcgcgctgctggaggaggacggcgagagctggcgcgtgtaccgcgccgtcggcggggagctccccaccgacgccgaggccggccggcttcgacgggttcgtcatctccgggagctgctccgacgcgcacggcgacgagccctggatcctggacctcgtcggcctcatccgccgcctccacgccgccggcaagcgcatcctcggcgtctgcttcggccaccagatcctgtgccgggcgctgggcgggcgcaccgggcggtcgaccaagggctgggacatcggggtgagctgcatccacccgacggcggcggcggcgcggctgttcgcgccgctgaagctgccggtgcacatgccggtgatcgagttccaccacgacgaggtgtgggagctgcccgccggcgccgaggtgctggcgcggtcggaccagacccgcgtggagatgttccgcctgggggaccgcgccatgggcgtccagggccacccggagtacagcaaggacatcctcatgagcatcgccgaccgcctcctccggcataaccacatcctggactgccaggtggacgtggccaaggcgagcttcgacgtgcggcagccggacaaggagctgtggaagaaggtgtgcaggggcttcctcaaggggaggctgcaggcgctatagcaattccactaaccgctgcagaggaggaaattgggatgtcttaggttaatttttaattcacccttgttttgtgcttcagagctcaagagttgtacataaactactattgtccgaagcattaataaactcaacaacatcgttctcgtactgcctgctgtttctgtgcctcgtcgacagtctcagcatctgtcattggcgtatctggtgaacgatgtcgttggaactgattttc

SEQ ID NO: 31615 - protein, 274 aa, Zea mays subsp. mays
  peptide (1)..(274): Ceres Seq. ID no. 12357244
  misc_feature (46)..(123): NCBI GI NO: 13174241 NR Description: putative glutamine synthetase [Oryza sativa]
  misc_feature (73)..(122): NCBI GI NO: 15224079 NR Description: unknown protein; protein id: At2g23970.1
  misc_feature (81)..(120): NCBI GI NO: 17381294 NR Description: AT4g30550/F17I23_110 [Arabidopsis thaliana]
  misc_feature (81)..(120): NCBI GI NO: 15234767 NR Description: putative protein; protein id: At4g30550
  misc_feature (81)..(120): NCBI GI NO: 21555885 NR Description: unknown [Arabidopsis thaliana]
  misc_feature (73)..(122): NCBI GI NO: 14009290 NR Description: defense-related protein [Brassica carinata]
  misc_feature (73)..(122): NCBI GI NO: 15234763 NR Description: putative protein; protein id: At4g30530
  misc_feature (73)..(122): NCBI GI NO: 15234765 NR Description: putative protein; protein id: At4g30540.1
  misc_feature (73)..(122): NCBI GI NO: 21593315 NR Description: defense-related protein [Arabidopsis thaliana]
  misc_feature (73)..(122): NCBI GI NO: 15224078 NR Description: unknown protein; protein id: At2g23960.1
SSPPPPTPPASRTQQRTPDPRLSPPSPFAGLRPSPAPRCRQPWEWGLCENAASAAAESAALPEAGAASAAGSYAVLQCGEDSEYVRQKYGGYFAVFRALLEEDGESWRVYRAVGGELPTDAEAGRLRRVRHLRELLRRARRRALDPGPRRPHPPPPRRRQAHPRRLLRPPDPVPGAGRAHRAVDQGLGHRGELHPPDGGGGAAVRAAEAAGAHAGDRVPPRRGVGAARRRRGAGAVGPDPRGDVPPGGPRHGRPGPPGVQQGHPHEHRRPPPPA

SEQ ID NO: 31616 - DNA, 901 bp, Zea mays subsp. mays
  misc_feature (1)..(901): Ceres Seq. ID no. 12349401
aataaataaggaaaattctgaaggagtaatattgcttggtcatagtactggatgccaggatattgtgcattatatgcgcacaaactttgcctgttcgaaagcggtttctggggtcatcttgcaggccccagtaagtgacagggagtatagagcaactcttccggaaacagctgaaatgatagacctggcagccaaactgattagcgagggtcgtggaatggatttgatgcctagaaaagcaaactcagatgctcctattactgcctacaggtaccactccctttgttcatatatgggtgatgatgacatgttcagttcagatctaagtgaagatcagctgaggcagagacttggtcatatgtcaatcacacagtgccaggttattttttcaatgggggatgaatatgtacctgaatatgttgataagagggctctactagacaggctatgtagggcgctgggaggtgcagagaaagtcgagatagaatggggaaaccatgctctgtccaacagagtgcaagaagcagttgtggccattgtagattttgtcaagagggaggggcccaaaggctgggacgacccatggagctagatacagcagttataatctcatttgtaactagtttgtgcttttcctcttctctcttttctccaattgtaacatctttcttttgcattattattggtccatttttcaatagtgatatgctatttttcttataaccccctcccccaaacatgcatcgcgttctcattctagtatggtgtatcacatatgtaaattgcgttaggaatcttgattatcaggctgtctttggtggatcatgtaaaattggagttgtgggaacaaggagctgttggagacggcatcagatcaacttcgtgcaaacttcagttttgg

SEQ ID NO: 31617 - protein, 196 aa, Zea mays subsp. mays
  peptide (1)..(196): Ceres Seq. ID no. 12349402
  misc_feature (1)..(196): NCBI GI NO: 34393295 NR Description: unknown protein
  misc_feature (1)..(196): NCBI GI NO: 15239639 NR Description: putative protein; protein id: At5g19050
  misc_feature (98)..(196): NCBI GI NO: 34900044 NR Description: hypothetical protein~predicted by GeneMark
  misc_feature (1)..(103): NCBI GI NO: 34900046 NR Description: contains EST C72879
  misc_feature (9)..(151): NCBI GI NO: 32403674 NR Description: hypothetical protein [Neurospora crassa]
INKENSEGVILLGHSTGCQDIVHYMRTNFACSKAVSGVILQAPVSDREYRATLPETAEMIDLAAKLISEGRGMDLMPRKANSDAPITAYRYHSLCSYMGDDDMFSSDLSEDQLRQRLGHMSITQCQVIFSMGDEYVPEYVDKRALLDRLCRALGGAEKVEIEWGNHALSNRVQEAVVAIVDFVKREGPKGWDDPWS

SEQ ID NO: 31618 - protein, 172 aa, Zea mays subsp. mays
  peptide (1)..(172): Ceres Seq. ID no. 12349403
  misc_feature (1)..(172): NCBI GI NO: 34393295 NR Description: unknown protein
  misc_feature (1)..(172): NCBI GI NO: 15239639 NR Description: putative protein; protein id: At5g19050
  misc_feature (74)..(172): NCBI GI NO: 34900044 NR Description: hypothetical protein~predicted by GeneMark
  misc_feature (1)..(79): NCBI GI NO: 34900046 NR Description: contains EST C72879
  misc_feature (1)..(127): NCBI GI NO: 32403674 NR Description: hypothetical protein [Neurospora crassa]
MRTNFACSKAVSGVILQAPVSDREYRATLPETAEMIDLAAKLISEGRGMDLMPRKANSDAPITAYRYHSLCSYMGDDDMFSSDLSEDQLRQRLGHMSITQCQVIFSMGDEYVPEYVDKRALLDRLCRALGGAEKVEIEWGNHALSNRVQEAVVAIVDFVKREGPKGWDDPWS

SEQ ID NO: 31619 - protein, 138 aa, Zea mays subsp. mays
  peptide (1)..(138): Ceres Seq. ID no. 12349404
  misc_feature (1)..(138): NCBI GI NO: 34393295 NR Description: unknown protein
  misc_feature (1)..(138): NCBI GI NO: 15239639 NR Description: putative protein; protein id: At5g19050
  misc_feature (40)..(138): NCBI GI NO: 34900044 NR Description: hypothetical protein~predicted by GeneMark
  misc_feature (1)..(45): NCBI GI NO: 34900046 NR Description: contains EST C72879
  misc_feature (1)..(93): NCBI GI NO: 32403674 NR Description: hypothetical protein [Neurospora crassa]
MIDLAAKLISEGRGMDLMPRKANSDAPITAYRYHSLCSYMGDDDMFSSDLSEDQLRQRLGHMSITQCQVIFSMGDEYVPEYVDKRALLDRLCRALGGAEKVEIEWGNHALSNRVQEAVVAIVDFVKREGPKGWDDPWS

SEQ ID NO: 31620 - DNA, 835 bp, Zea mays subsp. mays
  misc_feature (1)..(835): Ceres Seq. ID no. 12415818
gctctcgggctctcggcttcgaatcccgacaacctccctccccgaagctgcttagccgccggctgggcctcagacctgcgtcaagcttccggcggcagcccttcgagcatcacaatggcgtccggcggagcggccatctcggcggggcctacaccaccgtcggcgacgacggcgtcgtcggttgagtggcaccagcggccgccgaacccgaagaatcccgtggtgttcttcgacgtgaccatcgggtccatcgccgccggccgcatcaagatggagctcttcgccgacatcgcccccaagaccgcggagaacttccggcagttctgcactggggagcatagaaaaaatgctttgccacaaggttataagggctgccaattccatagagtgatcaaagatttcatgattcagggtggtgacttcttgaagaatgatggtactggatgcacatcaatctacggtaccaaatttgatgatgaaaattttatagcaaagcatacagggcctggactgctctcgatggcaaacagtggaattaactctaatggatctcagttctttataacatgtgcaaagtgtgactggcttgacaacaaacatgtggtatttgggagagtgcttggagacggtttgctcgtcgtgaggaagattgaaaatgttgcaactggagcgaataacaaaccaaagcttgcctgcgttataagtgagtgtggtgaaatgtagcttgatccctttgtgtggctaatcgtggactctttacgctgctgatgtagaccctgtttggttgatggaagtacttaagcagtggaaacattgatggaaatgtattgtgtct

SEQ ID NO: 31621 - protein, 240 aa, Zea mays subsp. mays
  peptide (1)..(240): Ceres Seq. ID no. 12415819
  misc_feature (74)..(240): Pfam Name: Pfam Description:  Cyclophilin type peptidyl-prolyl cis-trans isomerase
  misc_feature (39)..(240): NCBI GI NO: 15224944 NR Description: putative peptidyl-prolyl cis-trans isomerase
  misc_feature (54)..(240): NCBI GI NO: 4454307 NR Description: cyclophilin [Pseudotsuga menziesii]
  misc_feature (66)..(240): NCBI GI NO: 37595420 NR Description: peptidyl prolyl isomerase H [Danio rerio]
  misc_feature (65)..(240): NCBI GI NO: 11602709 NR Description: putative U-snRNP-associated cyclophilin
  misc_feature (69)..(240): NCBI GI NO: 5454154 NR Description: peptidyl prolyl isomerase H; cyclophilin H
  misc_feature (69)..(240): NCBI GI NO: 39849992 NR Description: Unknown (protein for MGC:76244)
  misc_feature (69)..(240): NCBI GI NO: 39597495 NR Description: Hypothetical protein CBG03161
  misc_feature (69)..(240): NCBI GI NO: 17532643 NR Description: Peptidyl-prolyl cis-trans isomerase cyclophilinfamily member 11
  misc_feature (72)..(240): NCBI GI NO: 24586038 NR Description: CG17266-PA [Drosophila melanogaster]
  misc_feature (66)..(220): NCBI GI NO: 28278913 NR Description: Similar to RIKEN cDNA 1100001J08 gene
ALGLSASNPDNLPPRSCLAAGWASDLRQASGGSPSSITMASGGAAISAGPTPPSATTASSVEWHQRPPNPKNPVVFFDVTIGSIAAGRIKMELFADIAPKTAENFRQFCTGEHRKNALPQGYKGCQFHRVIKDFMIQGGDFLKNDGTGCTSIYGTKFDDENFIAKHTGPGLLSMANSGINSNGSQFFITCAKCDWLDNKHVVFGRVLGDGLLVVRKIENVATGANNKPKLACVISECGEM

SEQ ID NO: 31622 - protein, 202 aa, Zea mays subsp. mays
  peptide (1)..(202): Ceres Seq. ID no. 12415820
  misc_feature (36)..(202): Pfam Name: Pfam Description:  Cyclophilin type peptidyl-prolyl cis-trans isomerase
  misc_feature (1)..(202): NCBI GI NO: 15224944 NR Description: putative peptidyl-prolyl cis-trans isomerase
  misc_feature (16)..(202): NCBI GI NO: 4454307 NR Description: cyclophilin [Pseudotsuga menziesii]
  misc_feature (28)..(202): NCBI GI NO: 37595420 NR Description: peptidyl prolyl isomerase H [Danio rerio]
  misc_feature (27)..(202): NCBI GI NO: 11602709 NR Description: putative U-snRNP-associated cyclophilin
  misc_feature (31)..(202): NCBI GI NO: 5454154 NR Description: peptidyl prolyl isomerase H; cyclophilin H
  misc_feature (31)..(202): NCBI GI NO: 39849992 NR Description: Unknown (protein for MGC:76244)
  misc_feature (31)..(202): NCBI GI NO: 39597495 NR Description: Hypothetical protein CBG03161
  misc_feature (31)..(202): NCBI GI NO: 17532643 NR Description: Peptidyl-prolyl cis-trans isomerase cyclophilinfamily member 11
  misc_feature (34)..(202): NCBI GI NO: 24586038 NR Description: CG17266-PA [Drosophila melanogaster]
  misc_feature (28)..(182): NCBI GI NO: 28278913 NR Description: Similar to RIKEN cDNA 1100001J08 gene
MASGGAAISAGPTPPSATTASSVEWHQRPPNPKNPVVFFDVTIGSIAAGRIKMELFADIAPKTAENFRQFCTGEHRKNALPQGYKGCQFHRVIKDFMIQGGDFLKNDGTGCTSIYGTKFDDENFIAKHTGPGLLSMANSGINSNGSQFFITCAKCDWLDNKHVVFGRVLGDGLLVVRKIENVATGANNKPKLACVISECGEM

SEQ ID NO: 31623 - protein, 150 aa, Zea mays subsp. mays; identical to SEQ ID NO: 23608
  peptide (1)..(150): Ceres Seq. ID no. 12415821
  misc_feature (1)..(150): Pfam Name: Pfam Description:  Cyclophilin type peptidyl-prolyl cis-trans isomerase
  misc_feature (1)..(150): NCBI GI NO: 15224944 NR Description: putative peptidyl-prolyl cis-trans isomerase
  misc_feature (1)..(150): NCBI GI NO: 4454307 NR Description: cyclophilin [Pseudotsuga menziesii]
  misc_feature (1)..(150): NCBI GI NO: 37595420 NR Description: peptidyl prolyl isomerase H [Danio rerio]
  misc_feature (1)..(150): NCBI GI NO: 11602709 NR Description: putative U-snRNP-associated cyclophilin
  misc_feature (1)..(150): NCBI GI NO: 5454154 NR Description: peptidyl prolyl isomerase H; cyclophilin H
  misc_feature (1)..(150): NCBI GI NO: 39849992 NR Description: Unknown (protein for MGC:76244)
  misc_feature (1)..(150): NCBI GI NO: 39597495 NR Description: Hypothetical protein CBG03161
  misc_feature (1)..(150): NCBI GI NO: 17532643 NR Description: Peptidyl-prolyl cis-trans isomerase cyclophilinfamily member 11
  misc_feature (1)..(150): NCBI GI NO: 24586038 NR Description: CG17266-PA [Drosophila melanogaster]
  misc_feature (1)..(130): NCBI GI NO: 28278913 NR Description: Similar to RIKEN cDNA 1100001J08 gene

SEQ ID NO: 31624 - DNA, 1864 bp, Zea mays subsp. mays
  misc_feature (1)..(1864): Ceres Seq. ID no. 12336605
gaaccctcgcgccgccgcctactccagcctccagcgtgatctgagtcctgaccaagccctaaacgccaccgccctcgcaaatctcctttcccttcgatccatggccgccgccgtcgccgcccccgcgccatcccgcaagacggagacctacaccgacaccaagcgccgcgacgacgtgcgcggcgccaacatcgccgctgcgcgcgccgtcgccgacgccgtgcgcacctcgctgggcccccgtggcatggataagatgatcgcttcgggcgaccaggctcaggaggtcatcatcaccaacgacggtgccaccatcctctcccgcatggcgctcctccagcccggccgcgcgcatgctcgccgagctatcccgctcccaggacgccgccgctggggacggcaccactaccgtcgtcgtcctcgctggatccctcctccgccgcgcccagtcgctcctctccgccggggctcaccccaccgccgctgccgacgccctccaccgtctcgccacgcgcgctgttgagatcctccacgccatggccatccccatcgagctatccgaccgggaatccctcgtcaagtctgcgtccacggctctcaactccaaggtcgtctcccagtactccacccttctctcgcccctcgccgtcgacgccgccctctctgtggtggaccccgctcaccctgaccttctcgacctccgggacatccgcatcgtgaagaagcttggtggcaccgtggacgatactgagctcatccctggcctcatctttgacaagaaggctagccatgctgctgggggcccaactcggatggagaatgctaagatcgctgtcatacagttccaaatctcaccacccaagactgacattgagcagagtgtcattgtatccgactacgcacagatggaccgcatcctacgtgaggagcgcaattatatccttgggatggtaaaaaagatcaaggcggctggatgcaatgtattgctcattcagaagagcatcttgcgtgatgcagtcactgacttgtctctgcactatcttgctaaggcaaagattctggtggtgaaggacgtggagagggatgagatggagttcatcaccaagaccctaaactgccttcccattgccaacattgagcacttccgcacggataagtttgggtatgcagatgttgttgaggaagtctctgttggagagggcaaggttgtgaagatcactggaatcaaggacatggttggaccgcaactgtacttgtcaggggatctaaccaattggttattgatgaagctgaacgcagtctccatgatgcactctgtgtcataaggtgcttggtcagcaagagatttttgattgctggtggtggtgctccagaaatagagatgtcaatgcagctggctgcttgggcaaaggagcttcgagggatggagagttactgcatcaaggagtttgctgaggcgcttgaggtcatcccttacacattggctgagaatgctgggctcaacccaatctccattgtcaccgaactcaggaatcgccatgccagaggtgagaagaacactggcatcaatgtgaggaaagggcagatcacaaacatcctggaggagaatgtcgtgcagccgttgctggtgagcacaagtgccattacgttagcctgcgagtgtgtcagaatgatcttgaagattgatgacattgtcactgttaggtaagagcgtgaagttggggtcatgtcagcctgctctgttctgtctggattgattattagttaggttactgcttaatgtaaaacttggttcatgggcgtgtttctacacttggttttgatgttagtactatccttgacatgaaactactaccagggttgc

SEQ ID NO: 31625 - protein, 323 aa, Zea mays subsp. mays
  peptide (1)..(323): Ceres Seq. ID no. 12336606
  misc_feature (1)..(294): Pfam Name: Pfam Description:  TCP-1/cpn60 chaperonin family
  misc_feature (1)..(294): NCBI GI NO: 37536036 NR Description: putative cytosolic chaperonin, delta-subunit
  misc_feature (1)..(294): NCBI GI NO: 3819164 NR Description: cytosolic chaperonin, delta-subunit [Glycine max]
  misc_feature (1)..(294): NCBI GI NO: 15229595 NR Description: chaperonin subunit, putative; protein id:At3g18190
  misc_feature (1)..(294): NCBI GI NO: 21595439 NR Description: chaperonin subunit, putative
  misc_feature (1)..(291): NCBI GI NO: 20149213 NR Description: chaperonin containing TCP-1 delta subunit
  misc_feature (1)..(290): NCBI GI NO: 6753322 NR Description: chaperonin subunit 4
  misc_feature (1)..(294): NCBI GI NO: 24583944 NR Description: CG5525-PA [Drosophila melanogaster]
  misc_feature (1)..(290): NCBI GI NO: 38455427 NR Description: chaperonin containing TCP1, subunit 4
  misc_feature (1)..(290): NCBI GI NO: 1729870 NR Description: T-complex protein 1, delta subunit
  misc_feature (1)..(293): NCBI GI NO: 39587212 NR Description: Hypothetical protein CBG00674
MLAELSRSQDAAAGDGTTTVVVLAGSLLRRAQSLLSAGAHPTAAADALHRLATRAVEILHAMAIPIELSDRESLVKSASTALNSKVVSQYSTLLSPLAVDAALSVVDPAHPDLLDLRDIRIVKKLGGTVDDTELIPGLIFDKKASHAAGGPTRMENAKIAVIQFQISPPKTDIEQSVIVSDYAQMDRILREERNYILGMVKKIKAAGCNVLLIQKSILRDAVTDLSLHYLAKAKILVVKDVERDEMEFITKTLNCLPIANIEHFRTDKFGYADVVEEVSVGEGKVVKITGIKDMVGPQLYLSGDLTNWLLMKLNAVSMMHSVS

SEQ ID NO: 31626 - protein, 262 aa, Zea mays subsp. mays
  peptide (1)..(262): Ceres Seq. ID no. 12336607
  misc_feature (1)..(233): Pfam Name: Pfam Description:  TCP-1/cpn60 chaperonin family
  misc_feature (1)..(233): NCBI GI NO: 37536036 NR Description: putative cytosolic chaperonin, delta-subunit
  misc_feature (1)..(233): NCBI GI NO: 3819164 NR Description: cytosolic chaperonin, delta-subunit [Glycine max]
  misc_feature (1)..(233): NCBI GI NO: 15229595 NR Description: chaperonin subunit, putative; protein id:At3g18190
  misc_feature (1)..(233): NCBI GI NO: 21595439 NR Description: chaperonin subunit, putative
  misc_feature (1)..(230): NCBI GI NO: 20149213 NR Description: chaperonin containing TCP-1 delta subunit
  misc_feature (1)..(229): NCBI GI NO: 6753322 NR Description: chaperonin subunit 4
  misc_feature (1)..(233): NCBI GI NO: 24583944 NR Description: CG5525-PA [Drosophila melanogaster]
  misc_feature (1)..(229): NCBI GI NO: 38455427 NR Description: chaperonin containing TCP1, subunit 4
  misc_feature (1)..(229): NCBI GI NO: 1729870 NR Description: T-complex protein 1, delta subunit
  misc_feature (1)..(232): NCBI GI NO: 39587212 NR Description: Hypothetical protein CBG00674
MAIPIELSDRESLVKSASTALNSKVVSQYSTLLSPLAVDAALSVVDPAHPDLLDLRDIRIVKKLGGTVDDTELIPGLIFDKKASHAAGGPTRMENAKIAVIQFQISPPKTDIEQSVIVSDYAQMDRILREERNYILGMVKKIKAAGCNVLLIQKSILRDAVTDLSLHYLAKAKILVVKDVERDEMEFITKTLNCLPIANIEHFRTDKFGYADVVEEVSVGEGKVVKITGIKDMVGPQLYLSGDLTNWLLMKLNAVSMMHSVS

SEQ ID NO: 31627 - protein, 173 aa, Zea mays subsp. mays
  peptide (1)..(173): Ceres Seq. ID no. 12336608
  misc_feature (34)..(114): NCBI GI NO: 37536036 NR Description: putative cytosolic chaperonin, delta-subunit
  misc_feature (36)..(114): NCBI GI NO: 3819164 NR Description: cytosolic chaperonin, delta-subunit [Glycine max]
  misc_feature (36)..(114): NCBI GI NO: 15229595 NR Description: chaperonin subunit, putative; protein id:At3g18190
  misc_feature (36)..(114): NCBI GI NO: 21595439 NR Description: chaperonin subunit, putative
  misc_feature (38)..(114): NCBI GI NO: 20149213 NR Description: chaperonin containing TCP-1 delta subunit
  misc_feature (30)..(114): NCBI GI NO: 6753322 NR Description: chaperonin subunit 4
  misc_feature (34)..(114): NCBI GI NO: 24583944 NR Description: CG5525-PA [Drosophila melanogaster]
  misc_feature (35)..(114): NCBI GI NO: 38455427 NR Description: chaperonin containing TCP1, subunit 4
  misc_feature (35)..(114): NCBI GI NO: 1729870 NR Description: T-complex protein 1, delta subunit
  misc_feature (35)..(114): NCBI GI NO: 39587212 NR Description: Hypothetical protein CBG00674
NPRAAAYSSLQRDLSPDQALNATALANLLSLRSMAAAVAAPAPSRKTETYTDTKRRDDVRGANIAAARAVADAVRTSLGPRGMDKMIASGDQAQEVIITNDGATILSRMALLQPGRAHARRAIPLPGRRRWGRHHYRRRPRWIPPPPRPVAPLRRGSPHRRCRRPPPSRHARC

SEQ ID NO: 31628 - DNA, 1200 bp, Zea mays subsp. mays
  misc_feature (1)..(1200): Ceres Seq. ID no. 12387398
acgaagcattcgcctcgccttgatctccaaccccttccttccttgcttaggagaaagagggaggagaggagaggaggaagaagatggagagggcggccccagtgaggagttcccacacctccacggccggcctactcgcgtggcctcaacccgatggcgccgcgtcgcaggcaccacgtcggcctaaccagccgacggaggaattcaggaaggtggtgttcggggggcaggtcaccgaggaggccgacggtctcaacaagacgaagatgaggacgacggcctccgcacccaagtcgaaggagacaacagggatcggcatgtttaaggccgagagcgctgccgccgccgtcacaactgcatcccgtgatcgccaggctagccagatcaccttttctcaggacgggaccattcctcccaggaagccaacttcagttgctggggtggcgaggcagcgcgaacttagccataccgttgagagttcgggggacggtaagatgaagcggcaggtgtccaatgcgaaatccaaggagctcagtggtcacaacatctttgctgatcatgaagatccgagtcccaacaggtcaagcagctctgctgctgctctggcacatgtgaaaaatgcaaatgtgagctccttctcctttggaaaggccgacatggacagcacagtgaaaacagcaaagaagaaagggtccagcaacaagtctactgatctgatgaatggcaaggccatctccgagagggattcagcgcctgcagggaaacagcctctgaaccgcgcgaagccgaaaggattgagtggtagtagcatttttgcagacgggaaggcctcaacaactggtgatcatgcaggccgtcggacccggcagccacctggcggcgatagcagcatcttgctgggctagcgtgcatatggatattgtcctatgccgccacacgggtggttggtccgtccgtgtgcggccatgttttcctgatcaggcgatgagtcccatctcagatgatctggttcacttctggcgtgtgtatgggtttgtgtctgtgttggttgtgacatgtccaatggaacaaccctatccctactgcgtgtggtgccgttttgttgtgtagtagtacaacggatgacatgtggtaccgtttcgttgtgtgtacgtggatatacatatgtgtgtttggttattaaatactccctccgttttt

SEQ ID NO: 31629 - protein, 273 aa, Zea mays subsp. mays
  peptide (1)..(273): Ceres Seq. ID no. 12387399
  misc_feature (25)..(272): NCBI GI NO: 33146622 NR Description: hypothetical protein
  misc_feature (1)..(272): NCBI GI NO: 30699309 NR Description: expressed protein [Arabidopsis thaliana]
  misc_feature (1)..(272): NCBI GI NO: 25361078 NR Description: unknown protein T11I11.9
  misc_feature (1)..(272): NCBI GI NO: 30692553 NR Description: expressed protein [Arabidopsis thaliana]
  misc_feature (1)..(272): NCBI GI NO: 15236057 NR Description: putative protein; protein id: At4g39860
  misc_feature (1)..(272): NCBI GI NO: 21553689 NR Description: unknown [Arabidopsis thaliana]
  misc_feature (23)..(272): NCBI GI NO: 18399883 NR Description: expressed protein; protein id: At1g35780
  misc_feature (26)..(272): NCBI GI NO: 38347099 NR Description: OSJNBa0006M15.14
  misc_feature (97)..(272): NCBI GI NO: 25361079 NR Description: hypothetical protein At2g22270
  misc_feature (97)..(272): NCBI GI NO: 18399920 NR Description: expressed protein; protein id: At2g22270
MERAAPVRSSHTSTAGLLAWPQPDGAASQAPRRPNQPTEEFRKVVFGGQVTEEADGLNKTKMRTTASAPKSKETTGIGMFKAESAAAAVTTASRDRQASQITFSQDGTIPPRKPTSVAGVARQRELSHTVESSGDGKMKRQVSNAKSKELSGHNIFADHEDPSPNRSSSSAAALAHVKNANVSSFSFGKADMDSTVKTAKKKGSSNKSTDLMNGKAISERDSAPAGKQPLNRAKPKGLSGSSIFADGKASTTGDHAGRRTRQPPGGDSSILLG

SEQ ID NO: 31630 - protein, 212 aa, Zea mays subsp. mays
  peptide (1)..(212): Ceres Seq. ID no. 12387400
  misc_feature (1)..(211): NCBI GI NO: 33146622 NR Description: hypothetical protein
  misc_feature (1)..(211): NCBI GI NO: 30699309 NR Description: expressed protein [Arabidopsis thaliana]
  misc_feature (1)..(211): NCBI GI NO: 25361078 NR Description: unknown protein T11I11.9
  misc_feature (1)..(211): NCBI GI NO: 30692553 NR Description: expressed protein [Arabidopsis thaliana]
  misc_feature (1)..(211): NCBI GI NO: 15236057 NR Description: putative protein; protein id: At4g39860
  misc_feature (1)..(211): NCBI GI NO: 21553689 NR Description: unknown [Arabidopsis thaliana]
  misc_feature (1)..(211): NCBI GI NO: 18399883 NR Description: expressed protein; protein id: At1g35780
  misc_feature (1)..(211): NCBI GI NO: 38347099 NR Description: OSJNBa0006M15.14
  misc_feature (36)..(211): NCBI GI NO: 25361079 NR Description: hypothetical protein At2g22270
  misc_feature (36)..(211): NCBI GI NO: 18399920 NR Description: expressed protein; protein id: At2g22270
MRTTASAPKSKETTGIGMFKAESAAAAVTTASRDRQASQITFSQDGTIPPRKPTSVAGVARQRELSHTVESSGDGKMKRQVSNAKSKELSGHNIFADHEDPSPNRSSSSAAALAHVKNANVSSFSFGKADMDSTVKTAKKKGSSNKSTDLMNGKAISERDSAPAGKQPLNRAKPKGLSGSSIFADGKASTTGDHAGRRTRQPPGGDSSILLG

SEQ ID NO: 31631 - protein, 195 aa, Zea mays subsp. mays
  peptide (1)..(195): Ceres Seq. ID no. 12387401
  misc_feature (1)..(194): NCBI GI NO: 33146622 NR Description: hypothetical protein
  misc_feature (1)..(194): NCBI GI NO: 30699309 NR Description: expressed protein [Arabidopsis thaliana]
  misc_feature (1)..(194): NCBI GI NO: 25361078 NR Description: unknown protein T11I11.9
  misc_feature (1)..(194): NCBI GI NO: 30692553 NR Description: expressed protein [Arabidopsis thaliana]
  misc_feature (1)..(194): NCBI GI NO: 15236057 NR Description: putative protein; protein id: At4g39860
  misc_feature (1)..(194): NCBI GI NO: 21553689 NR Description: unknown [Arabidopsis thaliana]
  misc_feature (1)..(194): NCBI GI NO: 18399883 NR Description: expressed protein; protein id: At1g35780
  misc_feature (1)..(194): NCBI GI NO: 38347099 NR Description: OSJNBa0006M15.14
  misc_feature (19)..(194): NCBI GI NO: 25361079 NR Description: hypothetical protein At2g22270
  misc_feature (19)..(194): NCBI GI NO: 18399920 NR Description: expressed protein; protein id: At2g22270
MFKAESAAAAVTTASRDRQASQITFSQDGTIPPRKPTSVAGVARQRELSHTVESSGDGKMKRQVSNAKSKELSGHNIFADHEDPSPNRSSSSAAALAHVKNANVSSFSFGKADMDSTVKTAKKKGSSNKSTDLMNGKAISERDSAPAGKQPLNRAKPKGLSGSSIFADGKASTTGDHAGRRTRQPPGGDSSILLG

SEQ ID NO: 31632 - DNA, 708 bp, Zea mays subsp. mays
  misc_feature (1)..(708): Ceres Seq. ID no. 12355366
catggaaggaattgcacaggcgttgctagcattggataggattgaacatgatgttgaattgacttatgagcaactgcttctgctagaaactaatctgctcttaagtggccttgatttgcacgatcaacatgaagatatgagattggatatcgacaatatgtcttatgaggaactgcttgctttggaagagcatattggctcagtgactactgcccttactgaagagcaatttaccaagtgtgtaaaccaaagtgtgtatgaagcaagaaattcttatagagatgtaagcaagatcgcagcagatgatgtgaaatgtagcgtatgtcaggaggaatacgttgatggtgaagagattggtacaatgcaatgtgaacatcagtaccatgtgcgctgcattcacgaatggcttaagcagaagaattggtgtccaatatgcaaagcttcaggctataccttcagagatgaccaagggagacgcatgaatcttggcccaaacttgtaaatagcgtggatttattattagacattgtagatgctgacgcagttcaccccaatatgtggatacgatagtctctcccgaacggtcgaacgcctggaaccttttgttactgcatcttttatcttcttagcacacccttgctgcttgacagcagtacgggtcagaaactcgaaaataaccgtggttctcaagaaatttttccagattcc

SEQ ID NO: 31633 - protein, 166 aa, Zea mays subsp. mays
  peptide (1)..(166): Ceres Seq. ID no. 12355367
  misc_feature (105)..(145): Pfam Name: RING finger Pfam Description: Zinc finger, C3HC4 type
  misc_feature (1)..(148): NCBI GI NO: 30689641 NR Description: RING finger-related protein [Arabidopsis thaliana]
  misc_feature (1)..(151): NCBI GI NO: 7486381 NR Description: hypothetical protein F3L17
  misc_feature (1)..(151): NCBI GI NO: 18417809 NR Description: putative protein; protein id: At4g31450
  misc_feature (1)..(148): NCBI GI NO: 10129643 NR Description: Pspzf zinc finger protein-like
  misc_feature (1)..(148): NCBI GI NO: 22326712 NR Description: Pspzf zinc finger protein - like
  misc_feature (1)..(148): NCBI GI NO: 20466428 NR Description: Pspzf zinc finger protein-like
  misc_feature (4)..(149): NCBI GI NO: 11358785 NR Description: RING-H2 finger protein RHG1a
  misc_feature (4)..(149): NCBI GI NO: 15239131 NR Description: putative protein; protein id: At5g42940
  misc_feature (31)..(146): NCBI GI NO: 38345496 NR Description: OSJNBa0010D21.9
  misc_feature (3)..(149): NCBI GI NO: 15220067 NR Description: hypothetical protein; protein id: At1g45180.1
MEGIAQALLALDRIEHDVELTYEQLLLLETNLLLSGLDLHDQHEDMRLDIDNMSYEELLALEEHIGSVTTALTEEQFTKCVNQSVYEARNSYRDVSKIAADDVKCSVCQEEYVDGEEIGTMQCEHQYHVRCIHEWLKQKNWCPICKASGYTFRDDQGRRMNLGPNL

SEQ ID NO: 31634 - protein, 121 aa, Zea mays subsp. mays
  peptide (1)..(121): Ceres Seq. ID no. 12355368
  misc_feature (60)..(100): Pfam Name: RING finger Pfam Description: Zinc finger, C3HC4 type
  misc_feature (1)..(103): NCBI GI NO: 30689641 NR Description: RING finger-related protein [Arabidopsis thaliana]
  misc_feature (1)..(106): NCBI GI NO: 7486381 NR Description: hypothetical protein F3L17
  misc_feature (1)..(106): NCBI GI NO: 18417809 NR Description: putative protein; protein id: At4g31450
  misc_feature (1)..(103): NCBI GI NO: 10129643 NR Description: Pspzf zinc finger protein-like
  misc_feature (1)..(103): NCBI GI NO: 22326712 NR Description: Pspzf zinc finger protein - like
  misc_feature (1)..(103): NCBI GI NO: 20466428 NR Description: Pspzf zinc finger protein-like
  misc_feature (1)..(104): NCBI GI NO: 11358785 NR Description: RING-H2 finger protein RHG1a
  misc_feature (1)..(104): NCBI GI NO: 15239131 NR Description: putative protein; protein id: At5g42940
  misc_feature (1)..(101): NCBI GI NO: 38345496 NR Description: OSJNBa0010D21.9
  misc_feature (1)..(104): NCBI GI NO: 15220067 NR Description: hypothetical protein; protein id: At1g45180.1
MRLDIDNMSYEELLALEEHIGSVTTALTEEQFTKCVNQSVYEARNSYRDVSKIAADDVKCSVCQEEYVDGEEIGTMQCEHQYHVRCIHEWLKQKNWCPICKASGYTFRDDQGRRMNLGPNL

SEQ ID NO: 31635 - protein, 114 aa, Zea mays subsp. mays
  peptide (1)..(114): Ceres Seq. ID no. 12355369
  misc_feature (53)..(93): Pfam Name: RING finger Pfam Description: Zinc finger, C3HC4 type
  misc_feature (1)..(96): NCBI GI NO: 30689641 NR Description: RING finger-related protein [Arabidopsis thaliana]
  misc_feature (1)..(99): NCBI GI NO: 7486381 NR Description: hypothetical protein F3L17
  misc_feature (1)..(99): NCBI GI NO: 18417809 NR Description: putative protein; protein id: At4g31450
  misc_feature (1)..(96): NCBI GI NO: 10129643 NR Description: Pspzf zinc finger protein-like
  misc_feature (1)..(96): NCBI GI NO: 22326712 NR Description: Pspzf zinc finger protein - like
  misc_feature (1)..(96): NCBI GI NO: 20466428 NR Description: Pspzf zinc finger protein-like
  misc_feature (1)..(97): NCBI GI NO: 11358785 NR Description: RING-H2 finger protein RHG1a
  misc_feature (1)..(97): NCBI GI NO: 15239131 NR Description: putative protein; protein id: At5g42940
  misc_feature (1)..(94): NCBI GI NO: 38345496 NR Description: OSJNBa0010D21.9
  misc_feature (1)..(97): NCBI GI NO: 15220067 NR Description: hypothetical protein; protein id: At1g45180.1
MSYEELLALEEHIGSVTTALTEEQFTKCVNQSVYEARNSYRDVSKIAADDVKCSVCQEEYVDGEEIGTMQCEHQYHVRCIHEWLKQKNWCPICKASGYTFRDDQGRRMNLGPNL

SEQ ID NO: 31636 - DNA, 1081 bp, Zea mays subsp. mays
  misc_feature (1)..(1081): Ceres Seq. ID no. 12415038
  misc_feature (941)..(941): n is a, c, t, g, unknown, or other
ccaattcaaacagtgaggcggaggcagaggcagacaacgccgccatgaacgccttcttcacgtccctggcgcgcgggctggacgacctgggccgtgcaggcgggctgtcgtcgctgccggctctgctgcgggcggcggcgcttctcagggggctgcactcgcagctcacgctcatggtcggccagctccacctgccgccgggcggccgctggctcgacgagtacatggacgagaccgcccgcctctgggacgcctgcctcgccgtcaaactcggccctcgcctccgtcgagcggtattgcgccgcggccctcctgcgccgccgcggcgctggatgactggctccaggatccctcccctctctccagtcgccaggtgatgcgggcgatctccgtgtcgaggagggaggccatggccgcggaggaggagaaccgcgcgctggcggacgcgaggatcgcgccgctctcgctgcagctggacgagcggcttctgctgcgcgcgacggacgcgaggcttacggttacgggcttcaacggcttccgggggctgctgcacgcgctccacaacgcgagctcgctcctcctgctcatcctcgccagcggcgccgtctcgtgcgccgccgcggccggcggcccgtgcggcgcggacgacgccggggccggcttcgtggcgtccatcgtgatgctgcagcagcggatggcggaggaggccgctgacgctgagtccgacgggcctggcgcgcccgggatcgggatgtgcgagttccggtgcgcgcgcgccgccgtggaggcggcgcgggaggaggtggagcgcgccgccgcggcggcggggcgcaagtgcgagggcggcggtgtcgtgaaggacaaggtggaggagctcaaggcgtggctgcatgtgctccggaccggcaccgatagcctggtgtgccagctggacgacttcntggacgacattgtagagggaaggaaggagctctccgacctgtgcagccattgatgtatcgatcacgcctcctgccctgcgcccctgcccccgatcgagcctcggagctccagtgccaggataaagattaccatcgtcatc

SEQ ID NO: 31637 - protein, 205 aa, Zea mays subsp. mays
  peptide (1)..(205): Ceres Seq. ID no. 12415039
  misc_feature (1)..(205): NCBI GI NO: 34907302 NR Description: hypothetical protein~similar to Arabidopsisthaliana chromosome 1
  misc_feature (1)..(205): NCBI GI NO: 21593454 NR Description: unknown [Arabidopsis thaliana]
  misc_feature (1)..(205): NCBI GI NO: 18395063 NR Description: expressed protein; protein id: At1g22030
  misc_feature (1)..(205): NCBI GI NO: 22330710 NR Description: hypothetical protein; protein id: At1g77855.1
  misc_feature (1)..(205): NCBI GI NO: 6573780 NR Description: F28K19.7 [Arabidopsis thaliana]
  misc_feature (189)..(189): Xaa is any aa, unknown or other
MRAISVSRREAMAAEEENRALADARIAPLSLQLDERLLLRATDARLTVTGFNGFRGLLHALHNASSLLLLILASGAVSCAAAAGGPCGADDAGAGFVASIVMLQQRMAEEAADAESDGPGAPGIGMCEFRCARAAVEAAREEVERAAAAAGRKCEGGGVVKDKVEELKAWLHVLRTGTDSLVCQLDDFXDDIVEGRKELSDLCSH

SEQ ID NO: 31638 - protein, 194 aa, Zea mays subsp. mays
  peptide (1)..(194): Ceres Seq. ID no. 12415040
  misc_feature (1)..(194): NCBI GI NO: 34907302 NR Description: hypothetical protein~similar to Arabidopsisthaliana chromosome 1
  misc_feature (1)..(194): NCBI GI NO: 21593454 NR Description: unknown [Arabidopsis thaliana]
  misc_feature (1)..(194): NCBI GI NO: 18395063 NR Description: expressed protein; protein id: At1g22030
  misc_feature (1)..(194): NCBI GI NO: 22330710 NR Description: hypothetical protein; protein id: At1g77855.1
  misc_feature (1)..(194): NCBI GI NO: 6573780 NR Description: F28K19.7 [Arabidopsis thaliana]
  misc_feature (178)..(178): Xaa is any aa, unknown or other
MAAEEENRALADARIAPLSLQLDERLLLRATDARLTVTGFNGFRGLLHALHNASSLLLLILASGAVSCAAAAGGPCGADDAGAGFVASIVMLQQRMAEEAADAESDGPGAPGIGMCEFRCARAAVEAAREEVERAAAAAGRKCEGGGVVKDKVEELKAWLHVLRTGTDSLVCQLDDFXDDIVEGRKELSDLCSH

SEQ ID NO: 31639 - protein, 124 aa, Zea mays subsp. mays
  peptide (1)..(124): Ceres Seq. ID no. 12415041
  misc_feature (15)..(91): NCBI GI NO: 34907302 NR Description: hypothetical protein~similar to Arabidopsisthaliana chromosome 1
  misc_feature (14)..(89): NCBI GI NO: 21593454 NR Description: unknown [Arabidopsis thaliana]
  misc_feature (14)..(89): NCBI GI NO: 18395063 NR Description: expressed protein; protein id: At1g22030
  misc_feature (14)..(89): NCBI GI NO: 22330710 NR Description: hypothetical protein; protein id: At1g77855.1
  misc_feature (14)..(89): NCBI GI NO: 6573780 NR Description: F28K19.7 [Arabidopsis thaliana]
NSNSEAEAEADNAAMNAFFTSLARGLDDLGRAGGLSSLPALLRAAALLRGLHSQLTLMVGQLHLPPGGRWLDEYMDETARLWDACLAVKLGPRLRRAVLRRGPPAPPRRWMTGSRIPPLSPVAR

SEQ ID NO: 31640 - DNA, 1594 bp, Zea mays subsp. mays; identical to SEQ ID NO: 24357
  misc_feature (1)..(1594): Ceres Seq. ID no. 12387222

SEQ ID NO: 31641 - protein, 454 aa, Zea mays subsp. mays; identical to SEQ ID NO: 24358
  peptide (1)..(454): Ceres Seq. ID no. 12387223
  misc_feature (146)..(417): Pfam Name: Pfam Description:  Polyprenyl synthetase
  misc_feature (105)..(454): NCBI GI NO: 1346033 NR Description: Farnesyl pyrophosphate synthetase
  misc_feature (104)..(454): NCBI GI NO: 34911542 NR Description: putative farnesyl-pyrophosphate synthetase
  misc_feature (158)..(454): NCBI GI NO: 25458583 NR Description: probable farnesyl pyrophosphate synthase
  misc_feature (21)..(151): NCBI GI NO: 25458583 NR Description: probable farnesyl pyrophosphate synthase
  misc_feature (106)..(454): NCBI GI NO: 18958450 NR Description: farnesyl pyrophosphare synthase [Musa acuminata]
  misc_feature (115)..(454): NCBI GI NO: 1346028 NR Description: Farnesyl pyrophosphate synthetase 1
  misc_feature (115)..(454): NCBI GI NO: 7433992 NR Description: farnesyl-pyrophosphate synthetase
  misc_feature (115)..(454): NCBI GI NO: 1346029 NR Description: Farnesyl pyrophosphate synthetase 2
  misc_feature (117)..(454): NCBI GI NO: 13537421 NR Description: farnesyl pyrophosphate synthase [Humulus lupulus]
  misc_feature (115)..(454): NCBI GI NO: 25452945 NR Description: Farnesyl pyrophosphate synthetase 1

SEQ ID NO: 31642 - protein, 350 aa, Zea mays subsp. mays; identical to SEQ ID NO: 24359
  peptide (1)..(350): Ceres Seq. ID no. 12387224
  misc_feature (42)..(313): Pfam Name: Pfam Description:  Polyprenyl synthetase
  misc_feature (1)..(350): NCBI GI NO: 1346033 NR Description: Farnesyl pyrophosphate synthetase
  misc_feature (1)..(350): NCBI GI NO: 34911542 NR Description: putative farnesyl-pyrophosphate synthetase
  misc_feature (54)..(350): NCBI GI NO: 25458583 NR Description: probable farnesyl pyrophosphate synthase
  misc_feature (1)..(47): NCBI GI NO: 25458583 NR Description: probable farnesyl pyrophosphate synthase
  misc_feature (2)..(350): NCBI GI NO: 18958450 NR Description: farnesyl pyrophosphare synthase [Musa acuminata]
  misc_feature (11)..(350): NCBI GI NO: 1346028 NR Description: Farnesyl pyrophosphate synthetase 1
  misc_feature (11)..(350): NCBI GI NO: 7433992 NR Description: farnesyl-pyrophosphate synthetase
  misc_feature (11)..(350): NCBI GI NO: 1346029 NR Description: Farnesyl pyrophosphate synthetase 2
  misc_feature (13)..(350): NCBI GI NO: 13537421 NR Description: farnesyl pyrophosphate synthase [Humulus lupulus]
  misc_feature (11)..(350): NCBI GI NO: 25452945 NR Description: Farnesyl pyrophosphate synthetase 1

SEQ ID NO: 31643 - protein, 305 aa, Zea mays subsp. mays; identical to SEQ ID NO: 24360
  peptide (1)..(305): Ceres Seq. ID no. 12387225
  misc_feature (1)..(268): Pfam Name: Pfam Description:  Polyprenyl synthetase
  misc_feature (1)..(305): NCBI GI NO: 1346033 NR Description: Farnesyl pyrophosphate synthetase
  misc_feature (1)..(305): NCBI GI NO: 34911542 NR Description: putative farnesyl-pyrophosphate synthetase
  misc_feature (9)..(305): NCBI GI NO: 25458583 NR Description: probable farnesyl pyrophosphate synthase
  misc_feature (1)..(305): NCBI GI NO: 18958450 NR Description: farnesyl pyrophosphare synthase [Musa acuminata]
  misc_feature (1)..(305): NCBI GI NO: 1346028 NR Description: Farnesyl pyrophosphate synthetase 1
  misc_feature (1)..(305): NCBI GI NO: 7433992 NR Description: farnesyl-pyrophosphate synthetase
  misc_feature (1)..(305): NCBI GI NO: 1346029 NR Description: Farnesyl pyrophosphate synthetase 2
  misc_feature (1)..(305): NCBI GI NO: 13537421 NR Description: farnesyl pyrophosphate synthase [Humulus lupulus]
  misc_feature (1)..(305): NCBI GI NO: 25452945 NR Description: Farnesyl pyrophosphate synthetase 1
  misc_feature (1)..(305): NCBI GI NO: 14279425 NR Description: farnesyl pyrophosphate synthase [Humulus lupulus]

SEQ ID NO: 31644 - DNA, 748 bp, Zea mays subsp. mays
  misc_feature (1)..(748): Ceres Seq. ID no. 12415163
attccagcgtcttgtctcgctgtaccggccgatctccccattctcccctcttcgccggtcccaccaccgcgccgatcctgatggcctccgccgcctcatcggccgtcggcgctggcaaatcgctgttccaggggctccgcaggttcctcaagaagccgtgggagatcacaggcccctgcgcctctcccgagtaccgcagcgcgctgcctggcgcgctcgagtaccgcgtcaagtgcccggccaccgtgcgcgacgaccgcgacaaggccatcgtgcccacatccgatccggagacagtctacgatatcaagtacttcacccgcgaccgccgccggagccgcccgcccgtgcggcgcaccctactccgcaagcccgatctcgagagctacatggccaccaagcagttcgaccccaccaatgacttccccgtaccatacgtcaacaccaccgtcgaggaggatgacaacactgtcggcggtggctaccagaagtgactcaggaaagcttgctggttaatttggtaggtatcctttgattggacttcatcagaagcggcactattttcattccagctattaaatatccccttttcttttgttcctagtggaagttttttggatgtaaaagatgacggtgtcaaataatatggcacctgtggagctcacaggatgcacatatcttgtaaattgtattctaaaactgtctacctgataccattgttactgtttaatgcaaaatttaaggtttc

SEQ ID NO: 31645 - protein, 163 aa, Zea mays subsp. mays
  peptide (1)..(163): Ceres Seq. ID no. 12415164
  misc_feature (1)..(163): NCBI GI NO: 34909786 NR Description: P0512C01.35
  misc_feature (31)..(163): NCBI GI NO: 15241510 NR Description: putative protein; protein id: At5g08060
  misc_feature (31)..(163): NCBI GI NO: 21592443 NR Description: unknown [Arabidopsis thaliana]
SSVLSRCTGRSPHSPLFAGPTTAPILMASAASSAVGAGKSLFQGLRRFLKKPWEITGPCASPEYRSALPGALEYRVKCPATVRDDRDKAIVPTSDPETVYDIKYFTRDRRRSRPPVRRTLLRKPDLESYMATKQFDPTNDFPVPYVNTTVEEDDNTVGGGYQK

SEQ ID NO: 31646 - protein, 139 aa, Zea mays subsp. mays
  peptide (1)..(139): Ceres Seq. ID no. 12415165
FQRLVSLYRPISPFSPLRRSHHRADPDGLRRLIGRRRWQIAVPGAPQVPQEAVGDHRPLRLSRVPQRAAWRARVPRQVPGHRARRPRQGHRAHIRSGDSLRYQVLHPRPPPEPPARAAHPTPQARSRELHGHQAVRPHQ

SEQ ID NO: 31647 - protein, 137 aa, Zea mays subsp. mays
  peptide (1)..(137): Ceres Seq. ID no. 12415166
  misc_feature (1)..(137): NCBI GI NO: 34909786 NR Description: P0512C01.35
  misc_feature (5)..(137): NCBI GI NO: 15241510 NR Description: putative protein; protein id: At5g08060
  misc_feature (5)..(137): NCBI GI NO: 21592443 NR Description: unknown [Arabidopsis thaliana]
MASAASSAVGAGKSLFQGLRRFLKKPWEITGPCASPEYRSALPGALEYRVKCPATVRDDRDKAIVPTSDPETVYDIKYFTRDRRRSRPPVRRTLLRKPDLESYMATKQFDPTNDFPVPYVNTTVEEDDNTVGGGYQK

SEQ ID NO: 31648 - DNA, 1027 bp, Zea mays subsp. mays
  misc_feature (1)..(1027): Ceres Seq. ID no. 12360663
  misc_feature (640)..(640): n is a, c, t, g, unknown, or other
  misc_feature (615)..(615): n is a, c, t, g, unknown, or other
aactttggttaaccacccgactccgcctaatatagccttccttttccgtccatggccgcgcaaccctaacggcgcccttcccgtgccgcgcgcatggcggaccccggcggctgcctcgaggtccggctcttctacgtgcgcgtctcgccgcacggcggcgcggcccctcccccgcgcctcgcgctcgacctccgccccgcgggcggcgaggcggcccccgtcccgctgcgcctcgaccgccacgacgccgcctcgggcgaggccacctacgtctccaccgcggccgcgcggctgcccccgccatccgcggccttcgatgtggccgaccaccgcggcgtcgcgctgctccggggctcgcttcggtggtgtcccggcgccaagggcggttcccacgcctgggaaattgattgcgtccccgccgctgcggcggccgcctcggcctcggccttcgaggtgtacgtcgccgggtgctacgccggcgagcccgcggtgctcacgcacgccctgcggctagccaccccggaggaagctgctgctgcgttggttcggcgccgatcgggggcattgccggctgctagggatgaaggcgacaatgatatgaacactggtagcacncaataccctgaaggttggtactcanacgatgacgacgggcagctctcatggttcaacgctggggtcagagttggcgtaggcatcggcctgggagtctgtgttggtgtaggcataggcgtcgggctcctcctgcgctcctaccaagcaacaaccagaagcttgaagaggcggttcttctgacagttgcagctggtgtagctaccaatgatgaccagagcagagttctgcctcacatacttgtatagttcatgtgtttgttgtgcaggagttttgttttgtttttaggggaaagtgtagatgctgtgttaatgtggttgtgtacatggctctcgccgtttcttgtatggcatggcatgcatgtaaactgtgaagttggtcctcggacatgtgaaggaaatggtttctagttttg

SEQ ID NO: 31649 - protein, 233 aa, Zea mays subsp. mays
  peptide (1)..(233): Ceres Seq. ID no. 12360664
  misc_feature (3)..(233): NCBI GI NO: 28812134 NR Description: P0443G08.30
  misc_feature (163)..(232): NCBI GI NO: 2505879 NR Description: hypothetical protein [Arabidopsis thaliana]
  misc_feature (163)..(232): NCBI GI NO: 18378846 NR Description: expressed protein; protein id: At1g01500
  misc_feature (163)..(232): NCBI GI NO: 21593937 NR Description: unknown [Arabidopsis thaliana]
  misc_feature (120)..(231): NCBI GI NO: 22329671 NR Description: unknown protein; protein id: At1g19400
  misc_feature (163)..(225): NCBI GI NO: 1922248 NR Description: hypothetical protein [Arabidopsis thaliana]
  misc_feature (163)..(230): NCBI GI NO: 25517982 NR Description: F22L4.6 protein - Arabidopsis thaliana
  misc_feature (173)..(231): NCBI GI NO: 18389258 NR Description: unknown protein [Arabidopsis thaliana]
  misc_feature (173)..(231): NCBI GI NO: 21553509 NR Description: unknown [Arabidopsis thaliana]
  misc_feature (173)..(231): NCBI GI NO: 18410788 NR Description: expressed protein; protein id: At1g75180
  misc_feature (174)..(174): Xaa is any aa, unknown or other
  misc_feature (183)..(183): Xaa is any aa, unknown or other
MADPGGCLEVRLFYVRVSPHGGAAPPPRLALDLRPAGGEAAPVPLRLDRHDAASGEATYVSTAAARLPPPSAAFDVADHRGVALLRGSLRWCPGAKGGSHAWEIDCVPAAAAAASASAFEVYVAGCYAGEPAVLTHALRLATPEEAAAALVRRRSGALPAARDEGDNDMNTGSXQYPEGWYSXDDDGQLSWFNAGVRVGVGIGLGVCVGVGIGVGLLLRSYQATTRSLKRRFF

SEQ ID NO: 31650 - protein, 170 aa, Zea mays subsp. mays
  peptide (1)..(170): Ceres Seq. ID no. 12360665
  misc_feature (25)..(168): Pfam Name: Pfam Description:  Glycoprotein GG/GX
  misc_feature (8)..(170): NCBI GI NO: 27375632 NR Description: blr0521 [Bradyrhizobium japonicum]
  misc_feature (5)..(170): NCBI GI NO: 7446482 NR Description: probable cell wall-plasma membrane linker proteinPRP precursor - rape
  misc_feature (16)..(170): NCBI GI NO: 25989119 NR Description: unknown [Streptomyces aureofaciens]
  misc_feature (16)..(168): NCBI GI NO: 21431729 NR Description: Anter-specific proline-rich protein APG precursor
  misc_feature (6)..(170): NCBI GI NO: 20138131 NR Description: Vegetative cell wall protein gp1 precursor
  misc_feature (17)..(170): NCBI GI NO: 1076211 NR Description: hypothetical protein VSP-3 - Chlamydomonasreinhardtii
  misc_feature (16)..(168): NCBI GI NO: 25511649 NR Description: T20H2.9 protein - Arabidopsis thaliana
  misc_feature (16)..(170): NCBI GI NO: 11360318 NR Description: probable mucin DKFZp434C196.1 - human (fragment)
  misc_feature (16)..(168): NCBI GI NO: 99694 NR Description: proline-rich protein APG - Arabidopsis thaliana
TLVNHPTPPNIAFLFRPWPRNPNGALPVPRAWRTPAAASRSGSSTCASRRTAARPLPRASRSTSAPRAARRPPSRCASTATTPPRARPPTSPPRPRGCPRHPRPSMWPTTAASRCSGARFGGVPAPRAVPTPGKLIASPPLRRPPRPRPSRCTSPGATPASPRCSRTPCG

SEQ ID NO: 31651 - DNA, 793 bp, Zea mays subsp. mays
  misc_feature (1)..(793): Ceres Seq. ID no. 12347593
gttgttgttgctgctgctaggtgctagctcacgagtcacggccgccttccactcccacaagcttcaactagccttcttactcccgccgtcgcccccgatccgagagcgagcatggcgcactctctcgccgcctccttctcgccggccgccgcccggcgccagatgacaaatgtgattccaagctggagctcggtttccttccagagccacaggagggcttctgtgtccatccgctcaagaccaaattctcttgggtttaagatttgctgttcggctaagaaagagacagtggacaaggtttgcagtatagtgaaggagcagctggctcttcccgatgggaccgctatcactggcgaatcaaaattcgctgaacttggcgctgattcgctggatacggtcgagattgtgatggggctcgaggaggcgttcaacataacagtggacgaaacaagcgcacaagacatcgcaacggtgcaggacgctgcggaccttatcgagaagctcatgctggaggcacctccaaaggtcgtctagatccagcaaccttgcgatcgacgaccttgcgtttgatctatgttgtgtgttaatttgttcgtgttgccccatttgttttttcttgatgattcaagatgaggttttgtattggtgttgctgaggtgaattagatagccccaaaggccacatgaagcagatgaggacagttcattccactttgaatttgtatgttgtagtgctgctatagagaaaccaatggactgttatgaagagtcaatgcaactgttgcttttcgttt

SEQ ID NO: 31652 - protein, 140 aa, Zea mays subsp. mays
  peptide (1)..(140): Ceres Seq. ID no. 12347594
  misc_feature (61)..(128): Pfam Name: Pfam Description:  Phosphopantetheine attachment site
  misc_feature (1)..(134): NCBI GI NO: 113165 NR Description: Acyl carrier protein I, chloroplast precursor
  misc_feature (7)..(132): NCBI GI NO: 20137323 NR Description: Acyl carrier protein 1, chloroplast precursor
  misc_feature (28)..(132): NCBI GI NO: 2465010 NR Description: acyl carrier protein [Fragaria vesca]
  misc_feature (26)..(132): NCBI GI NO: 113169 NR Description: Acyl carrier protein II, chloroplast precursor
  misc_feature (26)..(132): NCBI GI NO: 113172 NR Description: Acyl carrier protein III, chloroplast precursor
  misc_feature (6)..(132): NCBI GI NO: 1703085 NR Description: Acyl carrier protein 1, chloroplast precursor
  misc_feature (1)..(131): NCBI GI NO: 30102979 NR Description: putative acyl carrier protein, 3'-partial
  misc_feature (28)..(132): NCBI GI NO: 166975 NR Description: acyl carrier protein III precursor
  misc_feature (8)..(132): NCBI GI NO: 1703087 NR Description: Acyl carrier protein 3, chloroplast precursor
  misc_feature (6)..(131): NCBI GI NO: 5669599 NR Description: acyl carrier protein [Coriandrum sativum]
MAHSLAASFSPAAARRQMTNVIPSWSSVSFQSHRRASVSIRSRPNSLGFKICCSAKKETVDKVCSIVKEQLALPDGTAITGESKFAELGADSLDTVEIVMGLEEAFNITVDETSAQDIATVQDAADLIEKLMLEAPPKVV

SEQ ID NO: 31653 - protein, 123 aa, Zea mays subsp. mays
  peptide (1)..(123): Ceres Seq. ID no. 12347595
  misc_feature (44)..(111): Pfam Name: Pfam Description:  Phosphopantetheine attachment site
  misc_feature (1)..(117): NCBI GI NO: 113165 NR Description: Acyl carrier protein I, chloroplast precursor
  misc_feature (1)..(115): NCBI GI NO: 20137323 NR Description: Acyl carrier protein 1, chloroplast precursor
  misc_feature (11)..(115): NCBI GI NO: 2465010 NR Description: acyl carrier protein [Fragaria vesca]
  misc_feature (9)..(115): NCBI GI NO: 113169 NR Description: Acyl carrier protein II, chloroplast precursor
  misc_feature (9)..(115): NCBI GI NO: 113172 NR Description: Acyl carrier protein III, chloroplast precursor
  misc_feature (1)..(115): NCBI GI NO: 1703085 NR Description: Acyl carrier protein 1, chloroplast precursor
  misc_feature (1)..(114): NCBI GI NO: 30102979 NR Description: putative acyl carrier protein, 3'-partial
  misc_feature (11)..(115): NCBI GI NO: 166975 NR Description: acyl carrier protein III precursor
  misc_feature (1)..(115): NCBI GI NO: 1703087 NR Description: Acyl carrier protein 3, chloroplast precursor
  misc_feature (1)..(114): NCBI GI NO: 5669599 NR Description: acyl carrier protein [Coriandrum sativum]
MTNVIPSWSSVSFQSHRRASVSIRSRPNSLGFKICCSAKKETVDKVCSIVKEQLALPDGTAITGESKFAELGADSLDTVEIVMGLEEAFNITVDETSAQDIATVQDAADLIEKLMLEAPPKVV

SEQ ID NO: 31654 - DNA, 1126 bp, Zea mays subsp. mays
  misc_feature (1)..(1126): Ceres Seq. ID no. 12374788
atcacaaatctatctcgctcgctctccaggctccagctagactgtcctgctctgcttccgtgctactcactgtgcacagccagccagcttcagcagagtccggctcggctgtcggctgcgagtcctgcagcgcaacaatggacaggcctgcgcaggcgcccacgcagctgccgccggggttccggttccaccctaccgacgaggagctggtcgtgctgtacctccgccggaaggccctggctcgcccgctgccggccgccgtcatccccgtcgtccacgacgtcgccaggctcgatccgtgggacgtccctggggcgagcgaaggggagggctacttcttcagcctgcggcgagcgccggcgaccggccgcaggaggagggctgggagcgggtactggaaggccacggggaaggagaagccggtgttcctgcagtgcggcggcgttggcgccgagcagaggcagctgctcgtgggcgtcaagacggcgctcgccttccaccgccgtgagccgccgccgtcgtcgcggacaggctggatcatgcatgagtaccgcctcgccgtgccccgcggcgtggccgatcagaggaagaagaatgcgagacatggctacgttgctgaaccgggagagtgggtagtgtgccgggtcttcctgaagaacaggccgaaccgggacgccggcagcaaaaatctgcgacacggcgcctccgctcggcggcggcggcggcagcagcagccggaagacgtgagaggacagcagccgttgccattctcggcgccacagccgtcgtcctcgagctgtgttaccgacgtcaccgactgcttgtctgacgaagacgaagccgaagccagcagcggcagcacagcccgagctgcccctcaaagagaggcctaaggatatactccatatagtactccctgtccctgtagcgttttcccctctatcttgccccattgcccgtacttttcctggatcctggcatcagataatcaggtatagggcatgtctagctcaagggtgatccccagatatatcgtgccgaacagatttggcagtcctgaatcaggaacaatacggcatctgtgaagcagcatgcatttcgataatcaggtacagggcattttgcc

SEQ ID NO: 31655 - protein, 296 aa, Zea mays subsp. mays
  peptide (1)..(296): Ceres Seq. ID no. 12374789
  misc_feature (56)..(186): Pfam Name: NAM Pfam Description: No apical meristem
  misc_feature (56)..(285): NCBI GI NO: 38175531 NR Description: putative development regulation gene OsNAC4
  misc_feature (55)..(239): NCBI GI NO: 7489024 NR Description: hypothetical protein SENU5
  misc_feature (55)..(232): NCBI GI NO: 15240042 NR Description: NAM-like protein; protein id: At5g13180
  misc_feature (40)..(232): NCBI GI NO: 15219110 NR Description: NAM-like protein; protein id: At1g52880
  misc_feature (40)..(232): NCBI GI NO: 20466640 NR Description: NAM-like protein [Arabidopsis thaliana]
  misc_feature (40)..(232): NCBI GI NO: 21554226 NR Description: NAM-like protein [Arabidopsis thaliana]
  misc_feature (53)..(219): NCBI GI NO: 34902154 NR Description: Putative NAM (no apical meristem) protein
  misc_feature (40)..(223): NCBI GI NO: 15232606 NR Description: putative jasmonic acid regulatory protein
  misc_feature (55)..(185): NCBI GI NO: 15226119 NR Description: putative NAM
  misc_feature (54)..(219): NCBI GI NO: 6223651 NR Description: NAM-like protein (no apical meristem)
HKSISLALQAPARLSCSASVLLTVHSQPASAESGSAVGCESCSATMDRPAQAPTQLPPGFRFHPTDEELVVLYLRRKALARPLPAAVIPVVHDVARLDPWDVPGASEGEGYFFSLRRAPATGRRRRAGSGYWKATGKEKPVFLQCGGVGAEQRQLLVGVKTALAFHRREPPPSSRTGWIMHEYRLAVPRGVADQRKKNARHGYVAEPGEWVVCRVFLKNRPNRDAGSKNLRHGASARRRRRQQQPEDVRGQQPLPFSAPQPSSSSCVTDVTDCLSDEDEAEASSGSTARAAPQREA

SEQ ID NO: 31656 - protein, 251 aa, Zea mays subsp. mays
  peptide (1)..(251): Ceres Seq. ID no. 12374790
  misc_feature (11)..(141): Pfam Name: NAM Pfam Description: No apical meristem
  misc_feature (11)..(240): NCBI GI NO: 38175531 NR Description: putative development regulation gene OsNAC4
  misc_feature (10)..(194): NCBI GI NO: 7489024 NR Description: hypothetical protein SENU5
  misc_feature (10)..(187): NCBI GI NO: 15240042 NR Description: NAM-like protein; protein id: At5g13180
  misc_feature (1)..(187): NCBI GI NO: 15219110 NR Description: NAM-like protein; protein id: At1g52880
  misc_feature (1)..(187): NCBI GI NO: 20466640 NR Description: NAM-like protein [Arabidopsis thaliana]
  misc_feature (1)..(187): NCBI GI NO: 21554226 NR Description: NAM-like protein [Arabidopsis thaliana]
  misc_feature (8)..(174): NCBI GI NO: 34902154 NR Description: Putative NAM (no apical meristem) protein
  misc_feature (1)..(178): NCBI GI NO: 15232606 NR Description: putative jasmonic acid regulatory protein
  misc_feature (10)..(140): NCBI GI NO: 15226119 NR Description: putative NAM
  misc_feature (9)..(174): NCBI GI NO: 6223651 NR Description: NAM-like protein (no apical meristem)
MDRPAQAPTQLPPGFRFHPTDEELVVLYLRRKALARPLPAAVIPVVHDVARLDPWDVPGASEGEGYFFSLRRAPATGRRRRAGSGYWKATGKEKPVFLQCGGVGAEQRQLLVGVKTALAFHRREPPPSSRTGWIMHEYRLAVPRGVADQRKKNARHGYVAEPGEWVVCRVFLKNRPNRDAGSKNLRHGASARRRRRQQQPEDVRGQQPLPFSAPQPSSSSCVTDVTDCLSDEDEAEASSGSTARAAPQREA

SEQ ID NO: 31657 - protein, 211 aa, Zea mays subsp. mays
  peptide (1)..(211): Ceres Seq. ID no. 12374791
ITNLSRSLSRLQLDCPALLPCYSLCTASQLQQSPARLSAASPAAQQWTGLRRRPRSCRRGSGSTLPTRSWSCCTSAGRPWLARCRPPSSPSSTTSPGSIRGTSLGRAKGRATSSACGERRRPAAGGGLGAGTGRPRGRRSRCSCSAAALAPSRGSCSWASRRRSPSTAVSRRRRRGQAGSCMSTASPCPAAWPIRGRRMRDMATLLNRESG

SEQ ID NO: 31658 - DNA, 1300 bp, Zea mays subsp. mays
  misc_feature (1)..(1300): Ceres Seq. ID no. 12369263
atggtatttatttctgggaaattagtttctgttcttgacttgttgtaagtcctgaatgcagggagttgtttactggcaacctcccgagtcagctatggataagatcgaaaagatcatcagggaaccaatagtcagtaaatatggttctgatgatgggcttcctgagcttcgagaagcacttctcgaaaagctaagcagagagaacaagcttaccaaatcatcagtcatggtcactgctggtgcaaatcaggcttttgtgaacttggtcctcactctttgtgatgctggtgattccgttgtcatgtttgcaccgtattatttcaatgcctacatgtcattccagatgacaggtgttactgacatattagttggtggctgcgatcccaagacacttcatcctgatgttgattggttggagaaggttctgaaagaaaatgagcctatccctaaacttgtcactgttgtgaatccggggaacccctctggagcttttattccaaggcctatgcttgagagaatttcagatctgtgcaaaaatgctggtgcatggcttgtggttgacaatacctatgagtactttatgtatgatggaatggagcactactgcttagaagatgctcatattgtcaacctcttctcgttctcaaaggcttatggaatgatggggtggcgtgtaggatacattgcatttccaaatgaagctgatggcttccacgatcagctcctcaaagtgcaagacaacataccgatctgcgcctccatcatcgggcagcgcctggcgctctactcgctggaggccggccccgagtggatcaaagaacgggtgaaagacctggtgaaaaaccgagcgctgctggtggaggcgctgtccccgctcggcgaggacaacgtcaagggcggggagggcgccatctacctctgggcaaagctaccggacagctgctcggacgacttcgaggctgtcaggtggctcgcgaacaagcacggcgtcgccgtgatccccgggagcgcagcggaggacccgggtacatccgcgtctccttcggagggctcaaggaagaggacaccaggctggctgctgagaggctcaggcgcggcctgcaggagctggtgaccgatggaatggtaaagtgacggctccatgggtgtaagtaaaagctccagttttccaacggtgtaattccgccgtgattaattcgggagaagaaaaggaacttgttttcaagaatgcactgcgttgctcggacgagagacgggacggaataaaatgcgtctggtctgcagagtcacctatgttatg

SEQ ID NO: 31659 - protein, 352 aa, Zea mays subsp. mays
  peptide (1)..(352): Ceres Seq. ID no. 12369264
  misc_feature (44)..(324): Pfam Name: Pfam Description:  Aminotransferase class I and II
  misc_feature (2)..(324): NCBI GI NO: 34906130 NR Description: putative aspartate transaminase
  misc_feature (1)..(324): NCBI GI NO: 15220119 NR Description: putative aspartate aminotransferase
  misc_feature (2)..(318): NCBI GI NO: 17228534 NR Description: probable aspartate aminotransferase
  misc_feature (2)..(337): NCBI GI NO: 23123920 NR Description: hypothetical protein [Nostoc punctiforme]
  misc_feature (2)..(318): NCBI GI NO: 16331997 NR Description: aspartate aminotransferase
  misc_feature (2)..(317): NCBI GI NO: 33863300 NR Description: Aminotransferases class-I
  misc_feature (2)..(324): NCBI GI NO: 39995195 NR Description: aminotransferase, classes I and II
  misc_feature (8)..(324): NCBI GI NO: 21228470 NR Description: Aspartate aminotransferase
  misc_feature (2)..(324): NCBI GI NO: 23054173 NR Description: hypothetical protein [Geobacter metallireducens]
  misc_feature (10)..(324): NCBI GI NO: 23050383 NR Description: hypothetical protein [Methanosarcina barkeri]
MQGVVYWQPPESAMDKIEKIIREPIVSKYGSDDGLPELREALLEKLSRENKLTKSSVMVTAGANQAFVNLVLTLCDAGDSVVMFAPYYFNAYMSFQMTGVTDILVGGCDPKTLHPDVDWLEKVLKENEPIPKLVTVVNPGNPSGAFIPRPMLERISDLCKNAGAWLVVDNTYEYFMYDGMEHYCLEDAHIVNLFSFSKAYGMMGWRVGYIAFPNEADGFHDQLLKVQDNIPICASIIGQRLALYSLEAGPEWIKERVKDLVKNRALLVEALSPLGEDNVKGGEGAIYLWAKLPDSCSDDFEAVRWLANKHGVAVIPGSAAEDPGTSASPSEGSRKRTPGWLLRGSGAACRSW

SEQ ID NO: 31660 - protein, 339 aa, Zea mays subsp. mays
  peptide (1)..(339): Ceres Seq. ID no. 12369265
  misc_feature (31)..(311): Pfam Name: Pfam Description:  Aminotransferase class I and II
  misc_feature (1)..(311): NCBI GI NO: 34906130 NR Description: putative aspartate transaminase
  misc_feature (1)..(311): NCBI GI NO: 15220119 NR Description: putative aspartate aminotransferase
  misc_feature (1)..(305): NCBI GI NO: 17228534 NR Description: probable aspartate aminotransferase
  misc_feature (1)..(324): NCBI GI NO: 23123920 NR Description: hypothetical protein [Nostoc punctiforme]
  misc_feature (1)..(305): NCBI GI NO: 16331997 NR Description: aspartate aminotransferase
  misc_feature (1)..(304): NCBI GI NO: 33863300 NR Description: Aminotransferases class-I
  misc_feature (1)..(311): NCBI GI NO: 39995195 NR Description: aminotransferase, classes I and II
  misc_feature (1)..(311): NCBI GI NO: 21228470 NR Description: Aspartate aminotransferase
  misc_feature (1)..(311): NCBI GI NO: 23054173 NR Description: hypothetical protein [Geobacter metallireducens]
  misc_feature (1)..(311): NCBI GI NO: 23050383 NR Description: hypothetical protein [Methanosarcina barkeri]
MDKIEKIIREPIVSKYGSDDGLPELREALLEKLSRENKLTKSSVMVTAGANQAFVNLVLTLCDAGDSVVMFAPYYFNAYMSFQMTGVTDILVGGCDPKTLHPDVDWLEKVLKENEPIPKLVTVVNPGNPSGAFIPRPMLERISDLCKNAGAWLVVDNTYEYFMYDGMEHYCLEDAHIVNLFSFSKAYGMMGWRVGYIAFPNEADGFHDQLLKVQDNIPICASIIGQRLALYSLEAGPEWIKERVKDLVKNRALLVEALSPLGEDNVKGGEGAIYLWAKLPDSCSDDFEAVRWLANKHGVAVIPGSAAEDPGTSASPSEGSRKRTPGWLLRGSGAACRSW

SEQ ID NO: 31661 - protein, 295 aa, Zea mays subsp. mays
  peptide (1)..(295): Ceres Seq. ID no. 12369266
  misc_feature (1)..(267): Pfam Name: Pfam Description:  Aminotransferase class I and II
  misc_feature (1)..(267): NCBI GI NO: 34906130 NR Description: putative aspartate transaminase
  misc_feature (1)..(267): NCBI GI NO: 15220119 NR Description: putative aspartate aminotransferase
  misc_feature (1)..(261): NCBI GI NO: 17228534 NR Description: probable aspartate aminotransferase
  misc_feature (1)..(280): NCBI GI NO: 23123920 NR Description: hypothetical protein [Nostoc punctiforme]
  misc_feature (1)..(261): NCBI GI NO: 16331997 NR Description: aspartate aminotransferase
  misc_feature (1)..(260): NCBI GI NO: 33863300 NR Description: Aminotransferases class-I
  misc_feature (1)..(267): NCBI GI NO: 39995195 NR Description: aminotransferase, classes I and II
  misc_feature (1)..(267): NCBI GI NO: 21228470 NR Description: Aspartate aminotransferase
  misc_feature (1)..(267): NCBI GI NO: 23054173 NR Description: hypothetical protein [Geobacter metallireducens]
  misc_feature (1)..(267): NCBI GI NO: 23050383 NR Description: hypothetical protein [Methanosarcina barkeri]
MVTAGANQAFVNLVLTLCDAGDSVVMFAPYYFNAYMSFQMTGVTDILVGGCDPKTLHPDVDWLEKVLKENEPIPKLVTVVNPGNPSGAFIPRPMLERISDLCKNAGAWLVVDNTYEYFMYDGMEHYCLEDAHIVNLFSFSKAYGMMGWRVGYIAFPNEADGFHDQLLKVQDNIPICASIIGQRLALYSLEAGPEWIKERVKDLVKNRALLVEALSPLGEDNVKGGEGAIYLWAKLPDSCSDDFEAVRWLANKHGVAVIPGSAAEDPGTSASPSEGSRKRTPGWLLRGSGAACRSW

SEQ ID NO: 31662 - DNA, 1276 bp, Zea mays subsp. mays
  misc_feature (1)..(1276): Ceres Seq. ID no. 12367734
ccctctactagtcattctcctctctctctctctcacacacacacacggccaaattccgctctctgctttgtttacacaggcgacgcaagccacgcagcgcgccgccaccgcgtctgcactccgcccccgcgaagcttccggggggccctcttccttcctccgccccagccctcgagtcggtctccaccggcggcggcggcaggcttccgcgccggcgccggactgggtcggcccggccgcgaggtgcaccaggtatcactagcaggtccctgacaaggagggcttactatcctgtggttggaagtagcaactcaagcgttgatgccgttccaactatccgtggatcatctggcgcagcaatatttgctaatggtggctatgctcttaatgctgatgctggaactgtttctatctaccctaatccagctcctgctacttcatctggctctataaccatgcccatgcccatgctccatcagatggtcattcagagccatccacctgctacctctgcagcaacctctacatccatgtggatcgctcaaccactacctgccagaactgctgcggcttctagacatgcaagacgcgtatcagcagggcttgccaacaatggaaggtacagaagggctaggagctcttactacagccttcatccactgatgatggtagaggcagagttggtcttttacgaatcaagagcagcagccgctgacccccacagggacatgagactggacatcgacaacatgagctacgaggacctgttggctttgggagaatctatgggcaatgtcaacacaggcttggccgatgagaaaatttcgaagtgcgtgaaagaagtggtctgctgcagttccgaccagacgcaaaccgatcaagatgaccaggatgacggaagctgcgtcatctgcctggagggttacagagacaaggatatgctggggatactgaaatgcaggcacgacttccacgccggctgcatcaagaagtggctgcagacgaagaactcgtgcccggtgtgcaaagccgccgccgcctaggacgacaccagaggagcgagcaactattttgtgctcctcctcgatctattcatttttttaggctcaggtcgaattatatatgtcgttccattcttttgattccagccagtcgtgtaaataaatgccgtgtgttggttattttagttatcacttgggttacattagcccaaattctcctgttgcattgtaaacaatccagtggtgaaggcaattgatcaagtggttgcaagcgc

SEQ ID NO: 31663 - protein, 195 aa, Zea mays subsp. mays
  peptide (1)..(195): Ceres Seq. ID no. 12367735
  misc_feature (150)..(190): Pfam Name: RING finger Pfam Description: Zinc finger, C3HC4 type
  misc_feature (1)..(195): NCBI GI NO: 34896014 NR Description: ESTs AU075348
  misc_feature (31)..(195): NCBI GI NO: 1086225 NR Description: RING-finger protein - Lotus japonicus
  misc_feature (39)..(195): NCBI GI NO: 4240031 NR Description: DNA binding zinc finger protein (Pspzf)
  misc_feature (1)..(195): NCBI GI NO: 1076498 NR Description: RING finger protein Pzf - soybean (fragment)
  misc_feature (64)..(195): NCBI GI NO: 30687050 NR Description: zinc finger
  misc_feature (1)..(194): NCBI GI NO: 15226553 NR Description: putative RING zinc finger protein
  misc_feature (55)..(194): NCBI GI NO: 15219544 NR Description: putative RING zinc finger protein
  misc_feature (1)..(194): NCBI GI NO: 10129643 NR Description: Pspzf zinc finger protein-like
  misc_feature (1)..(194): NCBI GI NO: 20466428 NR Description: Pspzf zinc finger protein-like
  misc_feature (1)..(194): NCBI GI NO: 22326712 NR Description: Pspzf zinc finger protein - like
MPMPMLHQMVIQSHPPATSAATSTSMWIAQPLPARTAAASRHARRVSAGLANNGRYRRARSSYYSLHPLMMVEAELVFYESRAAAADPHRDMRLDIDNMSYEDLLALGESMGNVNTGLADEKISKCVKEVVCCSSDQTQTDQDDQDDGSCVICLEGYRDKDMLGILKCRHDFHAGCIKKWLQTKNSCPVCKAAAA

SEQ ID NO: 31664 - protein, 193 aa, Zea mays subsp. mays
  peptide (1)..(193): Ceres Seq. ID no. 12367736
  misc_feature (148)..(188): Pfam Name: RING finger Pfam Description: Zinc finger, C3HC4 type
  misc_feature (1)..(193): NCBI GI NO: 34896014 NR Description: ESTs AU075348
  misc_feature (29)..(193): NCBI GI NO: 1086225 NR Description: RING-finger protein - Lotus japonicus
  misc_feature (37)..(193): NCBI GI NO: 4240031 NR Description: DNA binding zinc finger protein (Pspzf)
  misc_feature (1)..(193): NCBI GI NO: 1076498 NR Description: RING finger protein Pzf - soybean (fragment)
  misc_feature (62)..(193): NCBI GI NO: 30687050 NR Description: zinc finger
  misc_feature (1)..(192): NCBI GI NO: 15226553 NR Description: putative RING zinc finger protein
  misc_feature (53)..(192): NCBI GI NO: 15219544 NR Description: putative RING zinc finger protein
  misc_feature (1)..(192): NCBI GI NO: 10129643 NR Description: Pspzf zinc finger protein-like
  misc_feature (1)..(192): NCBI GI NO: 20466428 NR Description: Pspzf zinc finger protein-like
  misc_feature (1)..(192): NCBI GI NO: 22326712 NR Description: Pspzf zinc finger protein - like
MPMLHQMVIQSHPPATSAATSTSMWIAQPLPARTAAASRHARRVSAGLANNGRYRRARSSYYSLHPLMMVEAELVFYESRAAAADPHRDMRLDIDNMSYEDLLALGESMGNVNTGLADEKISKCVKEVVCCSSDQTQTDQDDQDDGSCVICLEGYRDKDMLGILKCRHDFHAGCIKKWLQTKNSCPVCKAAAA

SEQ ID NO: 31665 - protein, 191 aa, Zea mays subsp. mays
  peptide (1)..(191): Ceres Seq. ID no. 12367737
  misc_feature (146)..(186): Pfam Name: RING finger Pfam Description: Zinc finger, C3HC4 type
  misc_feature (1)..(191): NCBI GI NO: 34896014 NR Description: ESTs AU075348
  misc_feature (27)..(191): NCBI GI NO: 1086225 NR Description: RING-finger protein - Lotus japonicus
  misc_feature (35)..(191): NCBI GI NO: 4240031 NR Description: DNA binding zinc finger protein (Pspzf)
  misc_feature (1)..(191): NCBI GI NO: 1076498 NR Description: RING finger protein Pzf - soybean (fragment)
  misc_feature (60)..(191): NCBI GI NO: 30687050 NR Description: zinc finger
  misc_feature (1)..(190): NCBI GI NO: 15226553 NR Description: putative RING zinc finger protein
  misc_feature (51)..(190): NCBI GI NO: 15219544 NR Description: putative RING zinc finger protein
  misc_feature (1)..(190): NCBI GI NO: 10129643 NR Description: Pspzf zinc finger protein-like
  misc_feature (1)..(190): NCBI GI NO: 20466428 NR Description: Pspzf zinc finger protein-like
  misc_feature (1)..(190): NCBI GI NO: 22326712 NR Description: Pspzf zinc finger protein - like
MLHQMVIQSHPPATSAATSTSMWIAQPLPARTAAASRHARRVSAGLANNGRYRRARSSYYSLHPLMMVEAELVFYESRAAAADPHRDMRLDIDNMSYEDLLALGESMGNVNTGLADEKISKCVKEVVCCSSDQTQTDQDDQDDGSCVICLEGYRDKDMLGILKCRHDFHAGCIKKWLQTKNSCPVCKAAAA

SEQ ID NO: 31666 - DNA, 1151 bp, Zea mays subsp. mays
  misc_feature (1)..(1151): Ceres Seq. ID no. 12346366
gaaagccggagcgtctctgccggtgcccaacgtgcaggcactagctcagacttggcatggatcaggcgagccggtgcctttccggtacgtcaggacagaagagatcgtcgccggcgaagtcgtcgccggctgcgccatcccggtcgtggatctcagcaggttgcttgacccgcggtcgtccgaagaggagctcgcaaacctcggctctgcctgtcagcactggggtttctttcagcttatcaaccatggggtgccggacgaggtgatccaggacacgaagaaagacatggtggagttcttcaagctccctgtggaagccaagaaggtgcacgcgcaggtaccgggcggcatcgagggctacggccaggccttcgtcttctccgagacccagaagctggattgggcggacatgatctacctcatgattagccccaaggagtcgcgggacctgaggttctggcccacccggcctccctccttcagggactctatcgaaaggtactcggccgagacggcgaaggtgacggcgtgcctgctgcggttcatggccaaggacttgggcgtggagccggagcgcctcctggaggagttccggggattgccgcagagcatgcggacgacctactacccgccgtgcaggctggccgccgatgtgcttggcctgtcgccgcacaccgacgccaccggcctgacgctgctgctccacgtcaacgacgtgcagggcctgcagatcaggagggacggcaagtggctcgccgttgaccctctggacggtgctttagtcgtcagcatcggcgacatactggagattctaagcaatgggaggtacagaagcattgagcacagagccattgtacacccggacaaagaacgcatctcggcggcgatgttccatcagacatgccccaacacgacggtcggccctctgcaggagctcgtggaaagagacagtggcggggcacggtacagatccatggactacatggatttcatgaagggcttcttcgcggccaagctcgatgggcgaaggagccacatggacgctttgaggatatactagtccaaatgctggatgaatcatgttcctgtcttcataatgaattggacaactagtagtaaaatatctaaggctatccccaatagttcctctc

SEQ ID NO: 31667 - protein, 352 aa, Zea mays subsp. mays
  peptide (1)..(352): Ceres Seq. ID no. 12346367
  misc_feature (201)..(299): Pfam Name: II Pfam Description: 2OG-Fe
  misc_feature (5)..(351): NCBI GI NO: 37536792 NR Description: putative dioxygenase
  misc_feature (1)..(351): NCBI GI NO: 37536796 NR Description: putative dioxygenase
  misc_feature (1)..(351): NCBI GI NO: 37536804 NR Description: putative ethylene-forming enzyme
  misc_feature (5)..(351): NCBI GI NO: 37536802 NR Description: putative ethylene-forming enzyme
  misc_feature (4)..(351): NCBI GI NO: 15219988 NR Description: SRG1-like protein; protein id: At1g17020
  misc_feature (4)..(351): NCBI GI NO: 15235017 NR Description: SRG1-like protein; protein id: At4g25310.1
  misc_feature (23)..(351): NCBI GI NO: 40736992 NR Description: putative oxidoreductase
  misc_feature (11)..(323): NCBI GI NO: 34898470 NR Description: ESTs D47168
  misc_feature (4)..(351): NCBI GI NO: 33115140 NR Description: iron/ascorbate-dependent oxidoreductase
  misc_feature (6)..(331): NCBI GI NO: 31978953 NR Description: flavonol synthase [Petroselinum crispum]
KAGASLPVPNVQALAQTWHGSGEPVPFRYVRTEEIVAGEVVAGCAIPVVDLSRLLDPRSSEEELANLGSACQHWGFFQLINHGVPDEVIQDTKKDMVEFFKLPVEAKKVHAQVPGGIEGYGQAFVFSETQKLDWADMIYLMISPKESRDLRFWPTRPPSFRDSIERYSAETAKVTACLLRFMAKDLGVEPERLLEEFRGLPQSMRTTYYPPCRLAADVLGLSPHTDATGLTLLLHVNDVQGLQIRRDGKWLAVDPLDGALVVSIGDILEILSNGRYRSIEHRAIVHPDKERISAAMFHQTCPNTTVGPLQELVERDSGGARYRSMDYMDFMKGFFAAKLDGRRSHMDALRIY

SEQ ID NO: 31668 - protein, 257 aa, Zea mays subsp. mays
  peptide (1)..(257): Ceres Seq. ID no. 12346368
  misc_feature (106)..(204): Pfam Name: II Pfam Description: 2OG-Fe
  misc_feature (1)..(256): NCBI GI NO: 37536792 NR Description: putative dioxygenase
  misc_feature (1)..(256): NCBI GI NO: 37536796 NR Description: putative dioxygenase
  misc_feature (1)..(256): NCBI GI NO: 37536804 NR Description: putative ethylene-forming enzyme
  misc_feature (1)..(256): NCBI GI NO: 37536802 NR Description: putative ethylene-forming enzyme
  misc_feature (1)..(256): NCBI GI NO: 15219988 NR Description: SRG1-like protein; protein id: At1g17020
  misc_feature (1)..(256): NCBI GI NO: 15235017 NR Description: SRG1-like protein; protein id: At4g25310.1
  misc_feature (1)..(256): NCBI GI NO: 40736992 NR Description: putative oxidoreductase
  misc_feature (1)..(228): NCBI GI NO: 34898470 NR Description: ESTs D47168
  misc_feature (1)..(256): NCBI GI NO: 33115140 NR Description: iron/ascorbate-dependent oxidoreductase
  misc_feature (1)..(236): NCBI GI NO: 31978953 NR Description: flavonol synthase [Petroselinum crispum]
MVEFFKLPVEAKKVHAQVPGGIEGYGQAFVFSETQKLDWADMIYLMISPKESRDLRFWPTRPPSFRDSIERYSAETAKVTACLLRFMAKDLGVEPERLLEEFRGLPQSMRTTYYPPCRLAADVLGLSPHTDATGLTLLLHVNDVQGLQIRRDGKWLAVDPLDGALVVSIGDILEILSNGRYRSIEHRAIVHPDKERISAAMFHQTCPNTTVGPLQELVERDSGGARYRSMDYMDFMKGFFAAKLDGRRSHMDALRIY

SEQ ID NO: 31669 - protein, 216 aa, Zea mays subsp. mays
  peptide (1)..(216): Ceres Seq. ID no. 12346369
  misc_feature (65)..(163): Pfam Name: II Pfam Description: 2OG-Fe
  misc_feature (1)..(215): NCBI GI NO: 37536792 NR Description: putative dioxygenase
  misc_feature (1)..(215): NCBI GI NO: 37536796 NR Description: putative dioxygenase
  misc_feature (1)..(215): NCBI GI NO: 37536804 NR Description: putative ethylene-forming enzyme
  misc_feature (1)..(215): NCBI GI NO: 37536802 NR Description: putative ethylene-forming enzyme
  misc_feature (1)..(215): NCBI GI NO: 15219988 NR Description: SRG1-like protein; protein id: At1g17020
  misc_feature (1)..(215): NCBI GI NO: 15235017 NR Description: SRG1-like protein; protein id: At4g25310.1
  misc_feature (1)..(215): NCBI GI NO: 40736992 NR Description: putative oxidoreductase
  misc_feature (1)..(187): NCBI GI NO: 34898470 NR Description: ESTs D47168
  misc_feature (1)..(215): NCBI GI NO: 33115140 NR Description: iron/ascorbate-dependent oxidoreductase
  misc_feature (1)..(195): NCBI GI NO: 31978953 NR Description: flavonol synthase [Petroselinum crispum]
MIYLMISPKESRDLRFWPTRPPSFRDSIERYSAETAKVTACLLRFMAKDLGVEPERLLEEFRGLPQSMRTTYYPPCRLAADVLGLSPHTDATGLTLLLHVNDVQGLQIRRDGKWLAVDPLDGALVVSIGDILEILSNGRYRSIEHRAIVHPDKERISAAMFHQTCPNTTVGPLQELVERDSGGARYRSMDYMDFMKGFFAAKLDGRRSHMDALRIY

SEQ ID NO: 31670 - DNA, 955 bp, Zea mays subsp. mays
  misc_feature (1)..(955): Ceres Seq. ID no. 12350622
agagtgttcctccggttagtagctgaccggccggcgacgtacgcactgcgctagcaatggcgcctccacggcggccgagcatggggcggcagaaaatcgagatccggcgcatagagagcgacgaggcacggcaggtgtgcttctccaagcggcgcgcggggctgttcaagaaggccagcgagctctccatcctatgcggcgccgacgtggccgccgtcgtcttctcccccgccggcaaggccttctcgttcggccacccctcggtggagtccgtcgtcgaccgcttcctcgcctcgtccaccccctcgcctgccggtgccggtgccggtgccggccactcctccgccggcggcggcgaggaccgcgcggtctccgagctgaaccgccagcacggcgacctgcgcgcgcagctggacgcggagaaggcgaggcaggagcgcgcggacgaggccatccggaaggagcgcgaggccgggagccccgccatggcgtggatcgacgcggacctgggcgccatgggccacgacgacctggtcgcgttctgggccgcgctggccggcgtgcaggccgctgtggccgccagcgccgatcagctgctgcgtgacgcgctgctcgtcgggcgcaggggccgacagcagcagcagccagcggcccagcttggcggtggtggtgtggccttcgacgtcggcgcgtttggcatcggcgtgcaggtgccgccgcctccaggattcgctggcgtcgacctgcaggggttcgggggacaggctgctgccatcctcggcgccggcggcccctcgtgaggtggtggaatggaatgcatgtgcgcgcagttcgcttgagttgttgcattcgcatggaggacgcgtcgtgcctatgttaggtttggttgataacatcgcaaatttgcaaaacagtgttttaaattaaaatttgatgtgtgcttcctgcttctctc

SEQ ID NO: 31671 - protein, 247 aa, Zea mays subsp. mays
  peptide (1)..(247): Ceres Seq. ID no. 12350623
  misc_feature (17)..(67): Pfam Name: DNA-binding and dimerisationdomain Pfam Description: SRF-type transcription factor
  misc_feature (1)..(190): NCBI GI NO: 34906076 NR Description: P0459B04.16
  misc_feature (1)..(146): NCBI GI NO: 30682571 NR Description: MADS-box protein [Arabidopsis thaliana]
  misc_feature (5)..(146): NCBI GI NO: 25412255 NR Description: probable MADS-box protein
  misc_feature (6)..(182): NCBI GI NO: 15239333 NR Description: MADS-box protein; protein id: At5g60440.1
  misc_feature (6)..(210): NCBI GI NO: 15234456 NR Description: MADS-box protein; protein id: At4g36590
  misc_feature (6)..(85): NCBI GI NO: 32402436 NR Description: MADS-box protein AGL62 [Arabidopsis thaliana]
  misc_feature (6)..(213): NCBI GI NO: 15218647 NR Description: MADS-box protein; protein id: At1g65360.1
  misc_feature (9)..(133): NCBI GI NO: 15226309 NR Description: MADS-box protein; protein id: At2g34440.1
  misc_feature (9)..(160): NCBI GI NO: 34015383 NR Description: putative transcription factor
  misc_feature (6)..(225): NCBI GI NO: 2505875 NR Description: MADS-box protein [Arabidopsis thaliana]
MAPPRRPSMGRQKIEIRRIESDEARQVCFSKRRAGLFKKASELSILCGADVAAVVFSPAGKAFSFGHPSVESVVDRFLASSTPSPAGAGAGAGHSSAGGGEDRAVSELNRQHGDLRAQLDAEKARQERADEAIRKEREAGSPAMAWIDADLGAMGHDDLVAFWAALAGVQAAVAASADQLLRDALLVGRRGRQQQQPAAQLGGGGVAFDVGAFGIGVQVPPPPGFAGVDLQGFGGQAAAILGAGGPS

SEQ ID NO: 31672 - protein, 239 aa, Zea mays subsp. mays
  peptide (1)..(239): Ceres Seq. ID no. 12350624
  misc_feature (9)..(59): Pfam Name: DNA-binding and dimerisationdomain Pfam Description: SRF-type transcription factor
  misc_feature (1)..(182): NCBI GI NO: 34906076 NR Description: P0459B04.16
  misc_feature (1)..(138): NCBI GI NO: 30682571 NR Description: MADS-box protein [Arabidopsis thaliana]
  misc_feature (1)..(138): NCBI GI NO: 25412255 NR Description: probable MADS-box protein
  misc_feature (1)..(174): NCBI GI NO: 15239333 NR Description: MADS-box protein; protein id: At5g60440.1
  misc_feature (1)..(202): NCBI GI NO: 15234456 NR Description: MADS-box protein; protein id: At4g36590
  misc_feature (1)..(77): NCBI GI NO: 32402436 NR Description: MADS-box protein AGL62 [Arabidopsis thaliana]
  misc_feature (1)..(205): NCBI GI NO: 15218647 NR Description: MADS-box protein; protein id: At1g65360.1
  misc_feature (1)..(125): NCBI GI NO: 15226309 NR Description: MADS-box protein; protein id: At2g34440.1
  misc_feature (1)..(152): NCBI GI NO: 34015383 NR Description: putative transcription factor
  misc_feature (1)..(217): NCBI GI NO: 2505875 NR Description: MADS-box protein [Arabidopsis thaliana]
MGRQKIEIRRIESDEARQVCFSKRRAGLFKKASELSILCGADVAAVVFSPAGKAFSFGHPSVESVVDRFLASSTPSPAGAGAGAGHSSAGGGEDRAVSELNRQHGDLRAQLDAEKARQERADEAIRKEREAGSPAMAWIDADLGAMGHDDLVAFWAALAGVQAAVAASADQLLRDALLVGRRGRQQQQPAAQLGGGGVAFDVGAFGIGVQVPPPPGFAGVDLQGFGGQAAAILGAGGPS

SEQ ID NO: 31673 - protein, 136 aa, Zea mays subsp. mays
  peptide (1)..(136): Ceres Seq. ID no. 12350625
MRRRRGRRRLLPRRQGLLVRPPLGGVRRRPLPRLVHPLACRCRCRCRPLLRRRRRGPRGLRAEPPARRPARAAGRGEGEAGARGRGHPEGARGREPRHGVDRRGPGRHGPRRPGRVLGRAGRRAGRCGRQRRSAAA

SEQ ID NO: 31674 - DNA, 960 bp, Zea mays subsp. mays
  misc_feature (1)..(960): Ceres Seq. ID no. 13493320
aaaacaaaatgctgtggccgagcgaatgagaggaagatggctgctaccagcctcagctcctcgttgcccagggccactgcaaaactaacaggagtgccaagatcttcgtcgtactacacccagctgatcttttgctcgaggcatcctttccagaaggcggcggcagctgcagctttccagaagctcccacccgagctcctccggctaagctacccggcgaggaataataagcatgcaagaaccagctggcggcgggccacggacaacgaccaagcggcgccggccgcggcacaaggaactaccagcacccctcctctcccaggctctcccgttccgagcgccgagagatccccggtgacgcccggcaacggccagccgcagcagccggtcgccgacgccaacggcagcgcgccgagcgagccgccgaagcgggcgccgctgacggcgcgggagcggctgcgggcggcgcgcgtgctggggaagtacgcagagccgtcggtgaaagggtcttcgtcgaaaccggccaaaccggagttcgggagcggtgtgctggacgcgctgcgcgaggcggacgcgaagaaggccgggggcgggggcgggggcgggcggcgtgggtcgcgcctacccgaggcgccgggcaacctgttcgacgacagcaagcgcgggatgcccaaggacgggtggacgttcgagctgccgttcggggtggacgtcttcctcgtcctcgtctccttcacgctcatcaccaccatcatgttcggcaccgccttcctcgtgtggaagctcggcgccatacacttcaacgagtactagcctttagactgtctctacttgattggaggataaagggcgattatgcagtgctagacgagagaattgtgtgtattcgtaatgtactgtattgaccacagacactggtctgccgaagattttcgagaaaacatagaaatgtgtgattgc

SEQ ID NO: 31675 - protein, 270 aa, Zea mays subsp. mays
  peptide (1)..(270): Ceres Seq. ID no. 13493321
  misc_feature (128)..(269): NCBI GI NO: 15228794 NR Description: expressed protein [Arabidopsis thaliana]
KTKCCGRANERKMAATSLSSSLPRATAKLTGVPRSSSYYTQLIFCSRHPFQKAAAAAAFQKLPPELLRLSYPARNNKHARTSWRRATDNDQAAPAAAQGTTSTPPLPGSPVPSAERSPVTPGNGQPQQPVADANGSAPSEPPKRAPLTARERLRAARVLGKYAEPSVKGSSSKPAKPEFGSGVLDALREADAKKAGGGGGGGRRGSRLPEAPGNLFDDSKRGMPKDGWTFELPFGVDVFLVLVSFTLITTIMFGTAFLVWKLGAIHFNEY

SEQ ID NO: 31676 - protein, 258 aa, Zea mays subsp. mays
  peptide (1)..(258): Ceres Seq. ID no. 13493322
  misc_feature (116)..(257): NCBI GI NO: 15228794 NR Description: expressed protein [Arabidopsis thaliana]
MAATSLSSSLPRATAKLTGVPRSSSYYTQLIFCSRHPFQKAAAAAAFQKLPPELLRLSYPARNNKHARTSWRRATDNDQAAPAAAQGTTSTPPLPGSPVPSAERSPVTPGNGQPQQPVADANGSAPSEPPKRAPLTARERLRAARVLGKYAEPSVKGSSSKPAKPEFGSGVLDALREADAKKAGGGGGGGRRGSRLPEAPGNLFDDSKRGMPKDGWTFELPFGVDVFLVLVSFTLITTIMFGTAFLVWKLGAIHFNEY

SEQ ID NO: 31677 - DNA, 989 bp, Zea mays subsp. mays
  misc_feature (1)..(989): Ceres Seq. ID no. 14312601
acgagtacgagctcgtcgtcaccacctactcaggtctgtaccgctaccgcgtgggcgacgtgctgcgcgtggccgggttcaagaaccaggcgcccatgttcaagttcctgcggcggaagaacgtggtgctgagcatcgactccgacaagaccgacgaggcggagcttcacgcggcggtgagcggcgcggtgcagcacctggcgccgttcggcgcgtcgctggtggagtacacgagctacgcggacgcggggaccatcccgggccactacgtgctgttctgggagctgcggctccgcgcgggggacgtgccggtgccggtgccggcgtcggtgttcgaggactgctgcctggccgtggaggaggccctgaacagcgtgtaccggcagggccgcgccgccgaccgctccatcgggccgctggagatccgggtggtgtcggacggcacgttcgacaggctcatggactacgcgctcgcccgcggcgcctccatcaaccagtacaaggtgccgcggtgcgtgcacccgggccccgtggtggagctgctggacgggcgggtgcaggccagctacgtgagccccaagtgccccaagtggagccccggcggcggtaagcagtggagcagcgacgccgccgccaagaagcccgccgccgccgccggcagcaataatggaggaggggcggtcgtcgcctgatcgtcgtccgtcgagatatactagtgaactttaattaattagctggctaattccggaaccgtcgttgttgttcgtgggagagagagactcgatcttgtggtcgatcgattgtgatagctgatctatccgtgtgcatgtatgcatgcatggctacgatcgaatgattatctagctgggtaatcatcgggtgtgtggtagcttattaagtattgtacgcgtcgtgatatcatgtgagctagcttttgtttctttttattttcttttatgtggttttgtaataaagtttgagtacgtagt

SEQ ID NO: 31678 - protein, 229 aa, Zea mays subsp. mays
  peptide (1)..(229): Ceres Seq. ID no. 14312602
  misc_feature (1)..(180): Pfam Name: Pfam Description:  GH3 auxin-responsive promoter
  misc_feature (1)..(215): NCBI GI NO: 34910142 NR Description: putative auxin-responsive GH3
  misc_feature (1)..(208): NCBI GI NO: 15239653 NR Description: auxin-responsive-related protein
  misc_feature (1)..(208): NCBI GI NO: 17978966 NR Description: AT5g54510/F24B18_13 [Arabidopsis thaliana]
  misc_feature (1)..(208): NCBI GI NO: 15237038 NR Description: GH3 like protein [Arabidopsis thaliana]
  misc_feature (1)..(199): NCBI GI NO: 34909816 NR Description: putative auxin-responsive GH3 protein
  misc_feature (1)..(199): NCBI GI NO: 4887010 NR Description: Nt-gh3 deduced protein [Nicotiana tabacum]
  misc_feature (1)..(199): NCBI GI NO: 15235538 NR Description: auxin-responsive GH3 - like protein
  misc_feature (1)..(199): NCBI GI NO: 25345303 NR Description: GH3 homolog
  misc_feature (1)..(199): NCBI GI NO: 15227787 NR Description: expressed protein [Arabidopsis thaliana]
  misc_feature (1)..(199): NCBI GI NO: 15218026 NR Description: auxin-regulated protein GH3 -related
EYELVVTTYSGLYRYRVGDVLRVAGFKNQAPMFKFLRRKNVVLSIDSDKTDEAELHAAVSGAVQHLAPFGASLVEYTSYADAGTIPGHYVLFWELRLRAGDVPVPVPASVFEDCCLAVEEALNSVYRQGRAADRSIGPLEIRVVSDGTFDRLMDYALARGASINQYKVPRCVHPGPVVELLDGRVQASYVSPKCPKWSPGGGKQWSSDAAAKKPAAAAGSNNGGGAVVA

SEQ ID NO: 31679 - protein, 202 aa, Zea mays subsp. mays
  peptide (1)..(202): Ceres Seq. ID no. 14312603
RVRARRHHLLRSVPLPRGRRAARGRVQEPGAHVQVPAAEERGAEHRLRQDRRGGASRGGERRGAAPGAVRRVAGGVHELRGRGDHPGPLRAVLGAAAPRGGRAGAGAGVGVRGLLPGRGGGPEQRVPAGPRRRPLHRAAGDPGGVGRHVRQAHGLRARPRRLHQPVQGAAVRAPGPRGGAAGRAGAGQLREPQVPQVEPRRR

SEQ ID NO: 31680 - protein, 198 aa, Zea mays subsp. mays
  peptide (1)..(198): Ceres Seq. ID no. 14312604
  misc_feature (1)..(149): Pfam Name: Pfam Description:  GH3 auxin-responsive promoter
  misc_feature (1)..(184): NCBI GI NO: 34910142 NR Description: putative auxin-responsive GH3
  misc_feature (1)..(177): NCBI GI NO: 15239653 NR Description: auxin-responsive-related protein
  misc_feature (1)..(177): NCBI GI NO: 17978966 NR Description: AT5g54510/F24B18_13 [Arabidopsis thaliana]
  misc_feature (1)..(177): NCBI GI NO: 15237038 NR Description: GH3 like protein [Arabidopsis thaliana]
  misc_feature (1)..(168): NCBI GI NO: 34909816 NR Description: putative auxin-responsive GH3 protein
  misc_feature (1)..(168): NCBI GI NO: 4887010 NR Description: Nt-gh3 deduced protein [Nicotiana tabacum]
  misc_feature (1)..(168): NCBI GI NO: 15235538 NR Description: auxin-responsive GH3 - like protein
  misc_feature (1)..(168): NCBI GI NO: 25345303 NR Description: GH3 homolog
  misc_feature (1)..(168): NCBI GI NO: 15227787 NR Description: expressed protein [Arabidopsis thaliana]
  misc_feature (1)..(168): NCBI GI NO: 15218026 NR Description: auxin-regulated protein GH3 -related
MFKFLRRKNVVLSIDSDKTDEAELHAAVSGAVQHLAPFGASLVEYTSYADAGTIPGHYVLFWELRLRAGDVPVPVPASVFEDCCLAVEEALNSVYRQGRAADRSIGPLEIRVVSDGTFDRLMDYALARGASINQYKVPRCVHPGPVVELLDGRVQASYVSPKCPKWSPGGGKQWSSDAAAKKPAAAAGSNNGGGAVVA

SEQ ID NO: 31681 - DNA, 484 bp, Zea mays subsp. mays
  misc_feature (1)..(484): Ceres Seq. ID no. 1552760
aatcttctccgtactcatacaactgctgtttccacgagaatgttatacaagcttgctcaggagaaaccttttactccaaagaggtattactccattgatcgtgttttccgcaatgaagctgttgaccggactcatcttgctgaattccaccagatagagggacttatctgtgattatggtttgacacttggtgatctgattggtgtattggaggatttcttctcaagtctaggcatgtccaagctgcgtttcaagcctgcctacaatccatatactgaacccagcatggaaattttcagttaccatgatggtttgaagaaatgggtggaagttggtaattcaggcatgttcaggccagagatgttgcttcccatgggactgccagaaggtgttaatgttattgcatggggtctttcacttgaaaggccaacgatgatcctttatggtatcgacaacataagggacctgtttggaccaaaggttg

SEQ ID NO: 31682 - protein, 161 aa, Zea mays subsp. mays
  peptide (1)..(161): Ceres Seq. ID no. 1552761
  misc_feature (1)..(160): NCBI GI NO: 7437805 NR Description: phenylalanine-tRNA ligase (EC 6
  misc_feature (1)..(160): NCBI GI NO: 22329256 NR Description: phenylalanyl-trna synthetase - like protein
  misc_feature (70)..(160): NCBI GI NO: 37534124 NR Description: putative phenylalanyl-tRNA synthetase alpha chain
  misc_feature (1)..(55): NCBI GI NO: 37534124 NR Description: putative phenylalanyl-tRNA synthetase alpha chain
  misc_feature (1)..(160): NCBI GI NO: 34851429 NR Description: similar to 0610012A19Rik protein
  misc_feature (1)..(160): NCBI GI NO: 26327551 NR Description: unnamed protein product [Mus musculus]
  misc_feature (1)..(160): NCBI GI NO: 7804452 NR Description: phenylalanyl tRNA synthetase beta subunit
  misc_feature (1)..(160): NCBI GI NO: 4758340 NR Description: phenylalanine-tRNA synthetase-like protein
  misc_feature (1)..(160): NCBI GI NO: 11271775 NR Description: probable phenylalanine-tRNA ligase (EC 6.1.1.20)
  misc_feature (1)..(160): NCBI GI NO: 28175596 NR Description: similar to phenylalanine-tRNA synthetase-likeprotein
NLLRTHTTAVSTRMLYKLAQEKPFTPKRYYSIDRVFRNEAVDRTHLAEFHQIEGLICDYGLTLGDLIGVLEDFFSSLGMSKLRFKPAYNPYTEPSMEIFSYHDGLKKWVEVGNSGMFRPEMLLPMGLPEGVNVIAWGLSLERPTMILYGIDNIRDLFGPKV

SEQ ID NO: 31683 - protein, 148 aa, Zea mays subsp. mays
  peptide (1)..(148): Ceres Seq. ID no. 1552762
  misc_feature (1)..(147): NCBI GI NO: 7437805 NR Description: phenylalanine-tRNA ligase (EC 6
  misc_feature (1)..(147): NCBI GI NO: 22329256 NR Description: phenylalanyl-trna synthetase - like protein
  misc_feature (57)..(147): NCBI GI NO: 37534124 NR Description: putative phenylalanyl-tRNA synthetase alpha chain
  misc_feature (1)..(42): NCBI GI NO: 37534124 NR Description: putative phenylalanyl-tRNA synthetase alpha chain
  misc_feature (1)..(147): NCBI GI NO: 34851429 NR Description: similar to 0610012A19Rik protein
  misc_feature (1)..(147): NCBI GI NO: 26327551 NR Description: unnamed protein product [Mus musculus]
  misc_feature (1)..(147): NCBI GI NO: 7804452 NR Description: phenylalanyl tRNA synthetase beta subunit
  misc_feature (1)..(147): NCBI GI NO: 4758340 NR Description: phenylalanine-tRNA synthetase-like protein
  misc_feature (1)..(147): NCBI GI NO: 11271775 NR Description: probable phenylalanine-tRNA ligase (EC 6.1.1.20)
  misc_feature (1)..(147): NCBI GI NO: 28175596 NR Description: similar to phenylalanine-tRNA synthetase-likeprotein
MLYKLAQEKPFTPKRYYSIDRVFRNEAVDRTHLAEFHQIEGLICDYGLTLGDLIGVLEDFFSSLGMSKLRFKPAYNPYTEPSMEIFSYHDGLKKWVEVGNSGMFRPEMLLPMGLPEGVNVIAWGLSLERPTMILYGIDNIRDLFGPKV

SEQ ID NO: 31684 - protein, 83 aa, Zea mays subsp. mays
  peptide (1)..(83): Ceres Seq. ID no. 1552763
  misc_feature (1)..(82): NCBI GI NO: 7437805 NR Description: phenylalanine-tRNA ligase (EC 6
  misc_feature (1)..(82): NCBI GI NO: 22329256 NR Description: phenylalanyl-trna synthetase - like protein
  misc_feature (1)..(82): NCBI GI NO: 37534124 NR Description: putative phenylalanyl-tRNA synthetase alpha chain
  misc_feature (1)..(82): NCBI GI NO: 34851429 NR Description: similar to 0610012A19Rik protein
  misc_feature (1)..(82): NCBI GI NO: 26327551 NR Description: unnamed protein product [Mus musculus]
  misc_feature (1)..(82): NCBI GI NO: 7804452 NR Description: phenylalanyl tRNA synthetase beta subunit
  misc_feature (1)..(82): NCBI GI NO: 4758340 NR Description: phenylalanine-tRNA synthetase-like protein
  misc_feature (1)..(82): NCBI GI NO: 28175596 NR Description: similar to phenylalanine-tRNA synthetase-likeprotein
  misc_feature (1)..(82): NCBI GI NO: 11271775 NR Description: probable phenylalanine-tRNA ligase (EC 6.1.1.20)
  misc_feature (1)..(82): NCBI GI NO: 30585361 NR Description: Homo sapiens phenylalanine-tRNA synthetase-like
MSKLRFKPAYNPYTEPSMEIFSYHDGLKKWVEVGNSGMFRPEMLLPMGLPEGVNVIAWGLSLERPTMILYGIDNIRDLFGPKV

SEQ ID NO: 31685 - DNA, 884 bp, Zea mays subsp. mays
  misc_feature (1)..(884): Ceres Seq. ID no. 12360748
cacaggagaatatacgacaatcggcctagtatgaattgttctgacgagagcaaaggacctccatgtacagggtgggtagagggcatggcaccagttttttctcgcactgcttggaaatgtgtatggcatctaattcagaatgatcttattcatggatggggtcttgacatgaagcttggatattgcgctcagggtgatcgaacagagaaagttggtgttattgacagtgagtatgtagttcatcaagggataccatcattaggagggccatcacttagcagcaagacacctcgaagatcattggatttgaggacccacatacgaagacaatcatcggctgagctggagaagttcaaggagaggtggaacagggctgtaagggaagatgaaggatggagggatccttttgattcttgattacttggaaagcagagtgtgacacttcataacaaaactggccagtggccacagtcacagcagtagagtttggaagcggagagcatcttctgcttcatgtcaaaaacacttgtttggttataggatgacgagacggttggttggttataggatgatgacttacatacacacacacacatcataactttatccacatgagttaaaagcgggaacattatcgtcaatacaaggagctgatggagaagttgaaactaacaaagtaacagggggtttccgaaagtgctgtaattttccgttggaaatatctgttcgggagagttgtatagtgtcatgatatacacacttgtgcagttatttgatgaggaaacttacatagcctagagcagatgtgtttcctatattattattgccttgtacaatgtaagatgaattccatgagtcagaaatagcatcaggtctctatgctt

SEQ ID NO: 31686 - protein, 138 aa, Zea mays subsp. mays
  peptide (1)..(138): Ceres Seq. ID no. 12360749
  misc_feature (1)..(132): Pfam Name: DUF707 Pfam Description: Protein of unknown function
  misc_feature (1)..(132): NCBI GI NO: 15219892 NR Description: hypothetical protein; protein id: At1g61240.1
  misc_feature (1)..(132): NCBI GI NO: 24636978 NR Description: lysine ketoglutarate reductase trans-splicingrelated 1
  misc_feature (1)..(138): NCBI GI NO: 25402652 NR Description: hypothetical protein
  misc_feature (1)..(138): NCBI GI NO: 22329488 NR Description: hypothetical protein; protein id: At1g11170
  misc_feature (1)..(136): NCBI GI NO: 34903420 NR Description: hypothetical protein~similar to Oryza sativachromosome 1
  misc_feature (1)..(136): NCBI GI NO: 15233917 NR Description: putative protein; protein id: At4g18530.1
  misc_feature (1)..(136): NCBI GI NO: 19386727 NR Description: P0678F11.16
  misc_feature (1)..(129): NCBI GI NO: 33146749 NR Description: putative lysine ketoglutarate reductase trans-splicing related 1
  misc_feature (25)..(129): NCBI GI NO: 34899756 NR Description: OJ1773_H01.1
  misc_feature (25)..(119): NCBI GI NO: 15235499 NR Description: putative protein; protein id: At4g12840.1
HRRIYDNRPSMNCSDESKGPPCTGWVEGMAPVFSRTAWKCVWHLIQNDLIHGWGLDMKLGYCAQGDRTEKVGVIDSEYVVHQGIPSLGGPSLSSKTPRRSLDLRTHIRRQSSAELEKFKERWNRAVREDEGWRDPFDS

SEQ ID NO: 31687 - protein, 128 aa, Zea mays subsp. mays
  peptide (1)..(128): Ceres Seq. ID no. 12360750
  misc_feature (1)..(122): Pfam Name: DUF707 Pfam Description: Protein of unknown function
  misc_feature (1)..(122): NCBI GI NO: 15219892 NR Description: hypothetical protein; protein id: At1g61240.1
  misc_feature (1)..(122): NCBI GI NO: 24636978 NR Description: lysine ketoglutarate reductase trans-splicingrelated 1
  misc_feature (1)..(128): NCBI GI NO: 25402652 NR Description: hypothetical protein
  misc_feature (1)..(128): NCBI GI NO: 22329488 NR Description: hypothetical protein; protein id: At1g11170
  misc_feature (1)..(126): NCBI GI NO: 34903420 NR Description: hypothetical protein~similar to Oryza sativachromosome 1
  misc_feature (1)..(126): NCBI GI NO: 15233917 NR Description: putative protein; protein id: At4g18530.1
  misc_feature (1)..(126): NCBI GI NO: 19386727 NR Description: P0678F11.16
  misc_feature (1)..(119): NCBI GI NO: 33146749 NR Description: putative lysine ketoglutarate reductase trans-splicing related 1
  misc_feature (15)..(119): NCBI GI NO: 34899756 NR Description: OJ1773_H01.1
  misc_feature (15)..(109): NCBI GI NO: 15235499 NR Description: putative protein; protein id: At4g12840.1
MNCSDESKGPPCTGWVEGMAPVFSRTAWKCVWHLIQNDLIHGWGLDMKLGYCAQGDRTEKVGVIDSEYVVHQGIPSLGGPSLSSKTPRRSLDLRTHIRRQSSAELEKFKERWNRAVREDEGWRDPFDS

SEQ ID NO: 31688 - protein, 110 aa, Zea mays subsp. mays
  peptide (1)..(110): Ceres Seq. ID no. 12360751
  misc_feature (1)..(104): Pfam Name: DUF707 Pfam Description: Protein of unknown function
  misc_feature (1)..(104): NCBI GI NO: 15219892 NR Description: hypothetical protein; protein id: At1g61240.1
  misc_feature (1)..(104): NCBI GI NO: 24636978 NR Description: lysine ketoglutarate reductase trans-splicingrelated 1
  misc_feature (1)..(110): NCBI GI NO: 25402652 NR Description: hypothetical protein
  misc_feature (1)..(110): NCBI GI NO: 22329488 NR Description: hypothetical protein; protein id: At1g11170
  misc_feature (1)..(108): NCBI GI NO: 34903420 NR Description: hypothetical protein~similar to Oryza sativachromosome 1
  misc_feature (1)..(108): NCBI GI NO: 15233917 NR Description: putative protein; protein id: At4g18530.1
  misc_feature (1)..(108): NCBI GI NO: 19386727 NR Description: P0678F11.16
  misc_feature (1)..(101): NCBI GI NO: 33146749 NR Description: putative lysine ketoglutarate reductase trans-splicing related 1
  misc_feature (1)..(101): NCBI GI NO: 34899756 NR Description: OJ1773_H01.1
  misc_feature (1)..(91): NCBI GI NO: 15235499 NR Description: putative protein; protein id: At4g12840.1
MAPVFSRTAWKCVWHLIQNDLIHGWGLDMKLGYCAQGDRTEKVGVIDSEYVVHQGIPSLGGPSLSSKTPRRSLDLRTHIRRQSSAELEKFKERWNRAVREDEGWRDPFDS

SEQ ID NO: 31689 - DNA, 950 bp, Zea mays subsp. mays
  misc_feature (1)..(950): Ceres Seq. ID no. 12348141
gaagtcgagtagacggccgggcctctcccgttctccacggacggctagcgctactggaggcgacgcctggacggcgaccccgcacactcacagccacaccctccacctgtgtgactattcaagggcttaggccgagccgcccggccaatcgccgtccgccggaccgctgaggaatttttctttctcgtcaaaagttactgcattcattttacagtaatggctatggggttgattaatgctaatcctataatccatgagaaaaaagagaggcgtgccagacaggcaccagagaccacagatgaaaatgcagcagagcccatagatcagctggaaatatttgatcacattagagatataaaggatccagagcacccgtactcactggaacagctgaatgtggtgactgaagattcaattgaactcaatgatgaaagtaattatgtcagggttacattcaccccaacagtggagcactgcagtatggcaactattattggcctttgcatacgcgtgaaacttgtacggagtctccctcctcgttacaaggtggacataagggttgcccctggatcacatgcaactgaagctgctgtgaataagcaactgaacgacaaagaacgtgttgcggctgcattggagaacccaaacctactggacatggtcgaagagtgcttatcaccaacatttgattgaggcctgaatatcaatatatcggtgtgacatggtgttgatgttcaggagccacacatgctcattgccaatggagttcactcctgtctttcgagaaccaaaatgccttgggtgttaagtgacgtgttgcatgatttttttcctccgccccgttcagttattatatatgctactatggcgctaccctttttggacgtttttggtgcttgtgacctcactgatcaatgcgagatgtaatcagctcttgtgctgtagctttc

SEQ ID NO: 31690 - protein, 158 aa, Zea mays subsp. mays
  peptide (1)..(158): Ceres Seq. ID no. 12348142
  misc_feature (36)..(115): Pfam Name: Pfam Description:  Domain of unknown function DUF59
  misc_feature (1)..(157): NCBI GI NO: 38347077 NR Description: OSJNBa0006A01.18
  misc_feature (1)..(153): NCBI GI NO: 28973748 NR Description: unknown protein [Arabidopsis thaliana]
  misc_feature (1)..(153): NCBI GI NO: 15221347 NR Description: unknown protein; protein id: At1g68310.1
  misc_feature (40)..(157): NCBI GI NO: 38567963 NR Description: OSJNBa0093F12.4
  misc_feature (1)..(153): NCBI GI NO: 34896898 NR Description: hypothetical protein
  misc_feature (7)..(154): NCBI GI NO: 24662341 NR Description: CG7949-PA [Drosophila melanogaster]
  misc_feature (5)..(153): NCBI GI NO: 39586567 NR Description: Hypothetical protein CBG21205
  misc_feature (4)..(154): NCBI GI NO: 21312046 NR Description: RIKEN cDNA 1110019N10 [Mus musculus]
  misc_feature (4)..(154): NCBI GI NO: 27658356 NR Description: similar to RIKEN cDNA 1110019N10
  misc_feature (5)..(153): NCBI GI NO: 17553476 NR Description: Putative cytoplasmic protein of eukaryotic origin
MAMGLINANPIIHEKKERRARQAPETTDENAAEPIDQLEIFDHIRDIKDPEHPYSLEQLNVVTEDSIELNDESNYVRVTFTPTVEHCSMATIIGLCIRVKLVRSLPPRYKVDIRVAPGSHATEAAVNKQLNDKERVAAALENPNLLDMVEECLSPTFD

SEQ ID NO: 31691 - protein, 156 aa, Zea mays subsp. mays
  peptide (1)..(156): Ceres Seq. ID no. 12348143
  misc_feature (34)..(113): Pfam Name: Pfam Description:  Domain of unknown function DUF59
  misc_feature (1)..(155): NCBI GI NO: 38347077 NR Description: OSJNBa0006A01.18
  misc_feature (1)..(151): NCBI GI NO: 28973748 NR Description: unknown protein [Arabidopsis thaliana]
  misc_feature (1)..(151): NCBI GI NO: 15221347 NR Description: unknown protein; protein id: At1g68310.1
  misc_feature (38)..(155): NCBI GI NO: 38567963 NR Description: OSJNBa0093F12.4
  misc_feature (1)..(151): NCBI GI NO: 34896898 NR Description: hypothetical protein
  misc_feature (5)..(152): NCBI GI NO: 24662341 NR Description: CG7949-PA [Drosophila melanogaster]
  misc_feature (3)..(151): NCBI GI NO: 39586567 NR Description: Hypothetical protein CBG21205
  misc_feature (2)..(152): NCBI GI NO: 21312046 NR Description: RIKEN cDNA 1110019N10 [Mus musculus]
  misc_feature (2)..(152): NCBI GI NO: 27658356 NR Description: similar to RIKEN cDNA 1110019N10
  misc_feature (3)..(151): NCBI GI NO: 17553476 NR Description: Putative cytoplasmic protein of eukaryotic origin
MGLINANPIIHEKKERRARQAPETTDENAAEPIDQLEIFDHIRDIKDPEHPYSLEQLNVVTEDSIELNDESNYVRVTFTPTVEHCSMATIIGLCIRVKLVRSLPPRYKVDIRVAPGSHATEAAVNKQLNDKERVAAALENPNLLDMVEECLSPTFD

SEQ ID NO: 31692 - DNA, 1918 bp, Zea mays subsp. mays
  misc_feature (1)..(1918): Ceres Seq. ID no. 12356802
agattgacctgttgccctgttgagtgtgaaggaggcgcacgcgcttgagctgaagaaactgccgcgctgatctagcccgccgggatgggcgcctcggggcctgcggctccgccggcaacgcatcgccgccgctgcatccagctgctgctgctgctcgccctggccgtcgcgccgcttggcagccgtgggcttcgcgtccgtgccgcgggggcggacacgggagggctgagccgggacgcgttcccgaaggggttcgtcttcgggacggcgacgtccgcgtaccaggtcgagggcgcggcgacgtccggcggccgcgggccctgcatctgggatcccttcgtccacacccccggaaagattgctgaagacgccaacgcagatgttacaacagatgaatatcatcgctacaaggaagatgttgatctcatgaaaagcctaaattttgatgcataccggttttcaatctcctggtccaggatcttcccagatggcgaagggaaaattaatgaagaaggagtacagtattacaacaatcttatagactacatgattaagcaaggccttactccttacgccaaccttaaccactatgatcttccgcttgcgcttcagaagaagtaccaaggctggttaggcccaaaaattgtggacatatttgctgactatgctgatttttgtttcaagacttttggcaatcgagtcaagaactggttcacattaaatgagccaaggatagtagcattccttggttatgataaagggcttaacccccctaaccggtgcacacaatgcactgccggtgggaactcatcgacagaaccttacattgttgttcataacattctcctatctcatgctactgcagttgcaagataccgcaataaataccaggcaactcagaaaggcaaggtcgggatagttcttgacttcaactggtatgaaccttttacaaactcaactgaagatcaaaaagcagcgcaaagggccagggacttccatattggttggtttcttgatccattaataaatgggcaatatccaaagataatgcaagacattgtgaaagaccggctaccaagtttcacacctgaacaggccaagctagtcaagggctcatcagactatttcgggatcaatcaatatactacatactacattgcagatcaacaaactcctccgcagggaccaccgagctactcgtccgactggggcgtccaatattactttcaaaggaatggcgtgcaaattggacagatggcgcactcaatttggctttacatcgtcccatcggggcatgtatggagtcgtgaactacctaaaggaaaagtaccataatccaatcatcatcatatcggaaaacggaatggatcagcctggaaacctcacgcgcgaggagtacgtgcacgacgccgtgaggatcgacttctacaagaactacctgacggagctaaagagagggatcgacggcggcgcgaacgtgatcggctacttcgcgtggtctctcctggacaacttcgagtggctgtcgggctacacgtccaagttcggcatcgtctacgtcgacttcgcgacgctgaagcggtaccccaaggactcggcgtactggttcagagacatgctttcggggacgggctccaaggctgctaccccgcagactggttcaggcggccggccggctggttcggcttcagccacctcgaacggacctgccttgctggtctcccttttggtctccttgggtgttctgcttccatccatcttcatggtttcctcggtctaattagaaatgtattttcatagtacggatttgtagttgtgtggatgacaacatgttccttttaagaatcaggacatgttgcatcgatgcgggacctgttgtaggaatgagaccatgattcagggcttattgttcagagtc

SEQ ID NO: 31693 - protein, 416 aa, Zea mays subsp. mays
  peptide (1)..(416): Ceres Seq. ID no. 12356803
  misc_feature (49)..(403): Pfam Name: Pfam Description:  Glycosyl hydrolase family 1
  misc_feature (11)..(403): NCBI GI NO: 18875458 NR Description: beta-glucosidase [Oryza sativa]
  misc_feature (20)..(403): NCBI GI NO: 1362162 NR Description: beta-glucosidase BGQ60 precursor - barley
  misc_feature (20)..(403): NCBI GI NO: 15229584 NR Description: glycosyl hydrolase family 1; protein id:At3g18080
  misc_feature (17)..(403): NCBI GI NO: 17226270 NR Description: beta-mannosidase enzyme [Lycopersicon esculentum]
  misc_feature (44)..(403): NCBI GI NO: 34899014 NR Description: putative non-cyanogenic beta-glucosidase precursor
  misc_feature (21)..(403): NCBI GI NO: 22331147 NR Description: glycosyl hydrolase family 1; protein id:At3g18070
  misc_feature (21)..(403): NCBI GI NO: 9294062 NR Description: beta-glucosidase [Arabidopsis thaliana]
  misc_feature (48)..(403): NCBI GI NO: 15222734 NR Description: glycosyl hydrolase family 1; protein id:At1g26560
  misc_feature (48)..(403): NCBI GI NO: 21537259 NR Description: beta-glucosidase, putative [Arabidopsis thaliana]
  misc_feature (17)..(403): NCBI GI NO: 15617209 NR Description: putative prunasin hydrolase isoform PH-L1 precursor
MGASGPAAPPATHRRRCIQLLLLLALAVAPLGSRGLRVRAAGADTGGLSRDAFPKGFVFGTATSAYQVEGAATSGGRGPCIWDPFVHTPGKIAEDANADVTTDEYHRYKEDVDLMKSLNFDAYRFSISWSRIFPDGEGKINEEGVQYYNNLIDYMIKQGLTPYANLNHYDLPLALQKKYQGWLGPKIVDIFADYADFCFKTFGNRVKNWFTLNEPRIVAFLGYDKGLNPPNRCTQCTAGGNSSTEPYIVVHNILLSHATAVARYRNKYQATQKGKVGIVLDFNWYEPFTNSTEDQKAAQRARDFHIGWFLDPLINGQYPKIMQDIVKDRLPSFTPEQAKLVKGSSDYFGINQYTTYYIADQQTPPQGPPSYSSDWGVQYYFQRNGVQIGQMAHSIWLYIVPSGHVWSRELPKGKVP

SEQ ID NO: 31694 - protein, 302 aa, Zea mays subsp. mays
  peptide (1)..(302): Ceres Seq. ID no. 12356804
  misc_feature (1)..(289): Pfam Name: Pfam Description:  Glycosyl hydrolase family 1
  misc_feature (1)..(289): NCBI GI NO: 18875458 NR Description: beta-glucosidase [Oryza sativa]
  misc_feature (1)..(289): NCBI GI NO: 1362162 NR Description: beta-glucosidase BGQ60 precursor - barley
  misc_feature (1)..(289): NCBI GI NO: 15229584 NR Description: glycosyl hydrolase family 1; protein id:At3g18080
  misc_feature (1)..(289): NCBI GI NO: 17226270 NR Description: beta-mannosidase enzyme [Lycopersicon esculentum]
  misc_feature (1)..(289): NCBI GI NO: 34899014 NR Description: putative non-cyanogenic beta-glucosidase precursor
  misc_feature (1)..(289): NCBI GI NO: 22331147 NR Description: glycosyl hydrolase family 1; protein id:At3g18070
  misc_feature (1)..(289): NCBI GI NO: 9294062 NR Description: beta-glucosidase [Arabidopsis thaliana]
  misc_feature (1)..(289): NCBI GI NO: 15222734 NR Description: glycosyl hydrolase family 1; protein id:At1g26560
  misc_feature (1)..(289): NCBI GI NO: 21537259 NR Description: beta-glucosidase, putative [Arabidopsis thaliana]
  misc_feature (1)..(289): NCBI GI NO: 15617209 NR Description: putative prunasin hydrolase isoform PH-L1 precursor
MKSLNFDAYRFSISWSRIFPDGEGKINEEGVQYYNNLIDYMIKQGLTPYANLNHYDLPLALQKKYQGWLGPKIVDIFADYADFCFKTFGNRVKNWFTLNEPRIVAFLGYDKGLNPPNRCTQCTAGGNSSTEPYIVVHNILLSHATAVARYRNKYQATQKGKVGIVLDFNWYEPFTNSTEDQKAAQRARDFHIGWFLDPLINGQYPKIMQDIVKDRLPSFTPEQAKLVKGSSDYFGINQYTTYYIADQQTPPQGPPSYSSDWGVQYYFQRNGVQIGQMAHSIWLYIVPSGHVWSRELPKGKVP

SEQ ID NO: 31695 - protein, 262 aa, Zea mays subsp. mays
  peptide (1)..(262): Ceres Seq. ID no. 12356805
  misc_feature (1)..(249): Pfam Name: Pfam Description:  Glycosyl hydrolase family 1
  misc_feature (1)..(249): NCBI GI NO: 18875458 NR Description: beta-glucosidase [Oryza sativa]
  misc_feature (1)..(249): NCBI GI NO: 1362162 NR Description: beta-glucosidase BGQ60 precursor - barley
  misc_feature (1)..(249): NCBI GI NO: 15229584 NR Description: glycosyl hydrolase family 1; protein id:At3g18080
  misc_feature (1)..(249): NCBI GI NO: 17226270 NR Description: beta-mannosidase enzyme [Lycopersicon esculentum]
  misc_feature (1)..(249): NCBI GI NO: 34899014 NR Description: putative non-cyanogenic beta-glucosidase precursor
  misc_feature (1)..(249): NCBI GI NO: 22331147 NR Description: glycosyl hydrolase family 1; protein id:At3g18070
  misc_feature (1)..(249): NCBI GI NO: 9294062 NR Description: beta-glucosidase [Arabidopsis thaliana]
  misc_feature (1)..(249): NCBI GI NO: 15222734 NR Description: glycosyl hydrolase family 1; protein id:At1g26560
  misc_feature (1)..(249): NCBI GI NO: 21537259 NR Description: beta-glucosidase, putative [Arabidopsis thaliana]
  misc_feature (1)..(249): NCBI GI NO: 15617209 NR Description: putative prunasin hydrolase isoform PH-L1 precursor
MIKQGLTPYANLNHYDLPLALQKKYQGWLGPKIVDIFADYADFCFKTFGNRVKNWFTLNEPRIVAFLGYDKGLNPPNRCTQCTAGGNSSTEPYIVVHNILLSHATAVARYRNKYQATQKGKVGIVLDFNWYEPFTNSTEDQKAAQRARDFHIGWFLDPLINGQYPKIMQDIVKDRLPSFTPEQAKLVKGSSDYFGINQYTTYYIADQQTPPQGPPSYSSDWGVQYYFQRNGVQIGQMAHSIWLYIVPSGHVWSRELPKGKVP

SEQ ID NO: 31696 - DNA, 1947 bp, Zea mays subsp. mays
  misc_feature (1)..(1947): Ceres Seq. ID no. 12349697
atcatgctattctctaggaggcctctcgccgccgctttccacctcgcgcccctttcgcctccgctgctcctcttcttcgcatccgcgtcctcgtcctgctcgcccgccgcctccgccgccgccgcgtcggtctccggctccaggggttgcactgctgcaaggatggacagcggtgcggtggagacagcgtccactggggcagtatggtcatcaccttcggcagaaccgagaagcatttctgtcgggaaggaggtattctgcaacaggtcactcaacatgaggaacatcacagcagtgggatttgatatggactacactctggcacagtacaagcctgaaaccttcgagtcccttgcttactatggtacaatagagaagcttgtgaaggatctccgctaccctgaagagctgttgacttgggaatttgattggaaatatatggtcagaggactagttctcgataagaagagaggaaatatcttgaagatggatcgacacaagtatgtaaaagttgcataccatggttttaaggaactatcgaaagaagaaaaagttgctgcttatgggagtacattgataagagattcatttgatgaacctgattatgcccttatagatacacttttctcactgggtgaagcttatctatttgctcagcttgttgatttcatagacaagaatcctggaaaagtacctgcaggcacagactatccacttatgtacagagatgtgaggtctgcggttgacttgtgtcatcgtgatggaactctaaagcggatggttgcgaaggatcctgccaggtacatcaatgaggacttggcaattgtaccaatgcttgaaatgatcaggaaatctggacgctcaacattcttagtgacaaatagtttgtgggactacaccgatgttgtcatgaactacctttgtgggccatacacttcaggtgtaggctctggtctcaatcacaagtggcttcaatattttgatattgtaataacaggcagttcgaagccaagtttcttccatgatgataaccgtgcaggattgtttgaagttgagcctgattctggaaaacttctgaatgctgatattcagatcggaagcccaagatcaagtcatcaacactcaacaccagttcagaaagtttatcaggggggcaatgttggtcatctccacagattactttctgttgcttctagttcacagattctctatgttggtgatcacatatacggagatattctgcggagcaagaaagttctaggctggcggactatgctggtgattccagaactagaacaagagctgaagcttctctcagaatcaaagtctactcgaaaggagcttagacatcttagaatggagcgtgattcgattgaagacaaaatccatcatcttgaatggtctcttaagcttgatgatatctcagaaaaccagaaggagaaattgttctctgaacatgacaatctgctgaaacagagagggcatgttcgtggtcttcatcaagaagctcagaggcaacatcatcagaagtttcataaggtgtggggacagctcatgaagactgggtaccaaaattccagatttgctcatcaggttgagagatttgcttgcttgtacagcagccaggttacaaacttcggtttgtattctcctgacaaatactatcgtccgagcgaagattacatgccccacgagtttgatgtgcttgggctgtaggagcagcccctactgctggtcggagttcctcgttgtaattgatccatagcctaggaggggacatcgtagttgccgtattatataacaggaagcttcacccattgtgaaggagagaaggtttataactatagtagctacatttctacttatcagtaagtttacctgtatataaatatgtacataactgatatatgatgcgtgttatttgtgagcacgcgataagtagtactg

SEQ ID NO: 31697 - protein, 571 aa, Zea mays subsp. mays
  peptide (1)..(571): Ceres Seq. ID no. 12349698
  misc_feature (161)..(571): Pfam Name: Pfam Description:  5' nucleotidase family
  misc_feature (2)..(571): NCBI GI NO: 34915208 NR Description: putative N5'-nucleotidase
  misc_feature (69)..(571): NCBI GI NO: 22330644 NR Description: cytosolic IMP-GMP specific 5'-nucleotidase
  misc_feature (69)..(529): NCBI GI NO: 25353625 NR Description: hypothetical protein F22H5.7
  misc_feature (85)..(487): NCBI GI NO: 12841987 NR Description: unnamed protein product [Mus musculus]
  misc_feature (85)..(487): NCBI GI NO: 31560044 NR Description: RIKEN cDNA 2010002I23 [Mus musculus]
  misc_feature (481)..(568): NCBI GI NO: 12841987 NR Description: unnamed protein product [Mus musculus]
  misc_feature (481)..(568): NCBI GI NO: 31560044 NR Description: RIKEN cDNA 2010002I23 [Mus musculus]
  misc_feature (85)..(487): NCBI GI NO: 40555840 NR Description: 5'-nucleotidase, cytosolic II [Mus musculus]
  misc_feature (481)..(568): NCBI GI NO: 40555840 NR Description: 5'-nucleotidase, cytosolic II [Mus musculus]
  misc_feature (85)..(487): NCBI GI NO: 6912598 NR Description: 5'-nucleotidase, cytosolic II
IMLFSRRPLAAAFHLAPLSPPLLLFFASASSSCSPAASAAAASVSGSRGCTAARMDSGAVETASTGAVWSSPSAEPRSISVGKEVFCNRSLNMRNITAVGFDMDYTLAQYKPETFESLAYYGTIEKLVKDLRYPEELLTWEFDWKYMVRGLVLDKKRGNILKMDRHKYVKVAYHGFKELSKEEKVAAYGSTLIRDSFDEPDYALIDTLFSLGEAYLFAQLVDFIDKNPGKVPAGTDYPLMYRDVRSAVDLCHRDGTLKRMVAKDPARYINEDLAIVPMLEMIRKSGRSTFLVTNSLWDYTDVVMNYLCGPYTSGVGSGLNHKWLQYFDIVITGSSKPSFFHDDNRAGLFEVEPDSGKLLNADIQIGSPRSSHQHSTPVQKVYQGGNVGHLHRLLSVASSSQILYVGDHIYGDILRSKKVLGWRTMLVIPELEQELKLLSESKSTRKELRHLRMERDSIEDKIHHLEWSLKLDDISENQKEKLFSEHDNLLKQRGHVRGLHQEAQRQHHQKFHKVWGQLMKTGYQNSRFAHQVERFACLYSSQVTNFGLYSPDKYYRPSEDYMPHEFDVLGL

SEQ ID NO: 31698 - protein, 570 aa, Zea mays subsp. mays
  peptide (1)..(570): Ceres Seq. ID no. 12349699
  misc_feature (160)..(570): Pfam Name: Pfam Description:  5' nucleotidase family
  misc_feature (1)..(570): NCBI GI NO: 34915208 NR Description: putative N5'-nucleotidase
  misc_feature (68)..(570): NCBI GI NO: 22330644 NR Description: cytosolic IMP-GMP specific 5'-nucleotidase
  misc_feature (68)..(528): NCBI GI NO: 25353625 NR Description: hypothetical protein F22H5.7
  misc_feature (84)..(486): NCBI GI NO: 12841987 NR Description: unnamed protein product [Mus musculus]
  misc_feature (84)..(486): NCBI GI NO: 31560044 NR Description: RIKEN cDNA 2010002I23 [Mus musculus]
  misc_feature (480)..(567): NCBI GI NO: 12841987 NR Description: unnamed protein product [Mus musculus]
  misc_feature (480)..(567): NCBI GI NO: 31560044 NR Description: RIKEN cDNA 2010002I23 [Mus musculus]
  misc_feature (84)..(486): NCBI GI NO: 40555840 NR Description: 5'-nucleotidase, cytosolic II [Mus musculus]
  misc_feature (480)..(567): NCBI GI NO: 40555840 NR Description: 5'-nucleotidase, cytosolic II [Mus musculus]
  misc_feature (84)..(486): NCBI GI NO: 6912598 NR Description: 5'-nucleotidase, cytosolic II
MLFSRRPLAAAFHLAPLSPPLLLFFASASSSCSPAASAAAASVSGSRGCTAARMDSGAVETASTGAVWSSPSAEPRSISVGKEVFCNRSLNMRNITAVGFDMDYTLAQYKPETFESLAYYGTIEKLVKDLRYPEELLTWEFDWKYMVRGLVLDKKRGNILKMDRHKYVKVAYHGFKELSKEEKVAAYGSTLIRDSFDEPDYALIDTLFSLGEAYLFAQLVDFIDKNPGKVPAGTDYPLMYRDVRSAVDLCHRDGTLKRMVAKDPARYINEDLAIVPMLEMIRKSGRSTFLVTNSLWDYTDVVMNYLCGPYTSGVGSGLNHKWLQYFDIVITGSSKPSFFHDDNRAGLFEVEPDSGKLLNADIQIGSPRSSHQHSTPVQKVYQGGNVGHLHRLLSVASSSQILYVGDHIYGDILRSKKVLGWRTMLVIPELEQELKLLSESKSTRKELRHLRMERDSIEDKIHHLEWSLKLDDISENQKEKLFSEHDNLLKQRGHVRGLHQEAQRQHHQKFHKVWGQLMKTGYQNSRFAHQVERFACLYSSQVTNFGLYSPDKYYRPSEDYMPHEFDVLGL

SEQ ID NO: 31699 - protein, 517 aa, Zea mays subsp. mays
  peptide (1)..(517): Ceres Seq. ID no. 12349700
  misc_feature (107)..(517): Pfam Name: Pfam Description:  5' nucleotidase family
  misc_feature (1)..(517): NCBI GI NO: 34915208 NR Description: putative N5'-nucleotidase
  misc_feature (15)..(517): NCBI GI NO: 22330644 NR Description: cytosolic IMP-GMP specific 5'-nucleotidase
  misc_feature (15)..(475): NCBI GI NO: 25353625 NR Description: hypothetical protein F22H5.7
  misc_feature (31)..(433): NCBI GI NO: 12841987 NR Description: unnamed protein product [Mus musculus]
  misc_feature (31)..(433): NCBI GI NO: 31560044 NR Description: RIKEN cDNA 2010002I23 [Mus musculus]
  misc_feature (427)..(514): NCBI GI NO: 12841987 NR Description: unnamed protein product [Mus musculus]
  misc_feature (427)..(514): NCBI GI NO: 31560044 NR Description: RIKEN cDNA 2010002I23 [Mus musculus]
  misc_feature (31)..(433): NCBI GI NO: 40555840 NR Description: 5'-nucleotidase, cytosolic II [Mus musculus]
  misc_feature (427)..(514): NCBI GI NO: 40555840 NR Description: 5'-nucleotidase, cytosolic II [Mus musculus]
  misc_feature (31)..(433): NCBI GI NO: 6912598 NR Description: 5'-nucleotidase, cytosolic II
MDSGAVETASTGAVWSSPSAEPRSISVGKEVFCNRSLNMRNITAVGFDMDYTLAQYKPETFESLAYYGTIEKLVKDLRYPEELLTWEFDWKYMVRGLVLDKKRGNILKMDRHKYVKVAYHGFKELSKEEKVAAYGSTLIRDSFDEPDYALIDTLFSLGEAYLFAQLVDFIDKNPGKVPAGTDYPLMYRDVRSAVDLCHRDGTLKRMVAKDPARYINEDLAIVPMLEMIRKSGRSTFLVTNSLWDYTDVVMNYLCGPYTSGVGSGLNHKWLQYFDIVITGSSKPSFFHDDNRAGLFEVEPDSGKLLNADIQIGSPRSSHQHSTPVQKVYQGGNVGHLHRLLSVASSSQILYVGDHIYGDILRSKKVLGWRTMLVIPELEQELKLLSESKSTRKELRHLRMERDSIEDKIHHLEWSLKLDDISENQKEKLFSEHDNLLKQRGHVRGLHQEAQRQHHQKFHKVWGQLMKTGYQNSRFAHQVERFACLYSSQVTNFGLYSPDKYYRPSEDYMPHEFDVLGL

SEQ ID NO: 31700 - DNA, 819 bp, Zea mays subsp. mays
  misc_feature (1)..(819): Ceres Seq. ID no. 12356960
aaggccgagctcatccaatccagtcgcctgattgcattgggatcccatggccaagctcgccgtcctcctcctcctcgccgtggccgcgtccgccacagtgccggcgcacggccgcgataccccgactgagatcaaggccgggacggacgcgaacgtcacgctggagctggccgccgcggacggcaacggcgtggggatctcgaacctgcccgcctggggcgggctcatggggcagggctactcctacttcgagcgcagcaacctggacatcttcagcggccgcgggccctgcatggcgaaggcgccgtgcgtggatgcggctggccaccgacggcaccggcgaccaccacgggtggtactgcaactacgtggaggtcaccaccacgggcccgcacaaggggtgcgggcagcagctgttcaccgtcgagcagtggctcgccaccgacgccccgcccttcaagctcgaggccgttcgcgactactgcagcggcgacgccaagggcgcctcggcggcgtgatgtggccggcggccggtaggaggagagcacagcacacacgcctggactggacctgctgggtggcttggtttggttggttggtgacgagtcgtaataagttgtgggcgcatgggcgccgcgctcgtgagtggcgtgcgccacgatgcatgcgtgtatggtgatgaactgaattggagccgtgcagcaagtcgaataatcgggagccacctcgcgtgatgtgtagtggctagtttttgtacatggacgtgttggatcttgatccatgttttgatctgatctttgagaaatggtaatccgcgtt

SEQ ID NO: 31701 - protein, 210 aa, Zea mays subsp. mays
  peptide (1)..(210): Ceres Seq. ID no. 12356961
  misc_feature (25)..(88): Pfam Name: Pfam Description:  PLAT/LH2 domain
  misc_feature (25)..(88): NCBI GI NO: 32492140 NR Description: OSJNBa0036B21.4
  misc_feature (30)..(88): NCBI GI NO: 32492139 NR Description: OSJNBa0036B21.2
  misc_feature (20)..(88): NCBI GI NO: 28628595 NR Description: TMV induced protein 1-2 [Capsicum annuum]
  misc_feature (30)..(88): NCBI GI NO: 21740887 NR Description: OSJNBa0036B21.1
  misc_feature (1)..(88): NCBI GI NO: 12667247 NR Description: dehydration stress-induced protein
  misc_feature (1)..(88): NCBI GI NO: 15236014 NR Description: putative protein; protein id: At4g39730
  misc_feature (25)..(88): NCBI GI NO: 18399899 NR Description: expressed protein; protein id: At2g22170
  misc_feature (25)..(88): NCBI GI NO: 21553555 NR Description: dehydration stress-induced protein
  misc_feature (31)..(88): NCBI GI NO: 7542598 NR Description: TMV-induced protein I [Capsicum annuum]
  misc_feature (1)..(88): NCBI GI NO: 10241929 NR Description: elicitor inducible protein [Nicotiana tabacum]
MAKLAVLLLLAVAASATVPAHGRDTPTEIKAGTDANVTLELAAADGNGVGISNLPAWGGLMGQGYSYFERSNLDIFSGRGPCMAKAPCVDAAGHRRHRRPPRVVLQLRGGHHHGPAQGVRAAAVHRRAVARHRRPALQARGRSRLLQRRRQGRLGGVMWPAAGRRRAQHTRLDWTCWVAWFGWLVTSRNKLWAHGRRAREWRAPRCMRVW

SEQ ID NO: 31702 - protein, 171 aa, Zea mays subsp. mays
  peptide (1)..(171): Ceres Seq. ID no. 12356962
  misc_feature (105)..(156): Pfam Name: Pfam Description:  PLAT/LH2 domain
  misc_feature (95)..(171): NCBI GI NO: 32492140 NR Description: OSJNBa0036B21.4
  misc_feature (105)..(167): NCBI GI NO: 32492139 NR Description: OSJNBa0036B21.2
  misc_feature (95)..(161): NCBI GI NO: 28628595 NR Description: TMV induced protein 1-2 [Capsicum annuum]
  misc_feature (105)..(171): NCBI GI NO: 21740887 NR Description: OSJNBa0036B21.1
  misc_feature (105)..(161): NCBI GI NO: 12667247 NR Description: dehydration stress-induced protein
  misc_feature (105)..(161): NCBI GI NO: 15236014 NR Description: putative protein; protein id: At4g39730
  misc_feature (105)..(161): NCBI GI NO: 21553555 NR Description: dehydration stress-induced protein
  misc_feature (105)..(161): NCBI GI NO: 18399899 NR Description: expressed protein; protein id: At2g22170
  misc_feature (95)..(161): NCBI GI NO: 7542598 NR Description: TMV-induced protein I [Capsicum annuum]
  misc_feature (105)..(164): NCBI GI NO: 10241929 NR Description: elicitor inducible protein [Nicotiana tabacum]
GRAHPIQSPDCIGIPWPSSPSSSSSPWPRPPQCRRTAAIPRLRSRPGRTRTSRWSWPPRTATAWGSRTCPPGAGSWGRATPTSSAATWTSSAAAGPAWRRRRAWMRLATDGTGDHHGWYCNYVEVTTTGPHKGCGQQLFTVEQWLATDAPPFKLEAVRDYCSGDAKGASAA

SEQ ID NO: 31703 - protein, 150 aa, Zea mays subsp. mays
  peptide (1)..(150): Ceres Seq. ID no. 12356963
  misc_feature (1)..(28): NCBI GI NO: 32492140 NR Description: OSJNBa0036B21.4
  misc_feature (1)..(28): NCBI GI NO: 32492139 NR Description: OSJNBa0036B21.2
  misc_feature (1)..(28): NCBI GI NO: 28628595 NR Description: TMV induced protein 1-2 [Capsicum annuum]
  misc_feature (1)..(28): NCBI GI NO: 21740887 NR Description: OSJNBa0036B21.1
  misc_feature (1)..(28): NCBI GI NO: 12667247 NR Description: dehydration stress-induced protein
  misc_feature (1)..(28): NCBI GI NO: 15236014 NR Description: putative protein; protein id: At4g39730
  misc_feature (1)..(28): NCBI GI NO: 18399899 NR Description: expressed protein; protein id: At2g22170
  misc_feature (1)..(28): NCBI GI NO: 21553555 NR Description: dehydration stress-induced protein
  misc_feature (1)..(28): NCBI GI NO: 7542598 NR Description: TMV-induced protein I [Capsicum annuum]
  misc_feature (1)..(28): NCBI GI NO: 10241929 NR Description: elicitor inducible protein [Nicotiana tabacum]
MGQGYSYFERSNLDIFSGRGPCMAKAPCVDAAGHRRHRRPPRVVLQLRGGHHHGPAQGVRAAAVHRRAVARHRRPALQARGRSRLLQRRRQGRLGGVMWPAAGRRRAQHTRLDWTCWVAWFGWLVTSRNKLWAHGRRAREWRAPRCMRVW

SEQ ID NO: 31704 - DNA, 1522 bp, Zea mays subsp. mays
  misc_feature (1)..(1522): Ceres Seq. ID no. 12407056
acgcaggaggtagcgttccactcgcttcgcggtggccatggtctcgtctccttcccctcccttgcccaccggtgtaagtgtgcctccctccctccttcctcctgcctcctctcctctgttaccgcggttctgccgtggctgagtatacgagtcgttcactgcacaatggtgcgccgtcaggcctccgagccgaagcagcagcgaggcggcaccaaggcggcgccggagaaggccgacaagaagtacgcgcacgtcccgacgccgctccaccacggtcacggcggtgccagcaacaagacaacaccccgcggggccaaggacgccgccggcccggcggcgtacgtcgcggcggtgtccttctccgactgccgcttcaagcagcgcgccctcgcgccggcgtcgcccggcgccgtcatccgctcgctgttcgtctccctcacccgccgctccaccccgcgctcgtcgccgtcggccacgccggcctcggcaggcgccgacgcgggggacggcgagcagtggcgcctcgccgcggccgacctctcccgcaggctcgccgcggccacgcgcacgcgggacgaggcgctggaggagaccacgcgcctgaagcactccctcgccgagctggagcacaagctcgcgcgcctcgaggcgcgcgtgctcccgacccccgcggccgccttccccgtcgactccttcctccgcgccgtctcgaccgcccgcgccgccgtgcggaacctcgcgcgcgcgctgtctgcccacctccgcagcccctccagccccggcccgagcctcgagagcttcctcaaccgcgcgttccacgccgacttcgagctggacaccgacgccgatgctcacaccacggaccccgcgggccggtgccaggccaacctcgcggcgtaccacgccgtcgcggtgctcacgtgggaggaggtcctcctccacggcaccaagcactacagcgaggggctcagccgcttctgcgacgccaagatgagcgaggtggtgtcctcgctcggctgggcgcgcgcgcggccgtggcctgagccgctgctgcaggccttcttcctcgccgccaagggcgtgtggggcgtccgcctcctggcgcgctccgtccacccgccgctccccgttgtgcgcgccgagcgaggcgcgcgcttcgacccgcggttcatggaggacgccgcggccagccgggcggggacgctggaaccggccagcgtgaagatgatgatggcgccagggttccacgtctacctggccggcgcgggcgtggtgaaatgcagggtcgtctgcttctacaccagcagtaacgcccgcacagacggccacagagatggcgggagcagcgccaacggcagcgtggggttggggagtagctgtagtgacattaatgggagtgctacagatgtggttgatagctgtagagcagtgaagtagggtaaaatgttgcccttgcacaggtagaaagaacacggggattttacttgttcgctaaaaaaacatgatgatctgcgtttaggcg

SEQ ID NO: 31705 - protein, 478 aa, Zea mays subsp. mays
  peptide (1)..(478): Ceres Seq. ID no. 12407057
  misc_feature (250)..(465): NCBI GI NO: 22329507 NR Description: hypothetical protein; protein id: At1g12330.1
  misc_feature (78)..(216): NCBI GI NO: 22329507 NR Description: hypothetical protein; protein id: At1g12330.1
  misc_feature (264)..(435): NCBI GI NO: 15239939 NR Description: putative protein; protein id: At5g12900.1
  misc_feature (136)..(217): NCBI GI NO: 15239939 NR Description: putative protein; protein id: At5g12900.1
TQEVAFHSLRGGHGLVSFPSLAHRCKCASLPPSSCLLSSVTAVLPWLSIRVVHCTMVRRQASEPKQQRGGTKAAPEKADKKYAHVPTPLHHGHGGASNKTTPRGAKDAAGPAAYVAAVSFSDCRFKQRALAPASPGAVIRSLFVSLTRRSTPRSSPSATPASAGADAGDGEQWRLAAADLSRRLAAATRTRDEALEETTRLKHSLAELEHKLARLEARVLPTPAAAFPVDSFLRAVSTARAAVRNLARALSAHLRSPSSPGPSLESFLNRAFHADFELDTDADAHTTDPAGRCQANLAAYHAVAVLTWEEVLLHGTKHYSEGLSRFCDAKMSEVVSSLGWARARPWPEPLLQAFFLAAKGVWGVRLLARSVHPPLPVVRAERGARFDPRFMEDAAASRAGTLEPASVKMMMAPGFHVYLAGAGVVKCRVVCFYTSSNARTDGHRDGGSSANGSVGLGSSCSDINGSATDVVDSCRAVK

SEQ ID NO: 31706 - protein, 423 aa, Zea mays subsp. mays
  peptide (1)..(423): Ceres Seq. ID no. 12407058
  misc_feature (195)..(410): NCBI GI NO: 22329507 NR Description: hypothetical protein; protein id: At1g12330.1
  misc_feature (23)..(161): NCBI GI NO: 22329507 NR Description: hypothetical protein; protein id: At1g12330.1
  misc_feature (209)..(380): NCBI GI NO: 15239939 NR Description: putative protein; protein id: At5g12900.1
  misc_feature (81)..(162): NCBI GI NO: 15239939 NR Description: putative protein; protein id: At5g12900.1
MVRRQASEPKQQRGGTKAAPEKADKKYAHVPTPLHHGHGGASNKTTPRGAKDAAGPAAYVAAVSFSDCRFKQRALAPASPGAVIRSLFVSLTRRSTPRSSPSATPASAGADAGDGEQWRLAAADLSRRLAAATRTRDEALEETTRLKHSLAELEHKLARLEARVLPTPAAAFPVDSFLRAVSTARAAVRNLARALSAHLRSPSSPGPSLESFLNRAFHADFELDTDADAHTTDPAGRCQANLAAYHAVAVLTWEEVLLHGTKHYSEGLSRFCDAKMSEVVSSLGWARARPWPEPLLQAFFLAAKGVWGVRLLARSVHPPLPVVRAERGARFDPRFMEDAAASRAGTLEPASVKMMMAPGFHVYLAGAGVVKCRVVCFYTSSNARTDGHRDGGSSANGSVGLGSSCSDINGSATDVVDSCRAVK

SEQ ID NO: 31707 - DNA, 1938 bp, Zea mays subsp. mays
  misc_feature (1)..(1938): Ceres Seq. ID no. 12407120
aataaagtccacaaccatttcatttcttctttccccaattcccgtccatcagctcgcaccagcgaccagagcagcagaccaagcaagcgcgagggagagaagagacgaagaagaaaagaaaagccggagctctgccgagcttagtccgcggaggcggcgaccggcgacgcgtaaccatggagcgggcggaggaggcgcagcccgccgccgagcggagggcgccctcgacggcgccgtcggcgcgggtgtcgatctgggagtcggtacgcgcgtgcggggtgtgggggaaggagctggacaaggccgagctgtggaggcaggtcgtcatgccacgctacctgcgccgggccgtcgcggccgccgtcaaggccaaggacgaggccgccggcgtggcggtggcggcggcggccgcggaggaccgcgcgggggaggacgccgacggcccggcggtggcgcccgtggtggtgttcgtcaactcgcgcagtggcgggcgccacgggcccgagctcaaggtgcggctgcacgagctcatcaccgaggagcaggtctttgatctttcagttgtgaagccttcagattttgttcaccatggtttgagttgtttggagaggttagctgaccaaggcgataaccgtgcgaaggctgttcgtgagaaaatgaggattgtggttgctgggggtgacggtacagttggttgggtgcttggatgtctctcagatctttataagatgaaaagggaaccggttccacctacaggaatcattccacttggtacaggaaatgatcttgctagatcgtttggatggggtggctcttttccctttggttggcgctcagctgtaaagcgttatctcagcaaagcttccagatctcccatttgccgtcttgacagctggcaaactgtaattcagatgccagaaggagaaatagaagagttgccatatgcacttaagaaagtagaacctggagaccggttggaggtcagccaggagaacggtacagagttatccgaaaaggcttctttctataaaggagtattctacaactaccttagcattgggatggatgctcaggttgcatatggcttccatcatcttcgtgatgaaaagccatatcttgcacaaggaccagttgcaaataagttgatttatgctggatatagctgcactcaggggtggttttgtacaccttgcacagcgagtccacagctaagggggcttaagaacattttgcggctttccattaaaaaggccaattgttcagagtgggagcaagtgaaaatgccttcaagcgttagatccctagttgtgttaaatttatacaattatggcagtggaaggcatccatggggtgatctaagacctgagtatctcgaaaagaaaggctttgttgaagcccattcagatgatggcttgcttgaaatatttggtctgaaggaaggttggcatgcttcatttgtcatggccgagcttatcaaagcaaagcacattgcccaggctgcggctatcaagttcgaaatgaggggtggcgagtggaaccgagcatatgttcagatggacggagagccgtggaaacaaccgctcctacaggagcactcaaccatcgtggaaataaacaaagttccgtaccattctctcatgataaacggggagtaatgagatttttcctctgtcaaccagattgtaccagggctgcattcatagatcgttaggatcgtgtacagttcaggagcagcgggcactagatccttagaactgggtcggacggactgcagcgaggatggcatgcatgttcgttttggccttttgtcgtgctatggtcgaagccatggccggagcgtggtgtggcaccatgcattgttgtattcgtaccataatatgtgcgttgttgtatcctaagttctttttgaaagaaacatgatttatttgtttgtattgc

SEQ ID NO: 31708 - protein, 492 aa, Zea mays subsp. mays
  peptide (1)..(492): Ceres Seq. ID no. 12407121
  misc_feature (287)..(464): Pfam Name: presumed Pfam Description: Diacylglycerol kinase accessory domain
  misc_feature (10)..(492): NCBI GI NO: 30680460 NR Description: diacylglycerol kinase -related
  misc_feature (20)..(492): NCBI GI NO: 25407626 NR Description: hypothetical protein AT4g30340
  misc_feature (40)..(492): NCBI GI NO: 15242824 NR Description: diacylglycerol kinase-like protein
  misc_feature (84)..(492): NCBI GI NO: 25411895 NR Description: probable diacylglycerol kinase
  misc_feature (71)..(491): NCBI GI NO: 40253749 NR Description: putative diacylglycerol kinase variant A
  misc_feature (20)..(370): NCBI GI NO: 18417574 NR Description: putative protein; protein id: At4g30340
  misc_feature (74)..(480): NCBI GI NO: 18399515 NR Description: putative diacylglycerol kinase
  misc_feature (74)..(480): NCBI GI NO: 30681194 NR Description: diacylglycerol kinase -related
  misc_feature (74)..(480): NCBI GI NO: 25412001 NR Description: probable diacylglycerol kinase
  misc_feature (74)..(480): NCBI GI NO: 21553717 NR Description: putative diacylglycerol kinase
MERAEEAQPAAERRAPSTAPSARVSIWESVRACGVWGKELDKAELWRQVVMPRYLRRAVAAAVKAKDEAAGVAVAAAAAEDRAGEDADGPAVAPVVVFVNSRSGGRHGPELKVRLHELITEEQVFDLSVVKPSDFVHHGLSCLERLADQGDNRAKAVREKMRIVVAGGDGTVGWVLGCLSDLYKMKREPVPPTGIIPLGTGNDLARSFGWGGSFPFGWRSAVKRYLSKASRSPICRLDSWQTVIQMPEGEIEELPYALKKVEPGDRLEVSQENGTELSEKASFYKGVFYNYLSIGMDAQVAYGFHHLRDEKPYLAQGPVANKLIYAGYSCTQGWFCTPCTASPQLRGLKNILRLSIKKANCSEWEQVKMPSSVRSLVVLNLYNYGSGRHPWGDLRPEYLEKKGFVEAHSDDGLLEIFGLKEGWHASFVMAELIKAKHIAQAAAIKFEMRGGEWNRAYVQMDGEPWKQPLLQEHSTIVEINKVPYHSLMINGE

SEQ ID NO: 31709 - protein, 442 aa, Zea mays subsp. mays
  peptide (1)..(442): Ceres Seq. ID no. 12407122
  misc_feature (237)..(414): Pfam Name: presumed Pfam Description: Diacylglycerol kinase accessory domain
  misc_feature (1)..(442): NCBI GI NO: 30680460 NR Description: diacylglycerol kinase -related
  misc_feature (1)..(442): NCBI GI NO: 25407626 NR Description: hypothetical protein AT4g30340
  misc_feature (1)..(442): NCBI GI NO: 15242824 NR Description: diacylglycerol kinase-like protein
  misc_feature (34)..(442): NCBI GI NO: 25411895 NR Description: probable diacylglycerol kinase
  misc_feature (21)..(441): NCBI GI NO: 40253749 NR Description: putative diacylglycerol kinase variant A
  misc_feature (1)..(320): NCBI GI NO: 18417574 NR Description: putative protein; protein id: At4g30340
  misc_feature (24)..(430): NCBI GI NO: 18399515 NR Description: putative diacylglycerol kinase
  misc_feature (24)..(430): NCBI GI NO: 30681194 NR Description: diacylglycerol kinase -related
  misc_feature (24)..(430): NCBI GI NO: 25412001 NR Description: probable diacylglycerol kinase
  misc_feature (24)..(430): NCBI GI NO: 21553717 NR Description: putative diacylglycerol kinase
MPRYLRRAVAAAVKAKDEAAGVAVAAAAAEDRAGEDADGPAVAPVVVFVNSRSGGRHGPELKVRLHELITEEQVFDLSVVKPSDFVHHGLSCLERLADQGDNRAKAVREKMRIVVAGGDGTVGWVLGCLSDLYKMKREPVPPTGIIPLGTGNDLARSFGWGGSFPFGWRSAVKRYLSKASRSPICRLDSWQTVIQMPEGEIEELPYALKKVEPGDRLEVSQENGTELSEKASFYKGVFYNYLSIGMDAQVAYGFHHLRDEKPYLAQGPVANKLIYAGYSCTQGWFCTPCTASPQLRGLKNILRLSIKKANCSEWEQVKMPSSVRSLVVLNLYNYGSGRHPWGDLRPEYLEKKGFVEAHSDDGLLEIFGLKEGWHASFVMAELIKAKHIAQAAAIKFEMRGGEWNRAYVQMDGEPWKQPLLQEHSTIVEINKVPYHSLMINGE

SEQ ID NO: 31710 - protein, 332 aa, Zea mays subsp. mays
  peptide (1)..(332): Ceres Seq. ID no. 12407123
  misc_feature (127)..(304): Pfam Name: presumed Pfam Description: Diacylglycerol kinase accessory domain
  misc_feature (1)..(332): NCBI GI NO: 30680460 NR Description: diacylglycerol kinase -related
  misc_feature (1)..(332): NCBI GI NO: 25407626 NR Description: hypothetical protein AT4g30340
  misc_feature (1)..(332): NCBI GI NO: 15242824 NR Description: diacylglycerol kinase-like protein
  misc_feature (1)..(332): NCBI GI NO: 25411895 NR Description: probable diacylglycerol kinase
  misc_feature (1)..(331): NCBI GI NO: 40253749 NR Description: putative diacylglycerol kinase variant A
  misc_feature (1)..(210): NCBI GI NO: 18417574 NR Description: putative protein; protein id: At4g30340
  misc_feature (1)..(320): NCBI GI NO: 18399515 NR Description: putative diacylglycerol kinase
  misc_feature (1)..(320): NCBI GI NO: 30681194 NR Description: diacylglycerol kinase -related
  misc_feature (1)..(320): NCBI GI NO: 25412001 NR Description: probable diacylglycerol kinase
  misc_feature (1)..(320): NCBI GI NO: 21553717 NR Description: putative diacylglycerol kinase
MRIVVAGGDGTVGWVLGCLSDLYKMKREPVPPTGIIPLGTGNDLARSFGWGGSFPFGWRSAVKRYLSKASRSPICRLDSWQTVIQMPEGEIEELPYALKKVEPGDRLEVSQENGTELSEKASFYKGVFYNYLSIGMDAQVAYGFHHLRDEKPYLAQGPVANKLIYAGYSCTQGWFCTPCTASPQLRGLKNILRLSIKKANCSEWEQVKMPSSVRSLVVLNLYNYGSGRHPWGDLRPEYLEKKGFVEAHSDDGLLEIFGLKEGWHASFVMAELIKAKHIAQAAAIKFEMRGGEWNRAYVQMDGEPWKQPLLQEHSTIVEINKVPYHSLMINGE

SEQ ID NO: 31711 - DNA, 1426 bp, Zea mays subsp. mays
  misc_feature (1)..(1426): Ceres Seq. ID no. 12404995
aactctcgtatcgccggcgtatttagcttgcttcagggggcacgtggcggtggaagcttccctggcggtggtggtggtgcttggttgatgtcgatggcgcaggtctgctgtgactcggctgtagcggtgacggcggcaccggtggttggtgcggaggcggaggccagggccagggcgcgcgccgagaggcggagccgggccggagagtccggggcgtggaagcacgcggcggccgctggcacggccgatgccacgaggaagcggagtctcgggtcgggggagctgctgctggcgcggaagcacggggcggcgtcggtggccggccgcaggagggagatggaggacgccgtgtccgtgcgtgacgcgttctgcgcggagggcacggccgacggcgggaggcgcgacttctacggagtgttcgacggccacggctgctcgcacgtggccgaggcgtgccgggaccggatgcacgagctggtcgccgaggagctcgccgccaccgccgccgacagctccgtctccgcagcagcggcctggaccgcggcgatggaacgcagcttcgcgcggatggacgccgaggtgacgtcggccggagggcgcgccgccgccgccagaagcagcacctgccgctgcgacgcgcacaggtgcgaccatgtgggctctacggccgtggtggccgtcgtggaggagcacccgccgtccgtggtggccaactgcggcgacagccgcgccgtgctctgccgtggggacggcgcgccgccgctgccgctgtcgtcggaccacaagcccgaccgccccgacgagctggagcgcatcgagtccgccggcgggcgcgtcatcttctgggagggcgcgcgcgttctgggcgtcctcgccatgtcccgcgccgtcggggacggatacctgaagccgtacgtgtcgtccgttcctgaggtgactgtgaccgaccggtccgacggcgacgagtgcctcatcctgggcagcgacgggctctgggacgtggtgagcaacgaggccgcgtgcgaggtggcgcgcgcctgcctccgcaggggccgggccaagtggtgcgccgaggccgccgcgttgctcaccaagctggccctcgcgaggagaagctccgacaacgtctcggtggtcgtcgtcgatctccggaggaggaatcactagttctgtgcagttgtcaactagtactagtacagtaggatggctggtgcgcacaagggatttcgcgggggtgcgctaattgggtttttttttcttgcgttttcattcaaaaagtttttttttttttttgctgtactctccctgaatcaaaaagttcagaggagcccttagattaattattgtggtagagccggaatttggtccggataccattcggagaggtggtcgcgtagaaaaaaactcagaaaggggagacggtctc

SEQ ID NO: 31712 - protein, 388 aa, Zea mays subsp. mays
  peptide (1)..(388): Ceres Seq. ID no. 12404996
  misc_feature (100)..(347): Pfam Name: Pfam Description:  Protein phosphatase 2C
  misc_feature (32)..(352): NCBI GI NO: 34902050 NR Description: putative Serine/threonine phosphatases
  misc_feature (354)..(386): NCBI GI NO: 34902050 NR Description: putative Serine/threonine phosphatases
  misc_feature (39)..(347): NCBI GI NO: 34908256 NR Description: putative protein phosphatase 2C
  misc_feature (337)..(385): NCBI GI NO: 34908256 NR Description: putative protein phosphatase 2C
  misc_feature (100)..(385): NCBI GI NO: 15227078 NR Description: protein phosphatase 2C
  misc_feature (97)..(354): NCBI GI NO: 15222398 NR Description: protein phosphatase 2C
  misc_feature (349)..(386): NCBI GI NO: 15222398 NR Description: protein phosphatase 2C
  misc_feature (100)..(349): NCBI GI NO: 10432446 NR Description: protein phosphatase 2C [Nicotiana tabacum]
  misc_feature (356)..(385): NCBI GI NO: 10432446 NR Description: protein phosphatase 2C [Nicotiana tabacum]
  misc_feature (100)..(385): NCBI GI NO: 33309516 NR Description: protein phosphatase 2C [Prunus avium]
NSRIAGVFSLLQGARGGGSFPGGGGGAWLMSMAQVCCDSAVAVTAAPVVGAEAEARARARAERRSRAGESGAWKHAAAAGTADATRKRSLGSGELLLARKHGAASVAGRRREMEDAVSVRDAFCAEGTADGGRRDFYGVFDGHGCSHVAEACRDRMHELVAEELAATAADSSVSAAAAWTAAMERSFARMDAEVTSAGGRAAAARSSTCRCDAHRCDHVGSTAVVAVVEEHPPSVVANCGDSRAVLCRGDGAPPLPLSSDHKPDRPDELERIESAGGRVIFWEGARVLGVLAMSRAVGDGYLKPYVSSVPEVTVTDRSDGDECLILGSDGLWDVVSNEAACEVARACLRRGRAKWCAEAAALLTKLALARRSSDNVSVVVVDLRRRNH

SEQ ID NO: 31713 - protein, 359 aa, Zea mays subsp. mays
  peptide (1)..(359): Ceres Seq. ID no. 12404997
  misc_feature (71)..(318): Pfam Name: Pfam Description:  Protein phosphatase 2C
  misc_feature (3)..(323): NCBI GI NO: 34902050 NR Description: putative Serine/threonine phosphatases
  misc_feature (325)..(357): NCBI GI NO: 34902050 NR Description: putative Serine/threonine phosphatases
  misc_feature (10)..(318): NCBI GI NO: 34908256 NR Description: putative protein phosphatase 2C
  misc_feature (308)..(356): NCBI GI NO: 34908256 NR Description: putative protein phosphatase 2C
  misc_feature (71)..(356): NCBI GI NO: 15227078 NR Description: protein phosphatase 2C
  misc_feature (68)..(325): NCBI GI NO: 15222398 NR Description: protein phosphatase 2C
  misc_feature (320)..(357): NCBI GI NO: 15222398 NR Description: protein phosphatase 2C
  misc_feature (71)..(320): NCBI GI NO: 10432446 NR Description: protein phosphatase 2C [Nicotiana tabacum]
  misc_feature (327)..(356): NCBI GI NO: 10432446 NR Description: protein phosphatase 2C [Nicotiana tabacum]
  misc_feature (71)..(356): NCBI GI NO: 33309516 NR Description: protein phosphatase 2C [Prunus avium]
MSMAQVCCDSAVAVTAAPVVGAEAEARARARAERRSRAGESGAWKHAAAAGTADATRKRSLGSGELLLARKHGAASVAGRRREMEDAVSVRDAFCAEGTADGGRRDFYGVFDGHGCSHVAEACRDRMHELVAEELAATAADSSVSAAAAWTAAMERSFARMDAEVTSAGGRAAAARSSTCRCDAHRCDHVGSTAVVAVVEEHPPSVVANCGDSRAVLCRGDGAPPLPLSSDHKPDRPDELERIESAGGRVIFWEGARVLGVLAMSRAVGDGYLKPYVSSVPEVTVTDRSDGDECLILGSDGLWDVVSNEAACEVARACLRRGRAKWCAEAAALLTKLALARRSSDNVSVVVVDLRRRNH

SEQ ID NO: 31714 - protein, 357 aa, Zea mays subsp. mays
  peptide (1)..(357): Ceres Seq. ID no. 12404998
  misc_feature (69)..(316): Pfam Name: Pfam Description:  Protein phosphatase 2C
  misc_feature (1)..(321): NCBI GI NO: 34902050 NR Description: putative Serine/threonine phosphatases
  misc_feature (323)..(355): NCBI GI NO: 34902050 NR Description: putative Serine/threonine phosphatases
  misc_feature (8)..(316): NCBI GI NO: 34908256 NR Description: putative protein phosphatase 2C
  misc_feature (306)..(354): NCBI GI NO: 34908256 NR Description: putative protein phosphatase 2C
  misc_feature (69)..(354): NCBI GI NO: 15227078 NR Description: protein phosphatase 2C
  misc_feature (66)..(323): NCBI GI NO: 15222398 NR Description: protein phosphatase 2C
  misc_feature (318)..(355): NCBI GI NO: 15222398 NR Description: protein phosphatase 2C
  misc_feature (69)..(318): NCBI GI NO: 10432446 NR Description: protein phosphatase 2C [Nicotiana tabacum]
  misc_feature (325)..(354): NCBI GI NO: 10432446 NR Description: protein phosphatase 2C [Nicotiana tabacum]
  misc_feature (69)..(354): NCBI GI NO: 33309516 NR Description: protein phosphatase 2C [Prunus avium]
MAQVCCDSAVAVTAAPVVGAEAEARARARAERRSRAGESGAWKHAAAAGTADATRKRSLGSGELLLARKHGAASVAGRRREMEDAVSVRDAFCAEGTADGGRRDFYGVFDGHGCSHVAEACRDRMHELVAEELAATAADSSVSAAAAWTAAMERSFARMDAEVTSAGGRAAAARSSTCRCDAHRCDHVGSTAVVAVVEEHPPSVVANCGDSRAVLCRGDGAPPLPLSSDHKPDRPDELERIESAGGRVIFWEGARVLGVLAMSRAVGDGYLKPYVSSVPEVTVTDRSDGDECLILGSDGLWDVVSNEAACEVARACLRRGRAKWCAEAAALLTKLALARRSSDNVSVVVVDLRRRNH

SEQ ID NO: 31715 - DNA, 1733 bp, Zea mays subsp. mays
  misc_feature (1)..(1733): Ceres Seq. ID no. 12369271
accgagaatctttcaccctcctgacctctctctctcctcttctccctcccgtgagtgagtgagctggagtcaagctagccgagcgagtgatggcatggggagcttgcactgctgcggcagctgctctccttctgctcctcctcctcctcgccgccgccgcagcaggtggtaacggcggcgtgcattgccttgaccttgaccttgaggaggggaggcggcaccacctgagcaggagagccttgcaagggaggcagaggcggcaccacctgaggtcaagggcggtgggtggcgccacggtgctcgagctgaggcaccacagcttcagccctgcaccggccaacagcagggaggaggaggcggacgctctcctgtccgccgacgccgcgcgcgtctcgtcgctgcaagggcgcatagagcactaccggctgacgacgaccagctcgtcggccgaggtggcggtgacggcgtccaaggcgcaggtgcccgtcagctcgggcgcgaggctccggacgctgaactacgtggccaccgtggggctgggcggcggcgaggcgacggtgatcgtggacacggccagcgagctgacgtgggtgcagtgcgcgccgtgcgagtcgtgccacgaccagcagggcccgctgttcgacccgtcctcgtcgccgtcctacgccgcggtgccgtgcgactccccctcctgcgacgcgctgcagcagcagctggccacgggcgcgggcgcgccgccgtgcgacgccgggcggccggcggcctgcagctacgcgctcagctaccgcgacggctcctactcccgcggcgtgctggcgcacgacaggctgagcctggccggggaggtcatcgacggcttcgtgttcgggtgcggcaccagcaaccagggcccgccgttcggcggcacgtcgggcctcatggggctcggccgcagccagctctcgctcgtgtcgcagaccgtggaccagttcggcggcgtgttctcctactgcctcccgctcagcagggagtccgacgcgtcgggctcgctggtgctgggcgacgacccgtcggcgtaccgcaactcgaccccggtcgtgtacacctcgatggtgtccaactccgacccgctgctccaggggcccttctacctggtgaacctgaccgggatcacggtcggcggccaggaggtggagtccacgggcttctcggccagggcgatcgtcgactcgggcaccgtgatcaccagcctcgtgccgtcggtctacaacgccgtcagggccgagttcatgagccagctcgcggagtacccgcaggcgccagggttctccatcctcgacacctgcttcaacatgaccgggctcaaggaagtccaggtgcccagcctgactctcgtgttcgacggcggcgcggaggtggaggtggactccggcggcgtgctctacttcgtcagcagcgactcctcacaggtgtgcctggccgtggcctccctgaaatccgaggacgagacctccatcatcggcaactaccagcagaagaacctgagggtcgtcttcgacacctcggcgtctcaggttggtttcgcgcaggagacgtgtggttatatttgactttgactcggattgggattgggattgggatgcagcgggcggccatgggctctatatatgtgaatacctttatacttacttgcagatttgtttcgagattacccctggtgattggcaaatggtaacaaggtgttcagttgttgg

SEQ ID NO: 31716 - protein, 499 aa, Zea mays subsp. mays
  peptide (1)..(499): Ceres Seq. ID no. 12369272
  misc_feature (94)..(490): Pfam Name: Pfam Description:  Eukaryotic aspartyl protease
  misc_feature (62)..(496): NCBI GI NO: 18412482 NR Description: putative aspartyl protease; protein id:At1g79720
  misc_feature (68)..(496): NCBI GI NO: 25406599 NR Description: probable aspartyl proteinase, 105611-106921
  misc_feature (62)..(496): NCBI GI NO: 21595063 NR Description: putative aspartyl protease [Arabidopsis thaliana]
  misc_feature (93)..(496): NCBI GI NO: 7489168 NR Description: nucleoid DNA-binding protein cnd41
  misc_feature (93)..(496): NCBI GI NO: 24430421 NR Description: 41 kD chloroplast nucleoid DNA binding protein
  misc_feature (46)..(496): NCBI GI NO: 11358588 NR Description: nucleoid DNA-binding protein cnd41-like protein -Arabidopsis thaliana
  misc_feature (60)..(496): NCBI GI NO: 22326716 NR Description: nucleoid DNA-binding protein cnd41 - like protein
  misc_feature (68)..(496): NCBI GI NO: 34912520 NR Description: chloroplast nucleoid DNA-binding protein cnd41-like
  misc_feature (61)..(314): NCBI GI NO: 38344196 NR Description: OSJNBa0064G10.12
  misc_feature (342)..(496): NCBI GI NO: 38344196 NR Description: OSJNBa0064G10.12
MAWGACTAAAAALLLLLLLLAAAAAGGNGGVHCLDLDLEEGRRHHLSRRALQGRQRRHHLRSRAVGGATVLELRHHSFSPAPANSREEEADALLSADAARVSSLQGRIEHYRLTTTSSSAEVAVTASKAQVPVSSGARLRTLNYVATVGLGGGEATVIVDTASELTWVQCAPCESCHDQQGPLFDPSSSPSYAAVPCDSPSCDALQQQLATGAGAPPCDAGRPAACSYALSYRDGSYSRGVLAHDRLSLAGEVIDGFVFGCGTSNQGPPFGGTSGLMGLGRSQLSLVSQTVDQFGGVFSYCLPLSRESDASGSLVLGDDPSAYRNSTPVVYTSMVSNSDPLLQGPFYLVNLTGITVGGQEVESTGFSARAIVDSGTVITSLVPSVYNAVRAEFMSQLAEYPQAPGFSILDTCFNMTGLKEVQVPSLTLVFDGGAEVEVDSGGVLYFVSSDSSQVCLAVASLKSEDETSIIGNYQQKNLRVVFDTSASQVGFAQETCGYI

SEQ ID NO: 31717 - DNA, 1931 bp, Zea mays subsp. mays
  misc_feature (1)..(1931): Ceres Seq. ID no. 13636275
actactagtgatcagaccagtgagctagcgactgtaccatgcagcagctgtaggagagcctggtggtaggtaggataggagtagcgccagccgccaagtgcgcgtccgggctggctgcttcgacgagcaggagggagccgcaccgccgggctcccgcaatgtcgcctcctccgcccccgccgctgctgcgcaacgagctgtcgcgcaggacggcggtgctgggcctgcgcctgtgggtgctggtgggcatcgccgtcggggccgccttcgtgctgctcctcgtgctcatctccctccacctcgccgcggcgcggcggaggcggcccaggaagggcgtcgcgcacgcgccggcgggggcgccgccgctgtccccgtccaccatcccgcccgtgtccaaggagatccaggaggtggccgtccacgtcggctcgctccgccactacctggagacggggcacgcgttcctcaaggacggcggcgacggcgacggcgacggcgagtccgtggcgcacgggtcgcagcgcgtccacatcgaggccggcaagggccagcgcatggtcgcggcggcttccgacgcgctgtcggcggccgtgggccccgaggtgtcgcacctcggctggggccactggtacacgctgcgggagctggaggaggccaccgccgcgttcgctcccgagcacgtcgtcggcgagggcgggtacggcatcgtctaccgcggcgtcctcgccgacggctaccaggtcgccgtgaagaacctcctcaacaacaggggacaagccgagcgggagttcagggtggaggtggaggccatcggccgcgtccggcacaagaatctggtccggctactgggctactgcgccgagggcgcccaacggatacttgtgtacgagtacgtggacaacggcaacctcgagcagtggctgcacggcgacgtcggggcagtgagcccgctcacctgggacgtccggatgaacatcgtgctcggcatggccaaagggatcacgtacctgcacgaggggctggaacccaaggtggtgcacagggacatcaagtcgagcaacatcctgctggacaggaggtggaacccgaaggtctcggacttcggcctcgccaagctcctgggggcggacagcaactacgtcaccaccagagtgatgggaacgtttggctacggccccagagtacgctagcaccggcatgctgaacgagaggagcgacgtgtacagcttcgggatcctgatcatggagatcatctccggccgaagccccgtcgactacgccaggcctgccggagaggtaaaccttgtagagtggctcaagaacaaggtgaccaacagggactacgaggccatcgtggacccgaagctgccggagaagccgtcctccaaggcgctcaagaaggcgctcctggtcgcgctgaggtgcgtggatcccgactcgcagaaacggcccaagatggggcacgtaatccacatgctcgaagtcgacgacttcccgtatcgagaggatcgtcgaactcttcggccgggcaacggcagccccctggagaaggcgaggaatccggcggcggggtcatgcgacggcagcagctgctacgggggcgacacgaccaccgcgagcacgccgtccagactagtgcaggacatgtagtagtgatgtgtttgtagccagctgctgctggccttctgagctctgcctgcgggctgcggggcaacatggagatggacatgctgcaactctgctccgtcgttaattaaaggttcccttcctaggtgttgattttggactcaacagtgacttgacgtaagttttgccgcccgatggccaactgtttgtatagggaactgctgctcttcatctcaggccctaagtttgactgttctttgattcgcgtcatgatgtaaaaataaaagcgtgcgtctgtattggtc

SEQ ID NO: 31718 - protein, 343 aa, Zea mays subsp. mays
  peptide (1)..(343): Ceres Seq. ID no. 13636276
  misc_feature (173)..(338): Pfam Name: Pfam Description:  Protein kinase domain
  misc_feature (147)..(338): NCBI GI NO: 34897534 NR Description: OSJNBa0042L16.4
  misc_feature (12)..(85): NCBI GI NO: 34897534 NR Description: OSJNBa0042L16.4
  misc_feature (10)..(338): NCBI GI NO: 14194119 NR Description: At1g01540/F22L4_6 [Arabidopsis thaliana]
  misc_feature (10)..(338): NCBI GI NO: 15223428 NR Description: protein kinase family [Arabidopsis thaliana]
  misc_feature (7)..(338): NCBI GI NO: 15234142 NR Description: protein kinase family [Arabidopsis thaliana]
  misc_feature (10)..(338): NCBI GI NO: 15235432 NR Description: protein kinase family [Arabidopsis thaliana]
  misc_feature (127)..(338): NCBI GI NO: 37535714 NR Description: putative kinase
  misc_feature (10)..(118): NCBI GI NO: 37535714 NR Description: putative kinase
  misc_feature (14)..(338): NCBI GI NO: 37536398 NR Description: putative receptor-like protein kinase
  misc_feature (1)..(17): NCBI GI NO: 37536398 NR Description: putative receptor-like protein kinase
MSPPPPPPLLRNELSRRTAVLGLRLWVLVGIAVGAAFVLLLVLISLHLAAARRRRPRKGVAHAPAGAPPLSPSTIPPVSKEIQEVAVHVGSLRHYLETGHAFLKDGGDGDGDGESVAHGSQRVHIEAGKGQRMVAAASDALSAAVGPEVSHLGWGHWYTLRELEEATAAFAPEHVVGEGGYGIVYRGVLADGYQVAVKNLLNNRGQAEREFRVEVEAIGRVRHKNLVRLLGYCAEGAQRILVYEYVDNGNLEQWLHGDVGAVSPLTWDVRMNIVLGMAKGITYLHEGLEPKVVHRDIKSSNILLDRRWNPKVSDFGLAKLLGADSNYVTTRVMGTFGYGPRVR

SEQ ID NO: 31719 - protein, 211 aa, Zea mays subsp. mays
  peptide (1)..(211): Ceres Seq. ID no. 13636277
  misc_feature (41)..(206): Pfam Name: Pfam Description:  Protein kinase domain
  misc_feature (15)..(206): NCBI GI NO: 34897534 NR Description: OSJNBa0042L16.4
  misc_feature (1)..(206): NCBI GI NO: 14194119 NR Description: At1g01540/F22L4_6 [Arabidopsis thaliana]
  misc_feature (1)..(206): NCBI GI NO: 15223428 NR Description: protein kinase family [Arabidopsis thaliana]
  misc_feature (1)..(206): NCBI GI NO: 15234142 NR Description: protein kinase family [Arabidopsis thaliana]
  misc_feature (1)..(206): NCBI GI NO: 15235432 NR Description: protein kinase family [Arabidopsis thaliana]
  misc_feature (1)..(206): NCBI GI NO: 37535714 NR Description: putative kinase
  misc_feature (1)..(206): NCBI GI NO: 37536398 NR Description: putative receptor-like protein kinase
  misc_feature (1)..(206): NCBI GI NO: 25518287 NR Description: hypothetical protein F22L4
  misc_feature (10)..(206): NCBI GI NO: 15231637 NR Description: protein kinase family [Arabidopsis thaliana]
  misc_feature (1)..(206): NCBI GI NO: 30690058 NR Description: protein kinase family [Arabidopsis thaliana]
MVAAASDALSAAVGPEVSHLGWGHWYTLRELEEATAAFAPEHVVGEGGYGIVYRGVLADGYQVAVKNLLNNRGQAEREFRVEVEAIGRVRHKNLVRLLGYCAEGAQRILVYEYVDNGNLEQWLHGDVGAVSPLTWDVRMNIVLGMAKGITYLHEGLEPKVVHRDIKSSNILLDRRWNPKVSDFGLAKLLGADSNYVTTRVMGTFGYGPRVR

SEQ ID NO: 31720 - DNA, 1250 bp, Zea mays subsp. mays
  misc_feature (1)..(1250): Ceres Seq. ID no. 12382282
aagaaaaggagaaccactgctcgcgctttgcaccagaccactagctccgagaagcggcaggcaggcaggcactcgaacaaatcagcagagcagggacacatgatatatataatatataaaccgagagagcacagagcaacccaagagagcaactgagcagccagccgtggaggaagagatgtacccataccgcatgagcaacgtgatgatcgggtacctgaacctggccacgctcctggcctcgctccccatcatcggggcggggctgtggctggcaaggggtagctcctcctcctccaccaccacgtgctcgtcgatcctgcagacgccgctcctcgccgtgggcttcgcggcgctgctggtctcgctcgccggcttcgtgggcgcctgcttccacgtggcctgggcgctgcggctgtacctcgccgccgtcgcgctgctcgtcgccttcctcctcggcctcaccgcgttcggcttcgcggtcaccgcgggcggcggcggcgcgcaggtgtacggccggccgtaccgggagtaccgcgtcacggactactcggcgtggctccagaagcgcatgcaggacgacaggtactggcgccccgccctcgcctgcgtcgtcgggtccaaggcctgccccaagatccagaactggacgcccatggactacctccagcacgatctcacgccaatacagtccggctgctgcaagccgccgacggcgtgccagtacagcggaggcatgccagtcggggcgcaggacgaggactgctaccggtggaacaacgccccggacatcctctgctaccggtgcgactcgtgcagggccggcgtgatggagcaggtgcgccaggactggcacaagatctttgtgctcgacgtcgccgtgctcgccgctctcgtctgcatctgctcatgcgggtgctgcgccttcaggaacgctcgccgctcccggtcccagtacccatacggggtaaaccaaacgtccaagataaacccacgctgggactactggtggcgatgatggggtggtagaagagaacaaatctactaggctagctgtagcttctcaatgcctgtatgatattttgatccaatcttctgtggaaaaaagataaaataacacttgggatctgtatgtgttattagcccctgtggtactatgtttgtttccaggtctgcagagtttagggtttagggtttctgtaaatatttgagttaagaggagactaagccatgaagtaaaagagatgcct

SEQ ID NO: 31721 - protein, 279 aa, Zea mays subsp. mays
  peptide (1)..(279): Ceres Seq. ID no. 12382283
  misc_feature (7)..(239): Pfam Name: Pfam Description:  Tetraspanin family
  misc_feature (6)..(278): NCBI GI NO: 34906104 NR Description: putative senescence-assocated protein
  misc_feature (4)..(279): NCBI GI NO: 30682045 NR Description: senescence-associated protein family
  misc_feature (4)..(278): NCBI GI NO: 9294106 NR Description: senescence-associated protein-like
  misc_feature (5)..(279): NCBI GI NO: 28392978 NR Description: unknown protein [Arabidopsis thaliana]
  misc_feature (4)..(260): NCBI GI NO: 29367553 NR Description: senescence-associated protein-like protein
  misc_feature (5)..(272): NCBI GI NO: 15231187 NR Description: putative protein; protein id: At3g45600
  misc_feature (1)..(252): NCBI GI NO: 3551954 NR Description: senescence-associated protein 5
  misc_feature (7)..(263): NCBI GI NO: 15238641 NR Description: senescence-associated protein - like
  misc_feature (5)..(263): NCBI GI NO: 20197174 NR Description: hypothetical protein [Arabidopsis thaliana]
  misc_feature (6)..(253): NCBI GI NO: 15237490 NR Description: senescence-associated protein 5-like protein
MYPYRMSNVMIGYLNLATLLASLPIIGAGLWLARGSSSSSTTTCSSILQTPLLAVGFAALLVSLAGFVGACFHVAWALRLYLAAVALLVAFLLGLTAFGFAVTAGGGGAQVYGRPYREYRVTDYSAWLQKRMQDDRYWRPALACVVGSKACPKIQNWTPMDYLQHDLTPIQSGCCKPPTACQYSGGMPVGAQDEDCYRWNNAPDILCYRCDSCRAGVMEQVRQDWHKIFVLDVAVLAALVCICSCGCCAFRNARRSRSQYPYGVNQTSKINPRWDYWWR

SEQ ID NO: 31722 - protein, 274 aa, Zea mays subsp. mays
  peptide (1)..(274): Ceres Seq. ID no. 12382284
  misc_feature (2)..(234): Pfam Name: Pfam Description:  Tetraspanin family
  misc_feature (1)..(273): NCBI GI NO: 34906104 NR Description: putative senescence-assocated protein
  misc_feature (1)..(274): NCBI GI NO: 30682045 NR Description: senescence-associated protein family
  misc_feature (1)..(273): NCBI GI NO: 9294106 NR Description: senescence-associated protein-like
  misc_feature (1)..(274): NCBI GI NO: 28392978 NR Description: unknown protein [Arabidopsis thaliana]
  misc_feature (1)..(255): NCBI GI NO: 29367553 NR Description: senescence-associated protein-like protein
  misc_feature (1)..(267): NCBI GI NO: 15231187 NR Description: putative protein; protein id: At3g45600
  misc_feature (1)..(247): NCBI GI NO: 3551954 NR Description: senescence-associated protein 5
  misc_feature (2)..(258): NCBI GI NO: 15238641 NR Description: senescence-associated protein - like
  misc_feature (1)..(258): NCBI GI NO: 20197174 NR Description: hypothetical protein [Arabidopsis thaliana]
  misc_feature (1)..(248): NCBI GI NO: 15237490 NR Description: senescence-associated protein 5-like protein
MSNVMIGYLNLATLLASLPIIGAGLWLARGSSSSSTTTCSSILQTPLLAVGFAALLVSLAGFVGACFHVAWALRLYLAAVALLVAFLLGLTAFGFAVTAGGGGAQVYGRPYREYRVTDYSAWLQKRMQDDRYWRPALACVVGSKACPKIQNWTPMDYLQHDLTPIQSGCCKPPTACQYSGGMPVGAQDEDCYRWNNAPDILCYRCDSCRAGVMEQVRQDWHKIFVLDVAVLAALVCICSCGCCAFRNARRSRSQYPYGVNQTSKINPRWDYWWR

SEQ ID NO: 31723 - protein, 270 aa, Zea mays subsp. mays
  peptide (1)..(270): Ceres Seq. ID no. 12382285
  misc_feature (1)..(230): Pfam Name: Pfam Description:  Tetraspanin family
  misc_feature (1)..(269): NCBI GI NO: 34906104 NR Description: putative senescence-assocated protein
  misc_feature (1)..(270): NCBI GI NO: 30682045 NR Description: senescence-associated protein family
  misc_feature (1)..(269): NCBI GI NO: 9294106 NR Description: senescence-associated protein-like
  misc_feature (1)..(270): NCBI GI NO: 28392978 NR Description: unknown protein [Arabidopsis thaliana]
  misc_feature (1)..(251): NCBI GI NO: 29367553 NR Description: senescence-associated protein-like protein
  misc_feature (1)..(263): NCBI GI NO: 15231187 NR Description: putative protein; protein id: At3g45600
  misc_feature (1)..(243): NCBI GI NO: 3551954 NR Description: senescence-associated protein 5
  misc_feature (1)..(254): NCBI GI NO: 15238641 NR Description: senescence-associated protein - like
  misc_feature (1)..(254): NCBI GI NO: 20197174 NR Description: hypothetical protein [Arabidopsis thaliana]
  misc_feature (1)..(244): NCBI GI NO: 15237490 NR Description: senescence-associated protein 5-like protein
MIGYLNLATLLASLPIIGAGLWLARGSSSSSTTTCSSILQTPLLAVGFAALLVSLAGFVGACFHVAWALRLYLAAVALLVAFLLGLTAFGFAVTAGGGGAQVYGRPYREYRVTDYSAWLQKRMQDDRYWRPALACVVGSKACPKIQNWTPMDYLQHDLTPIQSGCCKPPTACQYSGGMPVGAQDEDCYRWNNAPDILCYRCDSCRAGVMEQVRQDWHKIFVLDVAVLAALVCICSCGCCAFRNARRSRSQYPYGVNQTSKINPRWDYWWR

SEQ ID NO: 31724 - DNA, 1697 bp, Zea mays subsp. mays
  misc_feature (1)..(1697): Ceres Seq. ID no. 12349504
ctactgctactgtcagtgtcggcacgaggaagtgtgctaagagaggagacagcatctggggtgcatggttcttcttcaatcactacttcaagcctgctcttgtggagaagccaaaggggaaggtgacgcgagacgcgtctgggagcatctcgggctttgacaagtccgatctacgccttgatgtcttcctggtgcagcatgacatggagaacatgtacatgtgggttttcaaggagcggcccgacaatgccctcgggaagatgcagctcaggagcttcatgaatgggcattccaagcacggggagccgtctttcccattcagtgctgataagggcttttccaggtcacaccgcatgcagcgaaagcaataccgggggctttcgaacccgcagtgccttcatgggattgagatcgtgggctcaccgaatttgtcagcagttcctgatgcagacttgaagaggtgggctgaacttacaggcagggaacttaatttctcaataccatctgaagccagcgactttgaggcatggaggaatcttcccagcactgattttgaacttgacaggtcacatccaccggcagcaaagagtgccactcatggatctcatagccataagaagggattgaatggttcaggtcttaacctttcaactccaccatcatcagacgatgggatggacctttcaccaaaatgtgccaaacgccgcaagggtttctttggccatggcgtagaggaggactgtgtgatggcaaacaattcttgttctgacagagagcaagaggtagaagctcacgccagcgagccatcatggatgcatgagttcaccggtgttgccaagcacgcaagcgggcctgtcactgctgccaagacaatatacgaggacgaggaagggtacctaatcgtggtgagcatgcttttctccgacccgcatagcgtcaaggtgtcctggaggaacacgctcacgcatggcatcgtgaagataacgtgcgtgagcactgcccggatgccctacatcaagagacacgacaggacgttcaagctgacggacccttcccccgagcactgccctcccggcgagtttgtgagggagatacctctggccacaaggattccagaagacgcgaagatcgaggcgtattacgacgagacgggaactggactggaaatcatggtcccaaagcaccgggttggaccggaggagcatgaagttcgggtgtgcatgaggcccccgcatcttggcgacagcgatcttgtgctatcctagaacgaggaaaacaggtagctttcggattttccagtgccatgtttattgccatgagatactcgaacgtaacaggtggtgccatggatcagtgagagccatcatatttgctgctaaacatgtagcttataagttgagaaattcttttcctccataagtccccgttcggttaggctggaataagactaggaactattccaggtgaccaattgttatactacaaattatacagttatttcagctgggatccttcctggagtagattcctgaataaccgaacgggacctaaaagttctgtggtttaggcgaaagttacctcctacctctgttaattccccccctcccctctgtacctctgttacacaagtacatcactattggcgatcttccttgactatctgaaagctggctagtgttaagattctgtgtatattc

SEQ ID NO: 31725 - protein, 420 aa, Zea mays subsp. mays
  peptide (1)..(420): Ceres Seq. ID no. 12349505
  misc_feature (4)..(420): NCBI GI NO: 34895866 NR Description: P0009G03.13
  misc_feature (7)..(420): NCBI GI NO: 34908142 NR Description: putative SLT1 protein
  misc_feature (6)..(420): NCBI GI NO: 18404463 NR Description: expressed protein; protein id: At2g37570
  misc_feature (6)..(420): NCBI GI NO: 11611667 NR Description: SLT1 protein [Nicotiana tabacum]
  misc_feature (9)..(409): NCBI GI NO: 18399669 NR Description: expressed protein; protein id: At3g12570
  misc_feature (9)..(413): NCBI GI NO: 11280862 NR Description: hypothetical protein T22P11
  misc_feature (9)..(413): NCBI GI NO: 18413934 NR Description: putative protein; protein id: At5g02480
TATVSVGTRKCAKRGDSIWGAWFFFNHYFKPALVEKPKGKVTRDASGSISGFDKSDLRLDVFLVQHDMENMYMWVFKERPDNALGKMQLRSFMNGHSKHGEPSFPFSADKGFSRSHRMQRKQYRGLSNPQCLHGIEIVGSPNLSAVPDADLKRWAELTGRELNFSIPSEASDFEAWRNLPSTDFELDRSHPPAAKSATHGSHSHKKGLNGSGLNLSTPPSSDDGMDLSPKCAKRRKGFFGHGVEEDCVMANNSCSDREQEVEAHASEPSWMHEFTGVAKHASGPVTAAKTIYEDEEGYLIVVSMLFSDPHSVKVSWRNTLTHGIVKITCVSTARMPYIKRHDRTFKLTDPSPEHCPPGEFVREIPLATRIPEDAKIEAYYDETGTGLEIMVPKHRVGPEEHEVRVCMRPPHLGDSDLVLS

SEQ ID NO: 31726 - protein, 353 aa, Zea mays subsp. mays
  peptide (1)..(353): Ceres Seq. ID no. 12349506
  misc_feature (1)..(353): NCBI GI NO: 34895866 NR Description: P0009G03.13
  misc_feature (1)..(353): NCBI GI NO: 34908142 NR Description: putative SLT1 protein
  misc_feature (1)..(353): NCBI GI NO: 18404463 NR Description: expressed protein; protein id: At2g37570
  misc_feature (1)..(353): NCBI GI NO: 11611667 NR Description: SLT1 protein [Nicotiana tabacum]
  misc_feature (1)..(342): NCBI GI NO: 18399669 NR Description: expressed protein; protein id: At3g12570
  misc_feature (1)..(346): NCBI GI NO: 11280862 NR Description: hypothetical protein T22P11
  misc_feature (1)..(346): NCBI GI NO: 18413934 NR Description: putative protein; protein id: At5g02480
MENMYMWVFKERPDNALGKMQLRSFMNGHSKHGEPSFPFSADKGFSRSHRMQRKQYRGLSNPQCLHGIEIVGSPNLSAVPDADLKRWAELTGRELNFSIPSEASDFEAWRNLPSTDFELDRSHPPAAKSATHGSHSHKKGLNGSGLNLSTPPSSDDGMDLSPKCAKRRKGFFGHGVEEDCVMANNSCSDREQEVEAHASEPSWMHEFTGVAKHASGPVTAAKTIYEDEEGYLIVVSMLFSDPHSVKVSWRNTLTHGIVKITCVSTARMPYIKRHDRTFKLTDPSPEHCPPGEFVREIPLATRIPEDAKIEAYYDETGTGLEIMVPKHRVGPEEHEVRVCMRPPHLGDSDLVLS

SEQ ID NO: 31727 - protein, 350 aa, Zea mays subsp. mays
  peptide (1)..(350): Ceres Seq. ID no. 12349507
  misc_feature (1)..(350): NCBI GI NO: 34895866 NR Description: P0009G03.13
  misc_feature (1)..(350): NCBI GI NO: 34908142 NR Description: putative SLT1 protein
  misc_feature (1)..(350): NCBI GI NO: 18404463 NR Description: expressed protein; protein id: At2g37570
  misc_feature (1)..(350): NCBI GI NO: 11611667 NR Description: SLT1 protein [Nicotiana tabacum]
  misc_feature (1)..(339): NCBI GI NO: 18399669 NR Description: expressed protein; protein id: At3g12570
  misc_feature (1)..(343): NCBI GI NO: 11280862 NR Description: hypothetical protein T22P11
  misc_feature (1)..(343): NCBI GI NO: 18413934 NR Description: putative protein; protein id: At5g02480
MYMWVFKERPDNALGKMQLRSFMNGHSKHGEPSFPFSADKGFSRSHRMQRKQYRGLSNPQCLHGIEIVGSPNLSAVPDADLKRWAELTGRELNFSIPSEASDFEAWRNLPSTDFELDRSHPPAAKSATHGSHSHKKGLNGSGLNLSTPPSSDDGMDLSPKCAKRRKGFFGHGVEEDCVMANNSCSDREQEVEAHASEPSWMHEFTGVAKHASGPVTAAKTIYEDEEGYLIVVSMLFSDPHSVKVSWRNTLTHGIVKITCVSTARMPYIKRHDRTFKLTDPSPEHCPPGEFVREIPLATRIPEDAKIEAYYDETGTGLEIMVPKHRVGPEEHEVRVCMRPPHLGDSDLVLS

SEQ ID NO: 31728 - DNA, 1828 bp, Zea mays subsp. mays
  misc_feature (1)..(1828): Ceres Seq. ID no. 12357360
aaaaaaaccagcgactcacacacccgcgcgccgcttctgtagggccccaaccaaccgcgcagggagaaaaccaccacagcacatgcagcgcctcgcctcctcccggaggctcctccaggccgcgctcgcccccgcccgggccaactccagcctctccgcggccgccgtcgccgcgcccgcgccagcgaatggcgccttcccgaagatgccggccttcgactacacgccgccgccgtacgacgggccgcgcgccgaggagatcttccggaagcgcgctcagttcctcagcccatccctttttcatttctacgatcgcccattgaacatagtcgaaggaaagatgcagtacctatttgatgaggatggccgtcgttacctggatgctttcggtggcattgcaacagtttgttgtgggcactgccatccagatgttgttgaagccatagtaaaccaggcaaagcggatccagcactccacagttctatatctcaatcatgcaattgcagattttgccgaggcattggcttccaaaatgcctggtgatctgaaggttgttttcttcacaaattcaggcacggaggcaaatgagcttgcactgatgattgcacggctttacactggttgcaatgacattatctctcttaggaatggataccatgggaatgctgctggaacaatgggtgctactgctcaatccaattggaaattcaatgttgttcagacgggagtacaccatgcgcttaatccagaccccttcagaggtgcttttggttctgacggggagaaatacgccagagatgttcaggaaatggtcgaatttggaactacagggagagttggtgggttcatttcggaagccatacagggggttggtggaatagtggaactggcaccaggatacttgcccgtggcatacagtatggtaaggaaagccggtgggctctgcatcgccgacgaagttcaggcaggagtcgcgagaactggaagccacttctggggattcgaagggcatggtgtcatcccggacatagtcaccatggccaagggtatcgggaatggcatacccataggagctgtagtaacgacgccagagatcgctcaggtgttgacccgcagaagctacttcaatacctttggtggtaaccctgtcagcactgcaggcgggcatgcggtgctcaaagtgctggagaaggagaagctccaggagaatgcgtttgttgtgggctcctacctaaaggaacagcttaacaatctgaaagacaagcatgagatcatcggtgacgttaggggcaaaggcttccttcttggagttgagctggtgacagaccatgaaaagaaaaccccagccaaagctgagatctcacgtgtcatgaaccatatgaaagatatgggagtgttggttggtaagggtggtttctacgggaacgtttttaggataacaccaccgttgtgcttcaccaaagaggattccgacttcttcattgaggtgatggacattgcgctctcgaagctgtgaggcaagcagggcgaagatgatgtgcaaaccctggtccgtcgccatgggatttttgcccatgaataatattaagattaatgagacagcacctcgttgtctcttaatctaagacgatgccatgtcatccggtggcatggtattcctaatcctacctgccaaatcactggtattgctcgctgtctcgtaatcagacccatggagcaatatgattcttgtaaactctagcttcatccaatctgttcctcctgatctaactagtctgaatagcagctgttcgtttgtgaccaatatcaacttcttttcagatgctcc

SEQ ID NO: 31729 - protein, 504 aa, Zea mays subsp. mays
  peptide (1)..(504): Ceres Seq. ID no. 12357361
  misc_feature (97)..(504): Pfam Name: Pfam Description:  Aminotransferase class-III
  misc_feature (28)..(504): NCBI GI NO: 15231974 NR Description: putative aminotransferase; protein id: At3g08860
  misc_feature (28)..(504): NCBI GI NO: 15224499 NR Description: putative beta-alanine-pyruvate aminotransferase
  misc_feature (28)..(504): NCBI GI NO: 15028237 NR Description: putative beta-alanine-pyruvate aminotransferase
  misc_feature (31)..(504): NCBI GI NO: 5731259 NR Description: alanine:glyoxylate aminotransferase 2 homolog
  misc_feature (31)..(504): NCBI GI NO: 18420498 NR Description: putative protein; protein id: At4g39660
  misc_feature (272)..(494): NCBI GI NO: 7434175 NR Description: hypothetical protein T19P19
  misc_feature (31)..(242): NCBI GI NO: 7434175 NR Description: hypothetical protein T19P19
  misc_feature (260)..(503): NCBI GI NO: 16198011 NR Description: LD24726p [Drosophila melanogaster]
  misc_feature (260)..(503): NCBI GI NO: 28574759 NR Description: CG11241-PA [Drosophila melanogaster]
  misc_feature (31)..(257): NCBI GI NO: 16198011 NR Description: LD24726p [Drosophila melanogaster]
KKPATHTPARRFCRAPTNRAGRKPPQHMQRLASSRRLLQAALAPARANSSLSAAAVAAPAPANGAFPKMPAFDYTPPPYDGPRAEEIFRKRAQFLSPSLFHFYDRPLNIVEGKMQYLFDEDGRRYLDAFGGIATVCCGHCHPDVVEAIVNQAKRIQHSTVLYLNHAIADFAEALASKMPGDLKVVFFTNSGTEANELALMIARLYTGCNDIISLRNGYHGNAAGTMGATAQSNWKFNVVQTGVHHALNPDPFRGAFGSDGEKYARDVQEMVEFGTTGRVGGFISEAIQGVGGIVELAPGYLPVAYSMVRKAGGLCIADEVQAGVARTGSHFWGFEGHGVIPDIVTMAKGIGNGIPIGAVVTTPEIAQVLTRRSYFNTFGGNPVSTAGGHAVLKVLEKEKLQENAFVVGSYLKEQLNNLKDKHEIIGDVRGKGFLLGVELVTDHEKKTPAKAEISRVMNHMKDMGVLVGKGGFYGNVFRITPPLCFTKEDSDFFIEVMDIALSKL

SEQ ID NO: 31730 - protein, 477 aa, Zea mays subsp. mays
  peptide (1)..(477): Ceres Seq. ID no. 12357362
  misc_feature (70)..(477): Pfam Name: Pfam Description:  Aminotransferase class-III
  misc_feature (1)..(477): NCBI GI NO: 15231974 NR Description: putative aminotransferase; protein id: At3g08860
  misc_feature (1)..(477): NCBI GI NO: 15224499 NR Description: putative beta-alanine-pyruvate aminotransferase
  misc_feature (1)..(477): NCBI GI NO: 15028237 NR Description: putative beta-alanine-pyruvate aminotransferase
  misc_feature (4)..(477): NCBI GI NO: 5731259 NR Description: alanine:glyoxylate aminotransferase 2 homolog
  misc_feature (4)..(477): NCBI GI NO: 18420498 NR Description: putative protein; protein id: At4g39660
  misc_feature (245)..(467): NCBI GI NO: 7434175 NR Description: hypothetical protein T19P19
  misc_feature (4)..(215): NCBI GI NO: 7434175 NR Description: hypothetical protein T19P19
  misc_feature (233)..(476): NCBI GI NO: 16198011 NR Description: LD24726p [Drosophila melanogaster]
  misc_feature (233)..(476): NCBI GI NO: 28574759 NR Description: CG11241-PA [Drosophila melanogaster]
  misc_feature (4)..(230): NCBI GI NO: 16198011 NR Description: LD24726p [Drosophila melanogaster]
MQRLASSRRLLQAALAPARANSSLSAAAVAAPAPANGAFPKMPAFDYTPPPYDGPRAEEIFRKRAQFLSPSLFHFYDRPLNIVEGKMQYLFDEDGRRYLDAFGGIATVCCGHCHPDVVEAIVNQAKRIQHSTVLYLNHAIADFAEALASKMPGDLKVVFFTNSGTEANELALMIARLYTGCNDIISLRNGYHGNAAGTMGATAQSNWKFNVVQTGVHHALNPDPFRGAFGSDGEKYARDVQEMVEFGTTGRVGGFISEAIQGVGGIVELAPGYLPVAYSMVRKAGGLCIADEVQAGVARTGSHFWGFEGHGVIPDIVTMAKGIGNGIPIGAVVTTPEIAQVLTRRSYFNTFGGNPVSTAGGHAVLKVLEKEKLQENAFVVGSYLKEQLNNLKDKHEIIGDVRGKGFLLGVELVTDHEKKTPAKAEISRVMNHMKDMGVLVGKGGFYGNVFRITPPLCFTKEDSDFFIEVMDIALSKL

SEQ ID NO: 31731 - protein, 436 aa, Zea mays subsp. mays
  peptide (1)..(436): Ceres Seq. ID no. 12357363
  misc_feature (29)..(436): Pfam Name: Pfam Description:  Aminotransferase class-III
  misc_feature (1)..(436): NCBI GI NO: 15231974 NR Description: putative aminotransferase; protein id: At3g08860
  misc_feature (1)..(436): NCBI GI NO: 15224499 NR Description: putative beta-alanine-pyruvate aminotransferase
  misc_feature (1)..(436): NCBI GI NO: 15028237 NR Description: putative beta-alanine-pyruvate aminotransferase
  misc_feature (1)..(436): NCBI GI NO: 5731259 NR Description: alanine:glyoxylate aminotransferase 2 homolog
  misc_feature (1)..(436): NCBI GI NO: 18420498 NR Description: putative protein; protein id: At4g39660
  misc_feature (204)..(426): NCBI GI NO: 7434175 NR Description: hypothetical protein T19P19
  misc_feature (1)..(174): NCBI GI NO: 7434175 NR Description: hypothetical protein T19P19
  misc_feature (192)..(435): NCBI GI NO: 16198011 NR Description: LD24726p [Drosophila melanogaster]
  misc_feature (192)..(435): NCBI GI NO: 28574759 NR Description: CG11241-PA [Drosophila melanogaster]
  misc_feature (1)..(189): NCBI GI NO: 16198011 NR Description: LD24726p [Drosophila melanogaster]
MPAFDYTPPPYDGPRAEEIFRKRAQFLSPSLFHFYDRPLNIVEGKMQYLFDEDGRRYLDAFGGIATVCCGHCHPDVVEAIVNQAKRIQHSTVLYLNHAIADFAEALASKMPGDLKVVFFTNSGTEANELALMIARLYTGCNDIISLRNGYHGNAAGTMGATAQSNWKFNVVQTGVHHALNPDPFRGAFGSDGEKYARDVQEMVEFGTTGRVGGFISEAIQGVGGIVELAPGYLPVAYSMVRKAGGLCIADEVQAGVARTGSHFWGFEGHGVIPDIVTMAKGIGNGIPIGAVVTTPEIAQVLTRRSYFNTFGGNPVSTAGGHAVLKVLEKEKLQENAFVVGSYLKEQLNNLKDKHEIIGDVRGKGFLLGVELVTDHEKKTPAKAEISRVMNHMKDMGVLVGKGGFYGNVFRITPPLCFTKEDSDFFIEVMDIALSKL

SEQ ID NO: 31732 - DNA, 1276 bp, Zea mays subsp. mays
  misc_feature (1)..(1276): Ceres Seq. ID no. 12365996
gtaggattgtgggactcccagctggtggagtggagcttccgagtgtccactccaattctccaacgccagggtgttgcagacttgcaggcagtggaacatggacaaggaaggcgacggccaccaccaccacgccatccgagtcccatccccagataacatagcaatggtggaggagacatcgcagccaaatggcgcaccgtcgctgagacggaaagcaggcgagatgatcgccacctccctggagacgtaccggagcaagcccttctccttctggctactcctgttcctgagcagcggcgccatgctcaccgcgttcccggcgtcgagcctcctgtcgcggctctactacaacgagggcgggcagagcaagtggatcctgtcgtgggcggccgtcgccggctggcccctgcccgcgctgctcctgctgccgctgtatctcctcggcagggcgtcgccgacgccgctgtcgctgtcgctgtgctcctggtacgtgctccttgggctcctcagcgccgccgacaacctcatgtacgcgtgggcctacgcgtacctcccggcgtccacggcctcgctcgtcgccgcgtcgtcgctcgccttctccgcgctcttcggccgcgccatcgccaagaaccggctcaacatgtcctcgctcaacgccgtcgtcgtgatcacggcgggcgtggtgatcgtcgcgctggactccgggtcggacaggccccccggcgtcacgccccgccagtacgcgctcggcttcgtcctggacgtgctcgggtcggcgctccacggcctcatcttcgcgctctccgagctcgtcttcgccagggccctcggtaggcgctcgttccacgtggtgctggagcagcaggcggcggtgtcgctctgcgccttcgccttcacctccgcgggcctcgccgtcgcggagggcttcccggccatgcggcgcgagtcggcacggtttgcgcacggtggccagccggcgtacgcgaacttgatggtgtggacggcactcacgttccagctgggcgtcctcggaggcaccggcgtgctgttcctggcgtccactgtcctcgccggcgtgctgaacgctgtcagggtgcccctgacgagcatcgccgcggtgatctggttccatgaccccatgagtggcttcaagatcttggctctggtcatcacggtgtgggggttcgcgtcctatattcttggacactcctcttttagaaaaacgtaacaaattagatatcatctcattgcaaaaaatgatgaaagattttaattc

SEQ ID NO: 31733 - protein, 376 aa, Zea mays subsp. mays
  peptide (1)..(376): Ceres Seq. ID no. 12365997
  misc_feature (201)..(372): Pfam Name: Pfam Description:  Domain of unknown function, DUF250
  misc_feature (69)..(372): NCBI GI NO: 15224103 NR Description: hypothetical protein; protein id: At2g24220.1
  misc_feature (54)..(376): NCBI GI NO: 15219436 NR Description: hypothetical protein; protein id: At1g44750
  misc_feature (26)..(370): NCBI GI NO: 38344290 NR Description: OSJNBa0013K16.22
  misc_feature (26)..(370): NCBI GI NO: 38605752 NR Description: OSJNBb0016D16.5
  misc_feature (23)..(367): NCBI GI NO: 30684325 NR Description: purine permease family [Arabidopsis thaliana]
  misc_feature (40)..(370): NCBI GI NO: 38344291 NR Description: OSJNBa0013K16.23
  misc_feature (40)..(370): NCBI GI NO: 38605752 NR Description: OSJNBb0016D16.5
  misc_feature (78)..(369): NCBI GI NO: 7620007 NR Description: purine permease [Arabidopsis thaliana]
  misc_feature (78)..(369): NCBI GI NO: 15217873 NR Description: purine permease; protein id: At1g28230
  misc_feature (78)..(369): NCBI GI NO: 15217872 NR Description: purine permease, putative; protein id: At1g28220.1
MDKEGDGHHHHAIRVPSPDNIAMVEETSQPNGAPSLRRKAGEMIATSLETYRSKPFSFWLLLFLSSGAMLTAFPASSLLSRLYYNEGGQSKWILSWAAVAGWPLPALLLLPLYLLGRASPTPLSLSLCSWYVLLGLLSAADNLMYAWAYAYLPASTASLVAASSLAFSALFGRAIAKNRLNMSSLNAVVVITAGVVIVALDSGSDRPPGVTPRQYALGFVLDVLGSALHGLIFALSELVFARALGRRSFHVVLEQQAAVSLCAFAFTSAGLAVAEGFPAMRRESARFAHGGQPAYANLMVWTALTFQLGVLGGTGVLFLASTVLAGVLNAVRVPLTSIAAVIWFHDPMSGFKILALVITVWGFASYILGHSSFRKT

SEQ ID NO: 31734 - protein, 354 aa, Zea mays subsp. mays
  peptide (1)..(354): Ceres Seq. ID no. 12365998
  misc_feature (179)..(350): Pfam Name: Pfam Description:  Domain of unknown function, DUF250
  misc_feature (47)..(350): NCBI GI NO: 15224103 NR Description: hypothetical protein; protein id: At2g24220.1
  misc_feature (32)..(354): NCBI GI NO: 15219436 NR Description: hypothetical protein; protein id: At1g44750
  misc_feature (4)..(348): NCBI GI NO: 38344290 NR Description: OSJNBa0013K16.22
  misc_feature (4)..(348): NCBI GI NO: 38605752 NR Description: OSJNBb0016D16.5
  misc_feature (1)..(345): NCBI GI NO: 30684325 NR Description: purine permease family [Arabidopsis thaliana]
  misc_feature (18)..(348): NCBI GI NO: 38344291 NR Description: OSJNBa0013K16.23
  misc_feature (18)..(348): NCBI GI NO: 38605752 NR Description: OSJNBb0016D16.5
  misc_feature (56)..(347): NCBI GI NO: 7620007 NR Description: purine permease [Arabidopsis thaliana]
  misc_feature (56)..(347): NCBI GI NO: 15217873 NR Description: purine permease; protein id: At1g28230
  misc_feature (56)..(347): NCBI GI NO: 15217872 NR Description: purine permease, putative; protein id: At1g28220.1
MVEETSQPNGAPSLRRKAGEMIATSLETYRSKPFSFWLLLFLSSGAMLTAFPASSLLSRLYYNEGGQSKWILSWAAVAGWPLPALLLLPLYLLGRASPTPLSLSLCSWYVLLGLLSAADNLMYAWAYAYLPASTASLVAASSLAFSALFGRAIAKNRLNMSSLNAVVVITAGVVIVALDSGSDRPPGVTPRQYALGFVLDVLGSALHGLIFALSELVFARALGRRSFHVVLEQQAAVSLCAFAFTSAGLAVAEGFPAMRRESARFAHGGQPAYANLMVWTALTFQLGVLGGTGVLFLASTVLAGVLNAVRVPLTSIAAVIWFHDPMSGFKILALVITVWGFASYILGHSSFRKT

SEQ ID NO: 31735 - protein, 334 aa, Zea mays subsp. mays
  peptide (1)..(334): Ceres Seq. ID no. 12365999
  misc_feature (159)..(330): Pfam Name: Pfam Description:  Domain of unknown function, DUF250
  misc_feature (27)..(330): NCBI GI NO: 15224103 NR Description: hypothetical protein; protein id: At2g24220.1
  misc_feature (12)..(334): NCBI GI NO: 15219436 NR Description: hypothetical protein; protein id: At1g44750
  misc_feature (1)..(328): NCBI GI NO: 38344290 NR Description: OSJNBa0013K16.22
  misc_feature (1)..(328): NCBI GI NO: 38605752 NR Description: OSJNBb0016D16.5
  misc_feature (1)..(325): NCBI GI NO: 30684325 NR Description: purine permease family [Arabidopsis thaliana]
  misc_feature (1)..(328): NCBI GI NO: 38344291 NR Description: OSJNBa0013K16.23
  misc_feature (1)..(328): NCBI GI NO: 38605752 NR Description: OSJNBb0016D16.5
  misc_feature (36)..(327): NCBI GI NO: 7620007 NR Description: purine permease [Arabidopsis thaliana]
  misc_feature (36)..(327): NCBI GI NO: 15217873 NR Description: purine permease; protein id: At1g28230
  misc_feature (36)..(327): NCBI GI NO: 15217872 NR Description: purine permease, putative; protein id: At1g28220.1
MIATSLETYRSKPFSFWLLLFLSSGAMLTAFPASSLLSRLYYNEGGQSKWILSWAAVAGWPLPALLLLPLYLLGRASPTPLSLSLCSWYVLLGLLSAADNLMYAWAYAYLPASTASLVAASSLAFSALFGRAIAKNRLNMSSLNAVVVITAGVVIVALDSGSDRPPGVTPRQYALGFVLDVLGSALHGLIFALSELVFARALGRRSFHVVLEQQAAVSLCAFAFTSAGLAVAEGFPAMRRESARFAHGGQPAYANLMVWTALTFQLGVLGGTGVLFLASTVLAGVLNAVRVPLTSIAAVIWFHDPMSGFKILALVITVWGFASYILGHSSFRKT

SEQ ID NO: 31736 - DNA, 1674 bp, Zea mays subsp. mays
  misc_feature (1)..(1674): Ceres Seq. ID no. 12405979
  misc_feature (1669)..(1669): n is a, c, t, g, unknown, or other
  misc_feature (1667)..(1667): n is a, c, t, g, unknown, or other
  misc_feature (1175)..(1175): n is a, c, t, g, unknown, or other
gcacgagaccattacctagaacatcctaatcgaaaagtttcgcctcgcgcctgccctgctgtcctgctgctgctattttgccattgcatccatttccgggggacggagtggaggagggcgtcgcctgcgctgcgttgcttcgcgtgggaagcgtagcgtgcttcgtttaggcctctcgccaatatccgagtgctaatctagagaggcctttggctttgccagacgcgcctgtacgcgccctttctgggaggcagccgcttgctctcgcctccaatggccgagatctgctgcgaagaagccaagtccacgccggcgaccgccgtggctgcggcttcagtctccgccacggccgctgcggccgccgccgtggcagtggcctcgtcggcgttagagaggaggcgacgcaggttggagatgaggaggttccgcgtcgcgggcgatcccgaggcgccggtcgcggaggacgtccgcgccgccaagcggcagaggctggcgcgcacgctgtccagcacctgccccgacgcgggctcaggctcgggctccggactcggactccgacaggcctgccctaccggagcggttgcccaggtacggggtcacctccgtctgcggccgacgccgcgagatggaggacacggtctccgttaggccggacttcgtgcccggcaccagcaaacaacacttcttcggcgtcttccgacggccacggctgctcccacgtagcaacgatgtgccagaacatgatgcacgaggtggtcgcggacgagcacaggaaggcagattgttctggcgaagagacggcgtggaaggccgtgatggagaggagcttcgcgcgactggacgagcaggccgccagctgggcgaccagccgcagccgcgacgagccctcctgcaggtgcgagcagcagaagcccttgcgttgcgatcacgtggggtccaccgccgtggtcgccgtcgtcagccccacccacgttgtcgtcgccaacgccggcgactcccgcgccgtcctatcccgcgccggcgtccccgttccgctgtccgtcgaccacaagcctgaccggcctgacgagctggcgcgcatcgaggcggcgggcggccgcgtcatttactgggacggtgctcgtgttctcggcgtcctcgccatgtctcgagccataggcgacggatacctgaanccgttcgtgtcgtcggagccggaggtaacggtgacggagcgcaccgacgacgacgagtgcctggtcctggccagcgacggcctgtgggacgtcgtgaccaacgagatggcgtgcgaggtcgtccgcgcgtgcttccacagcaacggtccgccggcgccggccgctcgggcgaacggcgcggccctcccggcagccgagaacggatccgcggtcgccgagggcgtgagcgtggaggattccgacaaggcgtgctccgacgcggccatgctgctggcgaagctggcgttggcccggcggagcgccgataatgttagcgtggtcgtcgtggatctccgccgggggatatgatttgccttcttttttagccctcttggaatccaagctaatttctcccccgttttcttccatacttttagttctgttttgatttagtattaatagtagttaccaatcagacgcttttcttctctcaaacgaggaattaaaagccantnggacc

SEQ ID NO: 31737 - protein, 264 aa, Zea mays subsp. mays
  peptide (1)..(264): Ceres Seq. ID no. 12405980
  misc_feature (1)..(253): Pfam Name: Pfam Description:  Protein phosphatase 2C
  misc_feature (1)..(264): NCBI GI NO: 34908256 NR Description: putative protein phosphatase 2C
  misc_feature (1)..(262): NCBI GI NO: 7768151 NR Description: protein phpsphatase 2C (PP2C) [Fagus sylvatica]
  misc_feature (1)..(264): NCBI GI NO: 10432446 NR Description: protein phosphatase 2C [Nicotiana tabacum]
  misc_feature (1)..(198): NCBI GI NO: 15227078 NR Description: protein phosphatase 2C
  misc_feature (229)..(262): NCBI GI NO: 15227078 NR Description: protein phosphatase 2C
  misc_feature (1)..(262): NCBI GI NO: 15237839 NR Description: protein phosphatase 2C
  misc_feature (1)..(262): NCBI GI NO: 16226419 NR Description: AT5g59220/mnc17_110 [Arabidopsis thaliana]
  misc_feature (1)..(262): NCBI GI NO: 33309516 NR Description: protein phosphatase 2C [Prunus avium]
  misc_feature (1)..(214): NCBI GI NO: 15229745 NR Description: protein phosphatase 2C
  misc_feature (227)..(262): NCBI GI NO: 15229745 NR Description: protein phosphatase 2C
  misc_feature (149)..(149): Xaa is any aa, unknown or other
MCQNMMHEVVADEHRKADCSGEETAWKAVMERSFARLDEQAASWATSRSRDEPSCRCEQQKPLRCDHVGSTAVVAVVSPTHVVVANAGDSRAVLSRAGVPVPLSVDHKPDRPDELARIEAAGGRVIYWDGARVLGVLAMSRAIGDGYLXPFVSSEPEVTVTERTDDDECLVLASDGLWDVVTNEMACEVVRACFHSNGPPAPAARANGAALPAAENGSAVAEGVSVEDSDKACSDAAMLLAKLALARRSADNVSVVVVDLRRGI

SEQ ID NO: 31738 - protein, 260 aa, Zea mays subsp. mays
  peptide (1)..(260): Ceres Seq. ID no. 12405981
  misc_feature (1)..(249): Pfam Name: Pfam Description:  Protein phosphatase 2C
  misc_feature (1)..(260): NCBI GI NO: 34908256 NR Description: putative protein phosphatase 2C
  misc_feature (1)..(258): NCBI GI NO: 7768151 NR Description: protein phpsphatase 2C (PP2C) [Fagus sylvatica]
  misc_feature (1)..(260): NCBI GI NO: 10432446 NR Description: protein phosphatase 2C [Nicotiana tabacum]
  misc_feature (1)..(194): NCBI GI NO: 15227078 NR Description: protein phosphatase 2C
  misc_feature (225)..(258): NCBI GI NO: 15227078 NR Description: protein phosphatase 2C
  misc_feature (1)..(258): NCBI GI NO: 15237839 NR Description: protein phosphatase 2C
  misc_feature (1)..(258): NCBI GI NO: 16226419 NR Description: AT5g59220/mnc17_110 [Arabidopsis thaliana]
  misc_feature (1)..(258): NCBI GI NO: 33309516 NR Description: protein phosphatase 2C [Prunus avium]
  misc_feature (1)..(210): NCBI GI NO: 15229745 NR Description: protein phosphatase 2C
  misc_feature (223)..(258): NCBI GI NO: 15229745 NR Description: protein phosphatase 2C
  misc_feature (145)..(145): Xaa is any aa, unknown or other
MMHEVVADEHRKADCSGEETAWKAVMERSFARLDEQAASWATSRSRDEPSCRCEQQKPLRCDHVGSTAVVAVVSPTHVVVANAGDSRAVLSRAGVPVPLSVDHKPDRPDELARIEAAGGRVIYWDGARVLGVLAMSRAIGDGYLXPFVSSEPEVTVTERTDDDECLVLASDGLWDVVTNEMACEVVRACFHSNGPPAPAARANGAALPAAENGSAVAEGVSVEDSDKACSDAAMLLAKLALARRSADNVSVVVVDLRRGI

SEQ ID NO: 31739 - protein, 259 aa, Zea mays subsp. mays
  peptide (1)..(259): Ceres Seq. ID no. 12405982
  misc_feature (1)..(248): Pfam Name: Pfam Description:  Protein phosphatase 2C
  misc_feature (1)..(259): NCBI GI NO: 34908256 NR Description: putative protein phosphatase 2C
  misc_feature (1)..(257): NCBI GI NO: 7768151 NR Description: protein phpsphatase 2C (PP2C) [Fagus sylvatica]
  misc_feature (1)..(259): NCBI GI NO: 10432446 NR Description: protein phosphatase 2C [Nicotiana tabacum]
  misc_feature (1)..(193): NCBI GI NO: 15227078 NR Description: protein phosphatase 2C
  misc_feature (224)..(257): NCBI GI NO: 15227078 NR Description: protein phosphatase 2C
  misc_feature (1)..(257): NCBI GI NO: 15237839 NR Description: protein phosphatase 2C
  misc_feature (1)..(257): NCBI GI NO: 16226419 NR Description: AT5g59220/mnc17_110 [Arabidopsis thaliana]
  misc_feature (1)..(257): NCBI GI NO: 33309516 NR Description: protein phosphatase 2C [Prunus avium]
  misc_feature (1)..(209): NCBI GI NO: 15229745 NR Description: protein phosphatase 2C
  misc_feature (222)..(257): NCBI GI NO: 15229745 NR Description: protein phosphatase 2C
  misc_feature (144)..(144): Xaa is any aa, unknown or other
MHEVVADEHRKADCSGEETAWKAVMERSFARLDEQAASWATSRSRDEPSCRCEQQKPLRCDHVGSTAVVAVVSPTHVVVANAGDSRAVLSRAGVPVPLSVDHKPDRPDELARIEAAGGRVIYWDGARVLGVLAMSRAIGDGYLXPFVSSEPEVTVTERTDDDECLVLASDGLWDVVTNEMACEVVRACFHSNGPPAPAARANGAALPAAENGSAVAEGVSVEDSDKACSDAAMLLAKLALARRSADNVSVVVVDLRRGI

SEQ ID NO: 31740 - DNA, 1446 bp, Zea mays subsp. mays
  misc_feature (1)..(1446): Ceres Seq. ID no. 12354451
acagctcgcgcgcgcaccagacagacgccttctccctctcccgcagtacagggtacagctcgcgctcacacaagacaccatctccctgcctgcgatccgatgcgtccaacgttttcagccggggtacggtcctaccaccgctgtgcctaataattggcggctagctagctagctagctgcagctgctgcgatcctggatcggcacagccggttcttgatgtggagggagcggcggcgggcgctgctcctgctggtggccggcgcggcgctgggactgatcggtgccgcgctcgcgagcgcgccgccggaggccgcgctgaaggtcgggttctaccatgcgacgtgccccatcgcggaggacgtggtcctcgccgagatgaggctcatcctcatggaggacgccacggtcgcgccgtccctgctccggatgcactaccacgactgcttcgtgcagggctgcgacgggtcgatcatgctccagtcgaggaagaaggggaaggcggagcgggacgcgctgcccaaccgtagcatgcgagggttcgacgccatcgagcggatcaaggcccggctcgagaccgtctgcccgctcaccgtctcctgcgccgacatcatcgccatggcggcgagggacgccgtctacctgagccacgggccgtggtacgacgtggagaccgggcggcgcgacggcaacgtcaccgtggccgagtacgtcgacaacgacctgccgccgccggactccaacattgtcgacgtgaagaccttcttcagcgtcaagtcgcttaactcgaaggacatcgccgtcctcttcgggtgccacagcatcgggacctcccactgcggcccgatccagaagcggctctacaacttcaccggcaacatggacggccaggacccgtcgctggacccggcctacgccgccgagctcaggaagctctgcccgcctcccagacccggcgacgatgctaggaaggtcaaggtgcctttggaccccggcagcaactacaccttcgacctgagctactaccgccacgtgctcgccacgggcgggctgttccagtccgacggcagcctcctgcacgaccccgtcaccagaggctacgtcgagaaggtggccaaggcgtcgtcgcccgacgagtactacgcggacttcgccgcggcgatggtcaagatgggccgcaccgacgtgcttgtcggcgatcatggggagatcaggccaacgtgtggcatttttgttgactaggttcaggattgggttgaagatgcgaagataatctgtacgggtttctgtcaacgtgtactgtgcgtgctgttagatcagaaagagcacggtcgctgttaactgtgtatccgggaatgctgttctgttcacacacggtcgtcactgatctactgaattgtcagccatgatgtaattatttatctacgtattagttgtatattcttctc

SEQ ID NO: 31741 - protein, 340 aa, Zea mays subsp. mays
  peptide (1)..(340): Ceres Seq. ID no. 12354452
  misc_feature (50)..(301): Pfam Name: Pfam Description:  Peroxidase
  misc_feature (8)..(340): NCBI GI NO: 34908760 NR Description: Peroxidase-like protein
  misc_feature (16)..(340): NCBI GI NO: 34915488 NR Description: peroxidase-like protein
  misc_feature (12)..(340): NCBI GI NO: 39546236 NR Description: OSJNBa0089N06.6
  misc_feature (1)..(335): NCBI GI NO: 34915480 NR Description: putative peroxidase
  misc_feature (18)..(337): NCBI GI NO: 585661 NR Description: Peroxidase 1 precursor
  misc_feature (8)..(337): NCBI GI NO: 15220463 NR Description: peroxidase, putative; protein id: At1g05260
  misc_feature (8)..(337): NCBI GI NO: 21536908 NR Description: putative peroxidase [Arabidopsis thaliana]
  misc_feature (1)..(337): NCBI GI NO: 34915484 NR Description: putative peroxidase
  misc_feature (10)..(337): NCBI GI NO: 27261038 NR Description: putative peroxidase
  misc_feature (1)..(340): NCBI GI NO: 4204761 NR Description: peroxidase precursor [Glycine max]
MWRERRRALLLLVAGAALGLIGAALASAPPEAALKVGFYHATCPIAEDVVLAEMRLILMEDATVAPSLLRMHYHDCFVQGCDGSIMLQSRKKGKAERDALPNRSMRGFDAIERIKARLETVCPLTVSCADIIAMAARDAVYLSHGPWYDVETGRRDGNVTVAEYVDNDLPPPDSNIVDVKTFFSVKSLNSKDIAVLFGCHSIGTSHCGPIQKRLYNFTGNMDGQDPSLDPAYAAELRKLCPPPRPGDDARKVKVPLDPGSNYTFDLSYYRHVLATGGLFQSDGSLLHDPVTRGYVEKVAKASSPDEYYADFAAAMVKMGRTDVLVGDHGEIRPTCGIFVD

SEQ ID NO: 31742 - protein, 287 aa, Zea mays subsp. mays
  peptide (1)..(287): Ceres Seq. ID no. 12354453
  misc_feature (1)..(248): Pfam Name: Pfam Description:  Peroxidase
  misc_feature (1)..(287): NCBI GI NO: 34908760 NR Description: Peroxidase-like protein
  misc_feature (1)..(287): NCBI GI NO: 34915488 NR Description: peroxidase-like protein
  misc_feature (1)..(287): NCBI GI NO: 39546236 NR Description: OSJNBa0089N06.6
  misc_feature (1)..(282): NCBI GI NO: 34915480 NR Description: putative peroxidase
  misc_feature (1)..(284): NCBI GI NO: 585661 NR Description: Peroxidase 1 precursor
  misc_feature (1)..(284): NCBI GI NO: 15220463 NR Description: peroxidase, putative; protein id: At1g05260
  misc_feature (1)..(284): NCBI GI NO: 21536908 NR Description: putative peroxidase [Arabidopsis thaliana]
  misc_feature (1)..(284): NCBI GI NO: 34915484 NR Description: putative peroxidase
  misc_feature (1)..(284): NCBI GI NO: 27261038 NR Description: putative peroxidase
  misc_feature (1)..(287): NCBI GI NO: 4204761 NR Description: peroxidase precursor [Glycine max]
MRLILMEDATVAPSLLRMHYHDCFVQGCDGSIMLQSRKKGKAERDALPNRSMRGFDAIERIKARLETVCPLTVSCADIIAMAARDAVYLSHGPWYDVETGRRDGNVTVAEYVDNDLPPPDSNIVDVKTFFSVKSLNSKDIAVLFGCHSIGTSHCGPIQKRLYNFTGNMDGQDPSLDPAYAAELRKLCPPPRPGDDARKVKVPLDPGSNYTFDLSYYRHVLATGGLFQSDGSLLHDPVTRGYVEKVAKASSPDEYYADFAAAMVKMGRTDVLVGDHGEIRPTCGIFVD

SEQ ID NO: 31743 - protein, 282 aa, Zea mays subsp. mays
  peptide (1)..(282): Ceres Seq. ID no. 12354454
  misc_feature (1)..(243): Pfam Name: Pfam Description:  Peroxidase
  misc_feature (1)..(282): NCBI GI NO: 34908760 NR Description: Peroxidase-like protein
  misc_feature (1)..(282): NCBI GI NO: 34915488 NR Description: peroxidase-like protein
  misc_feature (1)..(282): NCBI GI NO: 39546236 NR Description: OSJNBa0089N06.6
  misc_feature (1)..(277): NCBI GI NO: 34915480 NR Description: putative peroxidase
  misc_feature (1)..(279): NCBI GI NO: 585661 NR Description: Peroxidase 1 precursor
  misc_feature (1)..(279): NCBI GI NO: 15220463 NR Description: peroxidase, putative; protein id: At1g05260
  misc_feature (1)..(279): NCBI GI NO: 21536908 NR Description: putative peroxidase [Arabidopsis thaliana]
  misc_feature (1)..(279): NCBI GI NO: 34915484 NR Description: putative peroxidase
  misc_feature (1)..(279): NCBI GI NO: 27261038 NR Description: putative peroxidase
  misc_feature (1)..(282): NCBI GI NO: 4204761 NR Description: peroxidase precursor [Glycine max]
MEDATVAPSLLRMHYHDCFVQGCDGSIMLQSRKKGKAERDALPNRSMRGFDAIERIKARLETVCPLTVSCADIIAMAARDAVYLSHGPWYDVETGRRDGNVTVAEYVDNDLPPPDSNIVDVKTFFSVKSLNSKDIAVLFGCHSIGTSHCGPIQKRLYNFTGNMDGQDPSLDPAYAAELRKLCPPPRPGDDARKVKVPLDPGSNYTFDLSYYRHVLATGGLFQSDGSLLHDPVTRGYVEKVAKASSPDEYYADFAAAMVKMGRTDVLVGDHGEIRPTCGIFVD

SEQ ID NO: 31744 - DNA, 1390 bp, Zea mays subsp. mays
  misc_feature (1)..(1390): Ceres Seq. ID no. 12358650
attcggcctatcacaaccacttactctcgtgcgctctccgtgggagcgaggactcgcggccggcgcagcggcaggttctcctagatctccggtaacaaatggctgacggtgaggacattcagccccttgtttgtgacaatggaactggcatggtcaaggctggttttgctggtgacgatgcgccaagggctgttttcccaagcattgtcggacgcccccgtcacactggtgtgatggttggcatggggcagaaggatgcgtatgttggtgacgaggcccagtccaagaggggtatcctgactttgaagtaccccatcgaacatggtattgttagcaattgggatgacatggagaagatctggcaccacaccttctataatgaactccgtgtggcgcctgaagagcaccctgtgctgctgacggaagccccactcaaaccccaaagctaacagggagaagatgacccaaatcatgtttgagaccttcaatgttcctgccatgtatgtcgccatccaggctgtgctttccctgtacgccagtgggcgtacaactggtattgtgttggactctggtgatggtgtcagccacaccgtgccaatctacgaaggttatgcccttcctcatgccatcctgcgtcttgaccttgctgggcgtgacctgactgacagcctgatgaagatcctcaccgagagaggttactccttcaccaccacggccgaacgggaaatcgtacgggacatcaaggaaaagcttgcatacgtggctcttgactatgatcaggagctggagaacgccaagagcagctcatctgtggagaagagctacgagctgcctgatggccaggtgatcaccattggggcggagaggttccgatgccccgaggtcctcttccagccttccttcattggtatggaagctcctggcatccatgagaccacctacaactccatcatgaaatgcgacgtggatatcaggaaggacttgtatggtaacattgttctcagtggtggcacaaccatgttccctggcatcgctgaccgtatgagcaaggagatcaccgcccttgccccgagcagcatgaaaatcaaggtggtggctccacccgagaggaaatacagtgtctggataggagggtccatccttgcctccctgagcaccttccaacagatgtggatctcaaaggctgagtacgatgagtcaggaccagcgattgttcaccggaagtgcttctaagctcaagggcccccttcgtccccattctatgtattcctttccttgagtgcttttcttataagctactatgtttgagattgccggcctttgagcaggcaatgttgttggatctgtatcttgtggatcactacaatgcatgcgttgctccatcttcttt

SEQ ID NO: 31745 - protein, 257 aa, Zea mays subsp. mays
  peptide (1)..(257): Ceres Seq. ID no. 12358651
  misc_feature (1)..(257): Pfam Name: Pfam Description:  Actin
  misc_feature (1)..(257): NCBI GI NO: 9965319 NR Description: actin [Setaria italica]
  misc_feature (1)..(257): NCBI GI NO: 15076949 NR Description: actin [Musa x paradisiaca]
  misc_feature (1)..(257): NCBI GI NO: 15242516 NR Description: ACTIN 2/7 (sp|P53492); protein id: At5g09810
  misc_feature (1)..(257): NCBI GI NO: 24496452 NR Description: actin [Hordeum vulgare]
  misc_feature (1)..(257): NCBI GI NO: 37535954 NR Description: actin [Oryza sativa (japonica cultivar-group)]
  misc_feature (1)..(257): NCBI GI NO: 11276972 NR Description: actin [imported] - rape
  misc_feature (1)..(257): NCBI GI NO: 7960247 NR Description: actin-like protein [Phalaenopsis sp. 'True Lady']
  misc_feature (1)..(257): NCBI GI NO: 28301928 NR Description: actin [Oryza sativa (japonica cultivar-group)]
  misc_feature (1)..(257): NCBI GI NO: 11276968 NR Description: actin [imported] - Picea rubens
  misc_feature (1)..(242): NCBI GI NO: 11276980 NR Description: actin (ACT3) - Arabidopsis thaliana
MTQIMFETFNVPAMYVAIQAVLSLYASGRTTGIVLDSGDGVSHTVPIYEGYALPHAILRLDLAGRDLTDSLMKILTERGYSFTTTAEREIVRDIKEKLAYVALDYDQELENAKSSSSVEKSYELPDGQVITIGAERFRCPEVLFQPSFIGMEAPGIHETTYNSIMKCDVDIRKDLYGNIVLSGGTTMFPGIADRMSKEITALAPSSMKIKVVAPPERKYSVWIGGSILASLSTFQQMWISKAEYDESGPAIVHRKCF

SEQ ID NO: 31746 - protein, 253 aa, Zea mays subsp. mays
  peptide (1)..(253): Ceres Seq. ID no. 12358652
  misc_feature (1)..(253): Pfam Name: Pfam Description:  Actin
  misc_feature (1)..(253): NCBI GI NO: 9965319 NR Description: actin [Setaria italica]
  misc_feature (1)..(253): NCBI GI NO: 15076949 NR Description: actin [Musa x paradisiaca]
  misc_feature (1)..(253): NCBI GI NO: 15242516 NR Description: ACTIN 2/7 (sp|P53492); protein id: At5g09810
  misc_feature (1)..(253): NCBI GI NO: 24496452 NR Description: actin [Hordeum vulgare]
  misc_feature (1)..(253): NCBI GI NO: 37535954 NR Description: actin [Oryza sativa (japonica cultivar-group)]
  misc_feature (1)..(253): NCBI GI NO: 11276972 NR Description: actin [imported] - rape
  misc_feature (1)..(253): NCBI GI NO: 7960247 NR Description: actin-like protein [Phalaenopsis sp. 'True Lady']
  misc_feature (1)..(253): NCBI GI NO: 11276968 NR Description: actin [imported] - Picea rubens
  misc_feature (1)..(253): NCBI GI NO: 28301928 NR Description: actin [Oryza sativa (japonica cultivar-group)]
  misc_feature (1)..(238): NCBI GI NO: 11276980 NR Description: actin (ACT3) - Arabidopsis thaliana
MFETFNVPAMYVAIQAVLSLYASGRTTGIVLDSGDGVSHTVPIYEGYALPHAILRLDLAGRDLTDSLMKILTERGYSFTTTAEREIVRDIKEKLAYVALDYDQELENAKSSSSVEKSYELPDGQVITIGAERFRCPEVLFQPSFIGMEAPGIHETTYNSIMKCDVDIRKDLYGNIVLSGGTTMFPGIADRMSKEITALAPSSMKIKVVAPPERKYSVWIGGSILASLSTFQQMWISKAEYDESGPAIVHRKCF

SEQ ID NO: 31747 - protein, 244 aa, Zea mays subsp. mays
  peptide (1)..(244): Ceres Seq. ID no. 12358653
  misc_feature (1)..(244): Pfam Name: Pfam Description:  Actin
  misc_feature (1)..(244): NCBI GI NO: 9965319 NR Description: actin [Setaria italica]
  misc_feature (1)..(244): NCBI GI NO: 15076949 NR Description: actin [Musa x paradisiaca]
  misc_feature (1)..(244): NCBI GI NO: 15242516 NR Description: ACTIN 2/7 (sp|P53492); protein id: At5g09810
  misc_feature (1)..(244): NCBI GI NO: 24496452 NR Description: actin [Hordeum vulgare]
  misc_feature (1)..(244): NCBI GI NO: 37535954 NR Description: actin [Oryza sativa (japonica cultivar-group)]
  misc_feature (1)..(244): NCBI GI NO: 11276972 NR Description: actin [imported] - rape
  misc_feature (1)..(244): NCBI GI NO: 7960247 NR Description: actin-like protein [Phalaenopsis sp. 'True Lady']
  misc_feature (1)..(244): NCBI GI NO: 11276968 NR Description: actin [imported] - Picea rubens
  misc_feature (1)..(244): NCBI GI NO: 28301928 NR Description: actin [Oryza sativa (japonica cultivar-group)]
  misc_feature (1)..(229): NCBI GI NO: 11276980 NR Description: actin (ACT3) - Arabidopsis thaliana
MYVAIQAVLSLYASGRTTGIVLDSGDGVSHTVPIYEGYALPHAILRLDLAGRDLTDSLMKILTERGYSFTTTAEREIVRDIKEKLAYVALDYDQELENAKSSSSVEKSYELPDGQVITIGAERFRCPEVLFQPSFIGMEAPGIHETTYNSIMKCDVDIRKDLYGNIVLSGGTTMFPGIADRMSKEITALAPSSMKIKVVAPPERKYSVWIGGSILASLSTFQQMWISKAEYDESGPAIVHRKCF

SEQ ID NO: 31748 - DNA, 1140 bp, Zea mays subsp. mays
  misc_feature (1)..(1140): Ceres Seq. ID no. 12381143
accatcggaaaggccacagctagggttcgatacttcgatccccactccatctccaccgaagaccgtcgcgtcgctccgccaccgaagcagctcaaggactggctcgggtggggctgcgactgtcgcgcggttggatccggaggctatggagcagtgagctccgtagttgacggccacctcaatctccttggtgaatctgtatagatttctctataagatgagctggagatttcctctcttcggctctcagcagcagcaagcagatccaagtttccaggacatccctacgcagtcttggtaccctccctcggtggtaggttcctcttcacgtccatccacccctacctcttctagtgctagtctacaccaaagagcttcagatagtccgcagtcttcatcccgtgggcaaccatctcctgctgaggctgcagggataattgcccgtttgaaggataagagtattgaggagttacaaaggctattgaaagacagagaggcatataatgcattctttaactcacttgatcaagtgaaaacccagaacaatgtgcgtgatgagcttaaaaaagagacattgcaacttgcaagggaaaatttagaaaaggagcagcggattttggaacttaggaatcagtgcacaataattagaaccacggaactggctgctgctcaagaccgcctaactgatttggagaggcaaaaggatgatattatgaggtcctattcccctgccgcactgctcaacaagctccaaacatcaatggcaaagttggatgaggagtccgaggagctgcaccagaagttcctggagaaggacatcgaccttccaacctttgtgcagaagtacaagaagctccgcacggcttaccacaagcaggcgttgctccatctcgccggccagacatcactccgctgacatccggccaggcgtcatggcaactttgttgtatttctgctcgcctgttcttgttctacactatgcttggccctgttttacgagtgcagcctcttgtagggatttgccgaacatcagcggatattgcatgtatagttttatgtcttgcaaaaacgtcttatgtactctgtcctggtgtagtggtgtttacgtatctagtgtccaagttgggattcatttgtggt

SEQ ID NO: 31749 - protein, 232 aa, Zea mays subsp. mays
  peptide (1)..(232): Ceres Seq. ID no. 12381144
  misc_feature (5)..(230): NCBI GI NO: 15231750 NR Description: putative protein; protein id: At3g53120.1
  misc_feature (5)..(148): NCBI GI NO: 30686871 NR Description: expressed protein [Arabidopsis thaliana]
  misc_feature (5)..(139): NCBI GI NO: 30686868 NR Description: expressed protein [Arabidopsis thaliana]
  misc_feature (5)..(148): NCBI GI NO: 25408498 NR Description: hypothetical protein At2g36680
  misc_feature (72)..(218): NCBI GI NO: 21739818 NR Description: hypothetical protein [Homo sapiens]
  misc_feature (77)..(218): NCBI GI NO: 31088908 NR Description: RIKEN cDNA 5730409F24 [Mus musculus]
  misc_feature (77)..(218): NCBI GI NO: 18490855 NR Description: Similar to RIKEN cDNA 4930592A21 gene
  misc_feature (77)..(218): NCBI GI NO: 34861617 NR Description: similar to RIKEN cDNA 5730409F24
  misc_feature (2)..(220): NCBI GI NO: 39645505 NR Description: Unknown (protein for MGC:77637) [Danio rerio]
  misc_feature (2)..(220): NCBI GI NO: 37590372 NR Description: Unknown (protein for MGC:73244) [Danio rerio]
MSWRFPLFGSQQQQADPSFQDIPTQSWYPPSVVGSSSRPSTPTSSSASLHQRASDSPQSSSRGQPSPAEAAGIIARLKDKSIEELQRLLKDREAYNAFFNSLDQVKTQNNVRDELKKETLQLARENLEKEQRILELRNQCTIIRTTELAAAQDRLTDLERQKDDIMRSYSPAALLNKLQTSMAKLDEESEELHQKFLEKDIDLPTFVQKYKKLRTAYHKQALLHLAGQTSLR

SEQ ID NO: 31750 - protein, 122 aa, Zea mays subsp. mays
  peptide (1)..(122): Ceres Seq. ID no. 12381145
MRSPRSCTRSSWRRTSTFQPLCRSTRSSARLTTSRRCSISPARHHSADIRPGVMATLLYFCSPVLVLHYAWPCFTSAASCRDLPNISGYCMYSFMSCKNVLCTLSWCSGVYVSSVQVGIHLW

SEQ ID NO: 31751 - DNA, 1400 bp, Zea mays subsp. mays
  misc_feature (1)..(1400): Ceres Seq. ID no. 12356826
atcctgaacccgaaagctgaactaccacacacaacaaataactgacgcaggcgatccatcactccacagtgtccacacaccggtcggaaccgaggccaaccgccgccgccgccgccaatgtcgtcccctgcagcgccggtgcagccgccggcgccgcgcgcggtgcgcttcggcgtcctgggatgcgctgacatcgcgcgtaagatctcgcgcgcaatgctgatgctccctccgggcgccgccaccatcgccgccgtaggcagtcgctccgatgacaaggcccgccgcttcatctccgaaatcggcttccccgcggcgcgcgtccacgggtcctacgagtctctcctagaggacccggacgtggaggccgtgtacctcccgctccccactagtctccacgtgccctgggccacagccgtcgctgcgcgtggcaagcacctgctcctcgagaagcccaccgcgctctgcactgccgaactcgacgccatcctcagcgcctgcgacgcctccggggtccagttcatggacaccaccatgtggatccacaacccgcgcactgccaagatgcgggagatcgtcagcgacaaggacgcctttggcgacgtcagagtgataaacagtatgtgcagctttcgggcatccgaggaattcctcaagaatgacatcagggtaaagccagaccttgacgccttgggtgtcctcggtgatgttggatggtactgcatcctctcaatcctgtgggctgttgactatgagctgcctgagaccgtgatcgctcaccgccatcctgtcaagaaccaggctggcgtgctccttgcttgcggtgcgaccttgtactgggcagatggcaagactgcaaacttcaactgctcgtttcttgctaacctcgcctttgacgtgaccgtctatggcacaaacggcactctccatgtcactgacctggtcattccgtacgaagagagctctgcggagttcagtgtggcctcgaagtcaagcttcgtcaaacccaccatcggatgggatccattgccagagaagcatgttgttactactgatctgccacaggaggcactcatgatccaggaattcacaaggcttgtgcagaacgtccgcgccggtggcaggcctgagggtaagtggccggctatcacccggaagacgcaggtggtactggatgccgtgaaagcttctattgacaagggatctgaaccacttgaggttgccagctaaatacaacaaatgccagctccttgtgctaggtttgtacttaatggcttctactcgtatttgctgtcgcgcaaatgaaggtagtaattgtaatactgtcacgtaaattgaaactggtaattgtaataatcttaaggaatctggtcaaattgaggagaacatttttacagttc

SEQ ID NO: 31752 - protein, 370 aa, Zea mays subsp. mays
  peptide (1)..(370): Ceres Seq. ID no. 12356827
  misc_feature (151)..(263): Pfam Name: Pfam Description:  Oxidoreductase family
  misc_feature (1)..(325): NCBI GI NO: 37534168 NR Description: putative oxidoreductase
  misc_feature (16)..(369): NCBI GI NO: 15233990 NR Description: AX110P -like protein; protein id: At4g09670
  misc_feature (16)..(359): NCBI GI NO: 7488933 NR Description: protein AX110P - carrot
  misc_feature (37)..(369): NCBI GI NO: 21954073 NR Description: putative AX110P protein [Arabidopsis thaliana]
  misc_feature (16)..(366): NCBI GI NO: 18399170 NR Description: expressed protein; protein id: At1g34200
  misc_feature (16)..(366): NCBI GI NO: 25518452 NR Description: hypothetical protein F23M19.12
  misc_feature (14)..(364): NCBI GI NO: 15218937 NR Description: oxidoreductase, putative; protein id: At1g66130.1
  misc_feature (1)..(366): NCBI GI NO: 17549134 NR Description: CONSERVED HYPOTHETICAL PROTEIN
  misc_feature (17)..(358): NCBI GI NO: 32474689 NR Description: putative oxidoreductase [Pirellula sp.]
  misc_feature (16)..(279): NCBI GI NO: 15616405 NR Description: oxidoreductase [Bacillus halodurans]
MSSPAAPVQPPAPRAVRFGVLGCADIARKISRAMLMLPPGAATIAAVGSRSDDKARRFISEIGFPAARVHGSYESLLEDPDVEAVYLPLPTSLHVPWATAVAARGKHLLLEKPTALCTAELDAILSACDASGVQFMDTTMWIHNPRTAKMREIVSDKDAFGDVRVINSMCSFRASEEFLKNDIRVKPDLDALGVLGDVGWYCILSILWAVDYELPETVIAHRHPVKNQAGVLLACGATLYWADGKTANFNCSFLANLAFDVTVYGTNGTLHVTDLVIPYEESSAEFSVASKSSFVKPTIGWDPLPEKHVVTTDLPQEALMIQEFTRLVQNVRAGGRPEGKWPAITRKTQVVLDAVKASIDKGSEPLEVAS

SEQ ID NO: 31753 - protein, 337 aa, Zea mays subsp. mays
  peptide (1)..(337): Ceres Seq. ID no. 12356828
  misc_feature (118)..(230): Pfam Name: Pfam Description:  Oxidoreductase family
  misc_feature (1)..(292): NCBI GI NO: 37534168 NR Description: putative oxidoreductase
  misc_feature (1)..(336): NCBI GI NO: 15233990 NR Description: AX110P -like protein; protein id: At4g09670
  misc_feature (1)..(326): NCBI GI NO: 7488933 NR Description: protein AX110P - carrot
  misc_feature (4)..(336): NCBI GI NO: 21954073 NR Description: putative AX110P protein [Arabidopsis thaliana]
  misc_feature (1)..(333): NCBI GI NO: 18399170 NR Description: expressed protein; protein id: At1g34200
  misc_feature (1)..(333): NCBI GI NO: 25518452 NR Description: hypothetical protein F23M19.12
  misc_feature (1)..(331): NCBI GI NO: 15218937 NR Description: oxidoreductase, putative; protein id: At1g66130.1
  misc_feature (1)..(333): NCBI GI NO: 17549134 NR Description: CONSERVED HYPOTHETICAL PROTEIN
  misc_feature (1)..(325): NCBI GI NO: 32474689 NR Description: putative oxidoreductase [Pirellula sp.]
  misc_feature (1)..(246): NCBI GI NO: 15616405 NR Description: oxidoreductase [Bacillus halodurans]
MLMLPPGAATIAAVGSRSDDKARRFISEIGFPAARVHGSYESLLEDPDVEAVYLPLPTSLHVPWATAVAARGKHLLLEKPTALCTAELDAILSACDASGVQFMDTTMWIHNPRTAKMREIVSDKDAFGDVRVINSMCSFRASEEFLKNDIRVKPDLDALGVLGDVGWYCILSILWAVDYELPETVIAHRHPVKNQAGVLLACGATLYWADGKTANFNCSFLANLAFDVTVYGTNGTLHVTDLVIPYEESSAEFSVASKSSFVKPTIGWDPLPEKHVVTTDLPQEALMIQEFTRLVQNVRAGGRPEGKWPAITRKTQVVLDAVKASIDKGSEPLEVAS

SEQ ID NO: 31754 - protein, 335 aa, Zea mays subsp. mays
  peptide (1)..(335): Ceres Seq. ID no. 12356829
  misc_feature (116)..(228): Pfam Name: Pfam Description:  Oxidoreductase family
  misc_feature (1)..(290): NCBI GI NO: 37534168 NR Description: putative oxidoreductase
  misc_feature (1)..(334): NCBI GI NO: 15233990 NR Description: AX110P -like protein; protein id: At4g09670
  misc_feature (1)..(324): NCBI GI NO: 7488933 NR Description: protein AX110P - carrot
  misc_feature (2)..(334): NCBI GI NO: 21954073 NR Description: putative AX110P protein [Arabidopsis thaliana]
  misc_feature (1)..(331): NCBI GI NO: 18399170 NR Description: expressed protein; protein id: At1g34200
  misc_feature (1)..(331): NCBI GI NO: 25518452 NR Description: hypothetical protein F23M19.12
  misc_feature (1)..(329): NCBI GI NO: 15218937 NR Description: oxidoreductase, putative; protein id: At1g66130.1
  misc_feature (1)..(331): NCBI GI NO: 17549134 NR Description: CONSERVED HYPOTHETICAL PROTEIN
  misc_feature (1)..(323): NCBI GI NO: 32474689 NR Description: putative oxidoreductase [Pirellula sp.]
  misc_feature (1)..(244): NCBI GI NO: 15616405 NR Description: oxidoreductase [Bacillus halodurans]
MLPPGAATIAAVGSRSDDKARRFISEIGFPAARVHGSYESLLEDPDVEAVYLPLPTSLHVPWATAVAARGKHLLLEKPTALCTAELDAILSACDASGVQFMDTTMWIHNPRTAKMREIVSDKDAFGDVRVINSMCSFRASEEFLKNDIRVKPDLDALGVLGDVGWYCILSILWAVDYELPETVIAHRHPVKNQAGVLLACGATLYWADGKTANFNCSFLANLAFDVTVYGTNGTLHVTDLVIPYEESSAEFSVASKSSFVKPTIGWDPLPEKHVVTTDLPQEALMIQEFTRLVQNVRAGGRPEGKWPAITRKTQVVLDAVKASIDKGSEPLEVAS

SEQ ID NO: 31755 - DNA, 1015 bp, Zea mays subsp. mays
  misc_feature (1)..(1015): Ceres Seq. ID no. 12354274
attggaagccaccagcaagagaccaacagcaagggtgcgaagaaagggtggccccctagctagcctagctagagagagagagagtcatcataatactcagagagaagcacgagcacagctgcactagctagctactgcaaagaagcaagctctcgatcacaatggccgccattccttctctgctgcgtcgtcgactcgccattgtcatcgccaccaccgccatgctcgtcctgcttccctccccgtccgtcgccggcgaccccgacctgctccaggacatctgcgtcgcggacctcacgtccaccgtgaaggtgaacgggtacgcctgcaaggcggcggcggcggtgacggcggacgacttctacttcagcggcctaggcggcgcgggcaacacgagcgccagcgcctacggctccgcggtgacgggcgcgaacgtggagaaggtgccggggctgaacacgctgggcgtgtccatgtcgcgcatcgactacgcgccgggcgggggcctgaacccgccgcacacgcacccgcgcgccaccgagatggtgttcgtgctgcagggcaccctggacgtgggcttcgtcaccgccgccaacaaccgcctggtggcccgcaccctggcgcccggcgacgtgttcgtcttcccgcgcggcctcgtccacttccagcgcaacgccggcgacggccccgccgccgtcttgtccgcgttcaacagccagcttcccggcacgcagtccctcgccgccgcgctgttcgcggcgtcgcccgagctgcccgacgccgtgctcgccaaggcgttccaggtcggcaccaaggaggtggacaagatcaaggctaggctcgcgcccaaaaaggcctgaaggtcgtactgtttacgcggtcatccttgaatattttttttcccagattatgatttatgacttggttgctaccctgctgtacctccactaataagcaactgtctctgctagtctgctgcatgccttttatctgttatgtatgattcttcagctcc

SEQ ID NO: 31756 - protein, 232 aa, Zea mays subsp. mays
  peptide (1)..(232): Ceres Seq. ID no. 12354275
  misc_feature (73)..(221): Pfam Name: Pfam Description:  Cupin
  misc_feature (13)..(231): NCBI GI NO: 34904670 NR Description: putative germin protein
  misc_feature (15)..(226): NCBI GI NO: 34902528 NR Description: probable germin protein 4
  misc_feature (30)..(231): NCBI GI NO: 1934730 NR Description: germin-like protein [Arabidopsis thaliana]
  misc_feature (30)..(231): NCBI GI NO: 15228673 NR Description: germin-like protein (GLP10); protein id:At3g62020
  misc_feature (7)..(231): NCBI GI NO: 18202917 NR Description: Germin-like protein subfamily 2 member 2 precursor
  misc_feature (15)..(231): NCBI GI NO: 18203442 NR Description: Rhicadhesin receptor precursor
  misc_feature (18)..(231): NCBI GI NO: 15217561 NR Description: germin-like protein; protein id: At1g09560
  misc_feature (14)..(231): NCBI GI NO: 7447341 NR Description: germin homolog - potato
  misc_feature (7)..(231): NCBI GI NO: 26449711 NR Description: putative germin [Arabidopsis thaliana]
  misc_feature (14)..(231): NCBI GI NO: 34906612 NR Description: germin(oxalate oxidase)-like protein
MAAIPSLLRRRLAIVIATTAMLVLLPSPSVAGDPDLLQDICVADLTSTVKVNGYACKAAAAVTADDFYFSGLGGAGNTSASAYGSAVTGANVEKVPGLNTLGVSMSRIDYAPGGGLNPPHTHPRATEMVFVLQGTLDVGFVTAANNRLVARTLAPGDVFVFPRGLVHFQRNAGDGPAAVLSAFNSQLPGTQSLAAALFAASPELPDAVLAKAFQVGTKEVDKIKARLAPKKA

SEQ ID NO: 31757 - protein, 212 aa, Zea mays subsp. mays
  peptide (1)..(212): Ceres Seq. ID no. 12354276
  misc_feature (53)..(201): Pfam Name: Pfam Description:  Cupin
  misc_feature (1)..(211): NCBI GI NO: 34904670 NR Description: putative germin protein
  misc_feature (1)..(206): NCBI GI NO: 34902528 NR Description: probable germin protein 4
  misc_feature (10)..(211): NCBI GI NO: 1934730 NR Description: germin-like protein [Arabidopsis thaliana]
  misc_feature (10)..(211): NCBI GI NO: 15228673 NR Description: germin-like protein (GLP10); protein id:At3g62020
  misc_feature (1)..(211): NCBI GI NO: 18202917 NR Description: Germin-like protein subfamily 2 member 2 precursor
  misc_feature (1)..(211): NCBI GI NO: 18203442 NR Description: Rhicadhesin receptor precursor
  misc_feature (1)..(211): NCBI GI NO: 15217561 NR Description: germin-like protein; protein id: At1g09560
  misc_feature (1)..(211): NCBI GI NO: 7447341 NR Description: germin homolog - potato
  misc_feature (1)..(211): NCBI GI NO: 26449711 NR Description: putative germin [Arabidopsis thaliana]
  misc_feature (1)..(211): NCBI GI NO: 34906612 NR Description: germin(oxalate oxidase)-like protein
MLVLLPSPSVAGDPDLLQDICVADLTSTVKVNGYACKAAAAVTADDFYFSGLGGAGNTSASAYGSAVTGANVEKVPGLNTLGVSMSRIDYAPGGGLNPPHTHPRATEMVFVLQGTLDVGFVTAANNRLVARTLAPGDVFVFPRGLVHFQRNAGDGPAAVLSAFNSQLPGTQSLAAALFAASPELPDAVLAKAFQVGTKEVDKIKARLAPKKA

SEQ ID NO: 31758 - protein, 128 aa, Zea mays subsp. mays
  peptide (1)..(128): Ceres Seq. ID no. 12354277
  misc_feature (1)..(117): Pfam Name: Pfam Description:  Cupin
  misc_feature (1)..(127): NCBI GI NO: 34904670 NR Description: putative germin protein
  misc_feature (1)..(122): NCBI GI NO: 34902528 NR Description: probable germin protein 4
  misc_feature (1)..(127): NCBI GI NO: 1934730 NR Description: germin-like protein [Arabidopsis thaliana]
  misc_feature (1)..(127): NCBI GI NO: 15228673 NR Description: germin-like protein (GLP10); protein id:At3g62020
  misc_feature (1)..(127): NCBI GI NO: 18202917 NR Description: Germin-like protein subfamily 2 member 2 precursor
  misc_feature (1)..(127): NCBI GI NO: 18203442 NR Description: Rhicadhesin receptor precursor
  misc_feature (1)..(127): NCBI GI NO: 15217561 NR Description: germin-like protein; protein id: At1g09560
  misc_feature (1)..(127): NCBI GI NO: 7447341 NR Description: germin homolog - potato
  misc_feature (1)..(127): NCBI GI NO: 26449711 NR Description: putative germin [Arabidopsis thaliana]
  misc_feature (1)..(127): NCBI GI NO: 34906612 NR Description: germin(oxalate oxidase)-like protein
MSRIDYAPGGGLNPPHTHPRATEMVFVLQGTLDVGFVTAANNRLVARTLAPGDVFVFPRGLVHFQRNAGDGPAAVLSAFNSQLPGTQSLAAALFAASPELPDAVLAKAFQVGTKEVDKIKARLAPKKA

SEQ ID NO: 31759 - DNA, 1689 bp, Zea mays subsp. mays
  misc_feature (1)..(1689): Ceres Seq. ID no. 12413652
atcactgattctgattctgattccagccaccctgaccggcgaagcgcggctgacatttcccccccaccataccgccaccacctgagaagagatcgatccaatcagattaaccaattagcagggagggaggagaggggcaaaggcaatggccgggacggaggtggaggacccgccggcggcggcgttggaggtgcccgcgaaacgcggccttctgcggtacaactcgccgctggcgcaggtgtccctgctgggcctcatctgcttctgctgccccggcatgttcaacgcgctgtcgggcctcggcggcggaggccaggtcgaccccaccatcgccgacaacgccaacaccgcgctctacgcctgcttcgcggtgttcggcgtgctgggcggcgccgcgcacaacctgctgggcccgcgcgcgacgctgctggccggcgcgctcacgtacccgctctacgccggctccttcctctactacaaccaccgcccgggctcgcaggtgttccccgtcacggcgggcgccctgctcggcgccggcgcgggcttcctctgggcggcgcagggcgccgtcatgacgtcgtacccgccgcccaaccgccggggcacctacatctccctcttctggtgcctcttcaacctgggcggcgtcctcggcggcctcctccctttcgccctcaactacaaccgcggggacaagaaagggagcgtcagcgacggcacgtacatcgccttcatggcattcatgctcgtcggcgccgcgctcaccgtgctcgtgctgccgcccgccaggatcgtccgcgacgacggcaccagggccaccagggtcaccttctcctccccggccaccgagggcgccgagatcctcaagctcttcgccaactggaagatgctgctcgcgctgccggccgcctgggccagcaacttcttctacacctaccagttcaacaacgtcaacagcggcctcttcacgctccgcaccaggggcctcaacaacgtcttctactggggcgcgcagatgatcggctccgccggcatcggctacttcctcgacttcggcttcgccagccgccgaaagagggggctgttcggggtcgccgccgtcgccgccgtcggaacggccatctggggaggcggtctggccaaccagctcagctacaaagccgtgccggtggccgaccccatcgatttcaaggacggccaccgctacgccgggcccttcctgctctacttcagctacggactgctggatgccatgttccagagccttatctactggatcatcggcgcactcgccaacgactcccaaatcctcagcaggtacgtcgggttctacaagggagtgcagagtgcaggagcggcggtggcatggcaggtggacaggcgccacacgcccctcatgtcccagctgatcgtcaactgggggctcatgaccatcagctaccccttgcttgcgctgctggtgttcctggccgtgaaggacgagagctactcggtttcgtcggtggaggacggccgggagaaggacagcaagctgtccgcgccgaccagcttccactgatgaagaagaagaaggaggaaggatagaccaagatgcatgtcattgtaacacggtgtttccatccaagtaagttttagtagtagaaatcaagaaacaactggagtacctatacgaagaatatatatataccc

SEQ ID NO: 31760 - protein, 527 aa, Zea mays subsp. mays
  peptide (1)..(527): Ceres Seq. ID no. 12413653
  misc_feature (316)..(375): NCBI GI NO: 38346872 NR Description: OSJNBb0004G23.4
ITDSDSDSSHPDRRSAADISPPPYRHHLRRDRSNQINQLAGREERGKGNGRDGGGGPAGGGVGGARETRPSAVQLAAGAGVPAGPHLLLLPRHVQRAVGPRRRRPGRPHHRRQRQHRALRLLRGVRRAGRRRAQPAGPARDAAGRRAHVPALRRLLPLLQPPPGLAGVPRHGGRPARRRRGLPLGGAGRRHDVVPAAQPPGHLHLPLLVPLQPGRRPRRPPPFRPQLQPRGQERERQRRHVHRLHGIHARRRRAHRARAAARQDRPRRRHQGHQGHLLLPGHRGRRDPQALRQLEDAARAAGRLGQQLLLHLPVQQRQQRPLHAPHQGPQQRLLLGRADDRLRRHRLLPRLRLRQPPKEGAVRGRRRRRRRNGHLGRRSGQPAQLQSRAGGRPHRFQGRPPLRRALPALLQLRTAGCHVPEPYLLDHRRTRQRLPNPQQVRRVLQGSAECRSGGGMAGGQAPHAPHVPADRQLGAHDHQLPLACAAGVPGREGRELLGFVGGGRPGEGQQAVRADQLPLMKKKKEEG

SEQ ID NO: 31761 - protein, 470 aa, Zea mays subsp. mays
  peptide (1)..(470): Ceres Seq. ID no. 12413654
  misc_feature (17)..(264): NCBI GI NO: 38346872 NR Description: OSJNBb0004G23.4
  misc_feature (329)..(470): NCBI GI NO: 38346872 NR Description: OSJNBb0004G23.4
  misc_feature (24)..(447): NCBI GI NO: 18394560 NR Description: Expressed protein; protein id: At1g18000
  misc_feature (24)..(447): NCBI GI NO: 21536696 NR Description: unknown [Arabidopsis thaliana]
  misc_feature (25)..(447): NCBI GI NO: 40745401 NR Description: hypothetical protein AN1427.2
  misc_feature (25)..(445): NCBI GI NO: 38110995 NR Description: hypothetical protein MG06605.4
  misc_feature (2)..(464): NCBI GI NO: 40740559 NR Description: hypothetical protein AN8127.2
  misc_feature (23)..(455): NCBI GI NO: 19115917 NR Description: hypothetical protein [Schizosaccharomyces pombe]
  misc_feature (14)..(423): NCBI GI NO: 19114809 NR Description: hypothetical protein [Schizosaccharomyces pombe]
  misc_feature (8)..(444): NCBI GI NO: 40743917 NR Description: hypothetical protein AN2699.2
MAGTEVEDPPAAALEVPAKRGLLRYNSPLAQVSLLGLICFCCPGMFNALSGLGGGGQVDPTIADNANTALYACFAVFGVLGGAAHNLLGPRATLLAGALTYPLYAGSFLYYNHRPGSQVFPVTAGALLGAGAGFLWAAQGAVMTSYPPPNRRGTYISLFWCLFNLGGVLGGLLPFALNYNRGDKKGSVSDGTYIAFMAFMLVGAALTVLVLPPARIVRDDGTRATRVTFSSPATEGAEILKLFANWKMLLALPAAWASNFFYTYQFNNVNSGLFTLRTRGLNNVFYWGAQMIGSAGIGYFLDFGFASRRKRGLFGVAAVAAVGTAIWGGGLANQLSYKAVPVADPIDFKDGHRYAGPFLLYFSYGLLDAMFQSLIYWIIGALANDSQILSRYVGFYKGVQSAGAAVAWQVDRRHTPLMSQLIVNWGLMTISYPLLALLVFLAVKDESYSVSSVEDGREKDSKLSAPTSFH

SEQ ID NO: 31762 - protein, 426 aa, Zea mays subsp. mays
  peptide (1)..(426): Ceres Seq. ID no. 12413655
  misc_feature (1)..(220): NCBI GI NO: 38346872 NR Description: OSJNBb0004G23.4
  misc_feature (285)..(426): NCBI GI NO: 38346872 NR Description: OSJNBb0004G23.4
  misc_feature (1)..(403): NCBI GI NO: 18394560 NR Description: Expressed protein; protein id: At1g18000
  misc_feature (1)..(403): NCBI GI NO: 21536696 NR Description: unknown [Arabidopsis thaliana]
  misc_feature (1)..(403): NCBI GI NO: 40745401 NR Description: hypothetical protein AN1427.2
  misc_feature (1)..(401): NCBI GI NO: 38110995 NR Description: hypothetical protein MG06605.4
  misc_feature (1)..(420): NCBI GI NO: 40740559 NR Description: hypothetical protein AN8127.2
  misc_feature (1)..(411): NCBI GI NO: 19115917 NR Description: hypothetical protein [Schizosaccharomyces pombe]
  misc_feature (1)..(379): NCBI GI NO: 19114809 NR Description: hypothetical protein [Schizosaccharomyces pombe]
  misc_feature (1)..(400): NCBI GI NO: 40743917 NR Description: hypothetical protein AN2699.2
MFNALSGLGGGGQVDPTIADNANTALYACFAVFGVLGGAAHNLLGPRATLLAGALTYPLYAGSFLYYNHRPGSQVFPVTAGALLGAGAGFLWAAQGAVMTSYPPPNRRGTYISLFWCLFNLGGVLGGLLPFALNYNRGDKKGSVSDGTYIAFMAFMLVGAALTVLVLPPARIVRDDGTRATRVTFSSPATEGAEILKLFANWKMLLALPAAWASNFFYTYQFNNVNSGLFTLRTRGLNNVFYWGAQMIGSAGIGYFLDFGFASRRKRGLFGVAAVAAVGTAIWGGGLANQLSYKAVPVADPIDFKDGHRYAGPFLLYFSYGLLDAMFQSLIYWIIGALANDSQILSRYVGFYKGVQSAGAAVAWQVDRRHTPLMSQLIVNWGLMTISYPLLALLVFLAVKDESYSVSSVEDGREKDSKLSAPTSFH

SEQ ID NO: 31763 - DNA, 1326 bp, Zea mays subsp. mays
  misc_feature (1)..(1326): Ceres Seq. ID no. 12566342
gcacgagaccattacctagaacatcctaatcgaaaacttccgttacatcccaccatttgctgttcaccttccctcccgtttgcctcctctcgctgtctcgtagcttctttcctccggcgacggctgggcgagcggccgccagtcgggcccttcgtcggcgacgagcatccacctgcgcggcgccccatcttccgctccttcccttactcgcgctcggcacacaggcgacggcggcggcggcgctcaggatcgggctatcaccgacggggtccggcttctccgcccgcctctcgccactcgccactcgcctcgcgtcctcgcctccggtcctccgcacaccggccggtgatcctgcctctgtaggttttttgtgctatactttttagtggttctggccttcttgacacaatggtgaagctgacaatgatagctcgtgtcactgatggccttccactggcagaagggttggatgatgggcgagatctgaaggatgctgatttctataagcagcaagctaaacttattttcaagaacttgtcaaaagggcatcatgaagcttcacggatgtcaattgagacagggccctactatttccactacattattgagggcagagtatgttatctgactatgtgtgaccgctcttatccgaagaaacttgcattccagtacctagaagatctgaaaaatgaatttgagagggtcaatggcaaccaaattgaaactgctgcaaggccatatgcttttatcaagtttgatacattcatccagaagactaggaaactgtatttggatacaagaactcaaaggaacctcgcaaaactgaatgatgaactctatgaggtgcatcaaattatgactcgcaatgttcaagaggttcttggtgttggtgaaaagctagaccaggtcagtgaaatgtcaagcaggttgacttctgatacaagaatatacgcagataaggctaaggacctcaaccggcaggcgttgattcggaagtatgctcctgtcgccattgtcattggggtagtattgatgttgttttggctcaagaacaagatatggtgattgtacagtacgaaggatactgggccctgttacaacaccggagaagaacagatggagataaaaaccaggtctattctggaacaagatgctttggtgacttgtatcccgtatctgcccattcaagcgattacttaaactgcccttttgctcctccctataagctagtatcaaagtgaattcgttggagtgcagacctgataagagcatctccggaagtctttcaaaattcactctaaattgtcattttgagagtcatttgcc

SEQ ID NO: 31764 - protein, 218 aa, Zea mays subsp. mays
  peptide (1)..(218): Ceres Seq. ID no. 12566343
  misc_feature (1)..(218): NCBI GI NO: 28269424 NR Description: putative vesicle trafficking protein
  misc_feature (1)..(218): NCBI GI NO: 15221123 NR Description: putative vesicle transport protein
  misc_feature (1)..(218): NCBI GI NO: 34904386 NR Description: unnamed protein product
  misc_feature (62)..(218): NCBI GI NO: 25402691 NR Description: hypothetical protein
  misc_feature (1)..(64): NCBI GI NO: 25402691 NR Description: hypothetical protein
  misc_feature (1)..(121): NCBI GI NO: 34015230 NR Description: putative vesicle trafficking protein
  misc_feature (1)..(121): NCBI GI NO: 35215218 NR Description: putative vesicle trafficking protein
  misc_feature (1)..(212): NCBI GI NO: 4759086 NR Description: vesicle trafficking protein sec22b [Homo sapiens]
  misc_feature (1)..(212): NCBI GI NO: 14290512 NR Description: SEC22 vesicle trafficking protein-like 1 (S
  misc_feature (1)..(212): NCBI GI NO: 1927215 NR Description: ERS-24 [Cricetulus griseus]
MVKLTMIARVTDGLPLAEGLDDGRDLKDADFYKQQAKLIFKNLSKGHHEASRMSIETGPYYFHYIIEGRVCYLTMCDRSYPKKLAFQYLEDLKNEFERVNGNQIETAARPYAFIKFDTFIQKTRKLYLDTRTQRNLAKLNDELYEVHQIMTRNVQEVLGVGEKLDQVSEMSSRLTSDTRIYADKAKDLNRQALIRKYAPVAIVIGVVLMLFWLKNKIW

SEQ ID NO: 31765 - protein, 213 aa, Zea mays subsp. mays
  peptide (1)..(213): Ceres Seq. ID no. 12566344
  misc_feature (1)..(213): NCBI GI NO: 28269424 NR Description: putative vesicle trafficking protein
  misc_feature (1)..(213): NCBI GI NO: 15221123 NR Description: putative vesicle transport protein
  misc_feature (1)..(213): NCBI GI NO: 34904386 NR Description: unnamed protein product
  misc_feature (57)..(213): NCBI GI NO: 25402691 NR Description: hypothetical protein
  misc_feature (1)..(59): NCBI GI NO: 25402691 NR Description: hypothetical protein
  misc_feature (1)..(116): NCBI GI NO: 34015230 NR Description: putative vesicle trafficking protein
  misc_feature (1)..(116): NCBI GI NO: 35215218 NR Description: putative vesicle trafficking protein
  misc_feature (1)..(207): NCBI GI NO: 4759086 NR Description: vesicle trafficking protein sec22b [Homo sapiens]
  misc_feature (1)..(207): NCBI GI NO: 14290512 NR Description: SEC22 vesicle trafficking protein-like 1 (S
  misc_feature (1)..(207): NCBI GI NO: 1927215 NR Description: ERS-24 [Cricetulus griseus]
MIARVTDGLPLAEGLDDGRDLKDADFYKQQAKLIFKNLSKGHHEASRMSIETGPYYFHYIIEGRVCYLTMCDRSYPKKLAFQYLEDLKNEFERVNGNQIETAARPYAFIKFDTFIQKTRKLYLDTRTQRNLAKLNDELYEVHQIMTRNVQEVLGVGEKLDQVSEMSSRLTSDTRIYADKAKDLNRQALIRKYAPVAIVIGVVLMLFWLKNKIW

SEQ ID NO: 31766 - protein, 166 aa, Zea mays subsp. mays
  peptide (1)..(166): Ceres Seq. ID no. 12566345
  misc_feature (1)..(166): NCBI GI NO: 28269424 NR Description: putative vesicle trafficking protein
  misc_feature (1)..(166): NCBI GI NO: 15221123 NR Description: putative vesicle transport protein
  misc_feature (1)..(166): NCBI GI NO: 34904386 NR Description: unnamed protein product
  misc_feature (10)..(166): NCBI GI NO: 25402691 NR Description: hypothetical protein
  misc_feature (1)..(12): NCBI GI NO: 25402691 NR Description: hypothetical protein
  misc_feature (1)..(69): NCBI GI NO: 34015230 NR Description: putative vesicle trafficking protein
  misc_feature (1)..(69): NCBI GI NO: 35215218 NR Description: putative vesicle trafficking protein
  misc_feature (1)..(160): NCBI GI NO: 4759086 NR Description: vesicle trafficking protein sec22b [Homo sapiens]
  misc_feature (1)..(160): NCBI GI NO: 14290512 NR Description: SEC22 vesicle trafficking protein-like 1 (S
  misc_feature (1)..(160): NCBI GI NO: 1927215 NR Description: ERS-24 [Cricetulus griseus]
MSIETGPYYFHYIIEGRVCYLTMCDRSYPKKLAFQYLEDLKNEFERVNGNQIETAARPYAFIKFDTFIQKTRKLYLDTRTQRNLAKLNDELYEVHQIMTRNVQEVLGVGEKLDQVSEMSSRLTSDTRIYADKAKDLNRQALIRKYAPVAIVIGVVLMLFWLKNKIW

SEQ ID NO: 31767 - DNA, 1887 bp, Zea mays subsp. mays
  misc_feature (1)..(1887): Ceres Seq. ID no. 12373110
gggccaagtcgcagacgcggagccaccgccattttttttactcccgaaaccaggcaggagggaggaggcgacgacatcgccatcacaccagatcactgaagaagagagaggcgcgtcgagtctccccaaagaacgagctagtacaaagtctcctcttcctttgactccgaatcccctagaccattgatggttgcgggggcaccggaaggagccactgacgatgggcctctgctcctcctccaccgccgcccgggccgcctccgaccccggcgccgcagccgcgggtgatgccgccgcggcaaagaaggggcgcgggatcgtcgcgtgcgggaagcggaccgacttcggatacgacaaggatttcgaggtgcgctactcgcttgggaagcttttgggccacggccagttcggctacacctttgccgccgtcgatcgcgcctccaccgagcgcgtcgccgtcaagcgcatcgacaagaataagatggtccttcctgttgctgttgaagacgtaaagagagaagttaaaatcttaaaggcattacaagggcacgaaaatgttgtacacttttacaatgcattcgaagatgacaactatgtttatatagtcatggaattatgtgagggtggcgagctacttgatcggatattagccaagaaagatagtcgttacagcgagaaagatgctgcagtagttgtccgacagatgctcaaggttgcagctgagtgccacctgcatggtttggttcatcgggacatgaaacctgagaacttcctattcaaatcaaaaaaggaggactcgccccttaaggctacagattttggtctttcagacttcataaaaccagggaggcaattccgtgacattgttggaagtgcctactacgtagcaccagaagtactcaaacgcaggtcagggccagaatccgatgtttggagtataggtgttataacctatattttgctgtgtggaagacgaccattctgggacaaaacagaagatgggatatttaaagaggtcttaaaaaagaagccagatttccgccgcaagccttggtcaaacattacttcgagtgcaaaagattttgtacaaaaattactagttaaggatccccgtgcaagactaactgctgcacaggcattatcacatgattgggtgagagaaggaggaaaggcatctgaaatacccttggatatatcagtattacataatatgcgtcagtttgtgaaatacagtcgtttcaagcaatttgctttaagggcattagcatctacattaaactcagaagagatgtctgatcttcgtgatcaattcaatgccattgatgttgacaaaaatggaacgattagtcttgaggaactgaagcaggctcttgcaaaggatgttccatggagattaaagggtccacgtgttttagagatcattgaagcgattgacagtaatacagatgggctagttgattttgaggagtttgttgctgcaacactacacgtgcatcagctggtggaacatgatactgagaagtggaaatcattgtctcaagctgcatttgataaatttgatgttgacagagatggctacatcacacctgatgaacttagaatgcatacaggaatgaagggttctattgatcccctcctggaggaggctgacattgacaaagatggcaagataagcctagatgaatttcgccggctcttgaagactgcaagcatgagcgcacgcaatgtacaaactcctaggggtgttcgcaagtcatagttttctgttttttgtagttcacataactgaactagagagcagcagcacatgtgattggagaaaggcttttccatgtaaattagacaatcaataatacacatgaatggaggtaatccgtagttgttcct

SEQ ID NO: 31768 - protein, 512 aa, Zea mays subsp. mays
  peptide (1)..(512): Ceres Seq. ID no. 12373111
  misc_feature (52)..(312): Pfam Name: Pfam Description:  Protein kinase domain
  misc_feature (1)..(512): NCBI GI NO: 12592069 NR Description: calcium-dependent protein kinase [Oryza sativa]
  misc_feature (11)..(512): NCBI GI NO: 34902680 NR Description: similar to calcium-dependent protein kinase
  misc_feature (32)..(512): NCBI GI NO: 16904224 NR Description: calcium/calmodulin-dependent protein kinase CaMK2
  misc_feature (1)..(504): NCBI GI NO: 6689920 NR Description: calcium-dependent protein kinase [Oryza sativa]
  misc_feature (5)..(510): NCBI GI NO: 15239300 NR Description: calcium-dependent protein kinase
  misc_feature (5)..(510): NCBI GI NO: 21553971 NR Description: calcium-dependent protein kinase
  misc_feature (1)..(508): NCBI GI NO: 15227920 NR Description: putative Ca2+-dependent ser/thr protein kinase
  misc_feature (26)..(509): NCBI GI NO: 3779218 NR Description: protein kinase CPK1 [Solanum tuberosum]
  misc_feature (31)..(512): NCBI GI NO: 15234291 NR Description: Calcium-dependent serine/threonine protein kinase
  misc_feature (1)..(507): NCBI GI NO: 33146627 NR Description: putative CDPK-related protein kinase
MGLCSSSTAARAASDPGAAAAGDAAAAKKGRGIVACGKRTDFGYDKDFEVRYSLGKLLGHGQFGYTFAAVDRASTERVAVKRIDKNKMVLPVAVEDVKREVKILKALQGHENVVHFYNAFEDDNYVYIVMELCEGGELLDRILAKKDSRYSEKDAAVVVRQMLKVAAECHLHGLVHRDMKPENFLFKSKKEDSPLKATDFGLSDFIKPGRQFRDIVGSAYYVAPEVLKRRSGPESDVWSIGVITYILLCGRRPFWDKTEDGIFKEVLKKKPDFRRKPWSNITSSAKDFVQKLLVKDPRARLTAAQALSHDWVREGGKASEIPLDISVLHNMRQFVKYSRFKQFALRALASTLNSEEMSDLRDQFNAIDVDKNGTISLEELKQALAKDVPWRLKGPRVLEIIEAIDSNTDGLVDFEEFVAATLHVHQLVEHDTEKWKSLSQAAFDKFDVDRDGYITPDELRMHTGMKGSIDPLLEEADIDKDGKISLDEFRRLLKTASMSARNVQTPRGVRKS

SEQ ID NO: 31769 - protein, 425 aa, Zea mays subsp. mays
  peptide (1)..(425): Ceres Seq. ID no. 12373112
  misc_feature (1)..(225): Pfam Name: Pfam Description:  Protein kinase domain
  misc_feature (1)..(425): NCBI GI NO: 12592069 NR Description: calcium-dependent protein kinase [Oryza sativa]
  misc_feature (1)..(425): NCBI GI NO: 34902680 NR Description: similar to calcium-dependent protein kinase
  misc_feature (1)..(425): NCBI GI NO: 16904224 NR Description: calcium/calmodulin-dependent protein kinase CaMK2
  misc_feature (1)..(417): NCBI GI NO: 6689920 NR Description: calcium-dependent protein kinase [Oryza sativa]
  misc_feature (1)..(423): NCBI GI NO: 15239300 NR Description: calcium-dependent protein kinase
  misc_feature (1)..(423): NCBI GI NO: 21553971 NR Description: calcium-dependent protein kinase
  misc_feature (1)..(421): NCBI GI NO: 15227920 NR Description: putative Ca2+-dependent ser/thr protein kinase
  misc_feature (1)..(422): NCBI GI NO: 3779218 NR Description: protein kinase CPK1 [Solanum tuberosum]
  misc_feature (1)..(425): NCBI GI NO: 15234291 NR Description: Calcium-dependent serine/threonine protein kinase
  misc_feature (1)..(420): NCBI GI NO: 33146627 NR Description: putative CDPK-related protein kinase
MVLPVAVEDVKREVKILKALQGHENVVHFYNAFEDDNYVYIVMELCEGGELLDRILAKKDSRYSEKDAAVVVRQMLKVAAECHLHGLVHRDMKPENFLFKSKKEDSPLKATDFGLSDFIKPGRQFRDIVGSAYYVAPEVLKRRSGPESDVWSIGVITYILLCGRRPFWDKTEDGIFKEVLKKKPDFRRKPWSNITSSAKDFVQKLLVKDPRARLTAAQALSHDWVREGGKASEIPLDISVLHNMRQFVKYSRFKQFALRALASTLNSEEMSDLRDQFNAIDVDKNGTISLEELKQALAKDVPWRLKGPRVLEIIEAIDSNTDGLVDFEEFVAATLHVHQLVEHDTEKWKSLSQAAFDKFDVDRDGYITPDELRMHTGMKGSIDPLLEEADIDKDGKISLDEFRRLLKTASMSARNVQTPRGVRKS

SEQ ID NO: 31770 - protein, 383 aa, Zea mays subsp. mays
  peptide (1)..(383): Ceres Seq. ID no. 12373113
  misc_feature (1)..(183): Pfam Name: Pfam Description:  Protein kinase domain
  misc_feature (1)..(383): NCBI GI NO: 12592069 NR Description: calcium-dependent protein kinase [Oryza sativa]
  misc_feature (1)..(383): NCBI GI NO: 34902680 NR Description: similar to calcium-dependent protein kinase
  misc_feature (1)..(383): NCBI GI NO: 16904224 NR Description: calcium/calmodulin-dependent protein kinase CaMK2
  misc_feature (1)..(375): NCBI GI NO: 6689920 NR Description: calcium-dependent protein kinase [Oryza sativa]
  misc_feature (1)..(381): NCBI GI NO: 15239300 NR Description: calcium-dependent protein kinase
  misc_feature (1)..(381): NCBI GI NO: 21553971 NR Description: calcium-dependent protein kinase
  misc_feature (1)..(379): NCBI GI NO: 15227920 NR Description: putative Ca2+-dependent ser/thr protein kinase
  misc_feature (1)..(380): NCBI GI NO: 3779218 NR Description: protein kinase CPK1 [Solanum tuberosum]
  misc_feature (1)..(383): NCBI GI NO: 15234291 NR Description: Calcium-dependent serine/threonine protein kinase
  misc_feature (1)..(378): NCBI GI NO: 33146627 NR Description: putative CDPK-related protein kinase
MELCEGGELLDRILAKKDSRYSEKDAAVVVRQMLKVAAECHLHGLVHRDMKPENFLFKSKKEDSPLKATDFGLSDFIKPGRQFRDIVGSAYYVAPEVLKRRSGPESDVWSIGVITYILLCGRRPFWDKTEDGIFKEVLKKKPDFRRKPWSNITSSAKDFVQKLLVKDPRARLTAAQALSHDWVREGGKASEIPLDISVLHNMRQFVKYSRFKQFALRALASTLNSEEMSDLRDQFNAIDVDKNGTISLEELKQALAKDVPWRLKGPRVLEIIEAIDSNTDGLVDFEEFVAATLHVHQLVEHDTEKWKSLSQAAFDKFDVDRDGYITPDELRMHTGMKGSIDPLLEEADIDKDGKISLDEFRRLLKTASMSARNVQTPRGVRKS

SEQ ID NO: 31771 - DNA, 1458 bp, Zea mays subsp. mays
  misc_feature (1)..(1458): Ceres Seq. ID no. 12349515
agggcaaagaggcgcgtgagaggtcggagcctgcaccgccgccgccatgctccgcctccaaaaacacctctcccttcgcctgcaagaacatctccttcccctgcaccgctccgcctccctcatacagctctccctccagcgctctctcctctccaccggctccgccacatattcctctccgggtcacttcgccgccgatgactacctcgtctccacatgtggcctcacccgggagcaagccgcgaatgccgccaagtgcatctcccactggaagtcgtcctccaacgccgacgccgtgctgtccttcctaaccggcccggcgctcggcctctccaatgctgagatcgcgctgctcgtggccaaagacccgcgcgtcctcagctgcagcgtcgacaacaccctgcgggcccgcttggcccgcttccgcagtcatggcttctccgccgcgcagatcagcgaattcgtccgcgtggccccctgcttctttcgcaaattcaacatcgacgtcaagctcggcttctggatgcccttcctcggctcgcccgacaggttcctccgcctcgtcaagcgtaacttctacctcctcagctccgacctcgacaaggtggtgaagcccaacatccagctgctccaggagtgcggtctatctatccaggagattgggagcctgtgcgtggctaacccgaggctgctcaccagcaagccggacagaatcagggccgtcctcgtgcgtgccggtgagatgggcgtgccccgcaagacgcttttgttcaggcacgctgtgaccgcggtggcgggcctctgtccggagacctttgcatctaagctcaagatgatggccaatattctcgggtgctcagaggctgaggttgccagaatggtgcaaaagaacccgttggtgctgaggcgctccatggagacgattcagcgcgcctgtgagttcctgatcaatgtggtcggtgtcggtaccaacttcattctggacaagcccacaatcctgatgtacagtctggaacgccggctggtgccccggcattacgtgatgaaggtgctccaggacaaaggattgatgcgaaaagatcatagcttctacactttggccgctattagtgctagcgtgttctgctccaggtatgtacatcctcataagaatgttcttcctaatcttgccgctgcatacgcatctggttgcaatgggaaaatagccatctgaggcgcgcgattccagcaaactggctatatgggcagcagctgcagttgtatcttgcatgtcattcttaacacattcagataccctgatgtgtactctgcgaggctgcagctccgtacttggctcatagcttcagaattgcagaaattcagcataacaagtttaagaactcatgaatgaccaaagcacgatgttgtcaatttcatataccttgtttaggattctggcgatgaattttatcgtgtttc

SEQ ID NO: 31772 - protein, 388 aa, Zea mays subsp. mays
  peptide (1)..(388): Ceres Seq. ID no. 12349516
  misc_feature (96)..(345): Pfam Name: Pfam Description:  mTERF
  misc_feature (14)..(364): NCBI GI NO: 39545750 NR Description: OSJNBb0034I13.16
  misc_feature (53)..(388): NCBI GI NO: 34394750 NR Description: unknown protein
  misc_feature (53)..(380): NCBI GI NO: 15218140 NR Description: hypothetical protein; protein id: At1g21150.1
  misc_feature (16)..(382): NCBI GI NO: 18415647 NR Description: expressed protein; protein id: At5g07900
  misc_feature (37)..(382): NCBI GI NO: 21553423 NR Description: unknown [Arabidopsis thaliana]
  misc_feature (37)..(382): NCBI GI NO: 15238313 NR Description: putative protein; protein id: At5g64950
  misc_feature (53)..(380): NCBI GI NO: 25511650 NR Description: T22I11.2 protein - Arabidopsis thaliana
  misc_feature (94)..(385): NCBI GI NO: 18412304 NR Description: expressed protein; protein id: At1g79220
  misc_feature (145)..(385): NCBI GI NO: 26450011 NR Description: unknown protein [Arabidopsis thaliana]
  misc_feature (145)..(385): NCBI GI NO: 15220660 NR Description: hypothetical protein; protein id: At1g61960.1
MLRLQKHLSLRLQEHLLPLHRSASLIQLSLQRSLLSTGSATYSSPGHFAADDYLVSTCGLTREQAANAAKCISHWKSSSNADAVLSFLTGPALGLSNAEIALLVAKDPRVLSCSVDNTLRARLARFRSHGFSAAQISEFVRVAPCFFRKFNIDVKLGFWMPFLGSPDRFLRLVKRNFYLLSSDLDKVVKPNIQLLQECGLSIQEIGSLCVANPRLLTSKPDRIRAVLVRAGEMGVPRKTLLFRHAVTAVAGLCPETFASKLKMMANILGCSEAEVARMVQKNPLVLRRSMETIQRACEFLINVVGVGTNFILDKPTILMYSLERRLVPRHYVMKVLQDKGLMRKDHSFYTLAAISASVFCSRYVHPHKNVLPNLAAAYASGCNGKIAI

SEQ ID NO: 31773 - protein, 229 aa, Zea mays subsp. mays
  peptide (1)..(229): Ceres Seq. ID no. 12349517
  misc_feature (1)..(186): Pfam Name: Pfam Description:  mTERF
  misc_feature (1)..(205): NCBI GI NO: 39545750 NR Description: OSJNBb0034I13.16
  misc_feature (1)..(229): NCBI GI NO: 34394750 NR Description: unknown protein
  misc_feature (1)..(221): NCBI GI NO: 15218140 NR Description: hypothetical protein; protein id: At1g21150.1
  misc_feature (1)..(223): NCBI GI NO: 18415647 NR Description: expressed protein; protein id: At5g07900
  misc_feature (1)..(223): NCBI GI NO: 21553423 NR Description: unknown [Arabidopsis thaliana]
  misc_feature (1)..(223): NCBI GI NO: 15238313 NR Description: putative protein; protein id: At5g64950
  misc_feature (1)..(221): NCBI GI NO: 25511650 NR Description: T22I11.2 protein - Arabidopsis thaliana
  misc_feature (1)..(226): NCBI GI NO: 18412304 NR Description: expressed protein; protein id: At1g79220
  misc_feature (1)..(226): NCBI GI NO: 26450011 NR Description: unknown protein [Arabidopsis thaliana]
  misc_feature (1)..(226): NCBI GI NO: 15220660 NR Description: hypothetical protein; protein id: At1g61960.1
MPFLGSPDRFLRLVKRNFYLLSSDLDKVVKPNIQLLQECGLSIQEIGSLCVANPRLLTSKPDRIRAVLVRAGEMGVPRKTLLFRHAVTAVAGLCPETFASKLKMMANILGCSEAEVARMVQKNPLVLRRSMETIQRACEFLINVVGVGTNFILDKPTILMYSLERRLVPRHYVMKVLQDKGLMRKDHSFYTLAAISASVFCSRYVHPHKNVLPNLAAAYASGCNGKIAI

SEQ ID NO: 31774 - DNA, 1103 bp, Zea mays subsp. mays; identical to SEQ ID NO: 24913
  misc_feature (1)..(1103): Ceres Seq. ID no. 12349943

SEQ ID NO: 31775 - protein, 296 aa, Zea mays subsp. mays; identical to SEQ ID NO: 24914
  peptide (1)..(296): Ceres Seq. ID no. 12349944
  misc_feature (98)..(294): Pfam Name: Pfam Description:  Mitochondrial glycoprotein
  misc_feature (24)..(296): NCBI GI NO: 34895742 NR Description: P0019D06.29
  misc_feature (24)..(294): NCBI GI NO: 34895730 NR Description: P0019D06.23
  misc_feature (90)..(296): NCBI GI NO: 11357566 NR Description: hypothetical protein F1I16
  misc_feature (90)..(296): NCBI GI NO: 18410318 NR Description: Expressed protein; protein id: At3g55605
  misc_feature (85)..(294): NCBI GI NO: 15239320 NR Description: putative protein; protein id: At5g05990
  misc_feature (48)..(295): NCBI GI NO: 34895740 NR Description: P0019D06.28
  misc_feature (30)..(294): NCBI GI NO: 15241669 NR Description: putative protein; protein id: At5g02050
  misc_feature (30)..(294): NCBI GI NO: 21592321 NR Description: unknown [Arabidopsis thaliana]
  misc_feature (171)..(296): NCBI GI NO: 7487698 NR Description: hypothetical protein At2g39790
  misc_feature (90)..(170): NCBI GI NO: 7487698 NR Description: hypothetical protein At2g39790

SEQ ID NO: 31776 - protein, 272 aa, Zea mays subsp. mays; identical to SEQ ID NO: 24915
  peptide (1)..(272): Ceres Seq. ID no. 12349945
  misc_feature (74)..(270): Pfam Name: Pfam Description:  Mitochondrial glycoprotein
  misc_feature (1)..(272): NCBI GI NO: 34895742 NR Description: P0019D06.29
  misc_feature (1)..(270): NCBI GI NO: 34895730 NR Description: P0019D06.23
  misc_feature (66)..(272): NCBI GI NO: 11357566 NR Description: hypothetical protein F1I16
  misc_feature (66)..(272): NCBI GI NO: 18410318 NR Description: Expressed protein; protein id: At3g55605
  misc_feature (61)..(270): NCBI GI NO: 15239320 NR Description: putative protein; protein id: At5g05990
  misc_feature (24)..(271): NCBI GI NO: 34895740 NR Description: P0019D06.28
  misc_feature (6)..(270): NCBI GI NO: 15241669 NR Description: putative protein; protein id: At5g02050
  misc_feature (6)..(270): NCBI GI NO: 21592321 NR Description: unknown [Arabidopsis thaliana]
  misc_feature (147)..(272): NCBI GI NO: 7487698 NR Description: hypothetical protein At2g39790
  misc_feature (66)..(146): NCBI GI NO: 7487698 NR Description: hypothetical protein At2g39790

SEQ ID NO: 31777 - protein, 270 aa, Zea mays subsp. mays; identical to SEQ ID NO: 24916
  peptide (1)..(270): Ceres Seq. ID no. 12349946
  misc_feature (72)..(268): Pfam Name: Pfam Description:  Mitochondrial glycoprotein
  misc_feature (1)..(270): NCBI GI NO: 34895742 NR Description: P0019D06.29
  misc_feature (1)..(268): NCBI GI NO: 34895730 NR Description: P0019D06.23
  misc_feature (64)..(270): NCBI GI NO: 11357566 NR Description: hypothetical protein F1I16
  misc_feature (64)..(270): NCBI GI NO: 18410318 NR Description: Expressed protein; protein id: At3g55605
  misc_feature (59)..(268): NCBI GI NO: 15239320 NR Description: putative protein; protein id: At5g05990
  misc_feature (22)..(269): NCBI GI NO: 34895740 NR Description: P0019D06.28
  misc_feature (4)..(268): NCBI GI NO: 15241669 NR Description: putative protein; protein id: At5g02050
  misc_feature (4)..(268): NCBI GI NO: 21592321 NR Description: unknown [Arabidopsis thaliana]
  misc_feature (145)..(270): NCBI GI NO: 7487698 NR Description: hypothetical protein At2g39790
  misc_feature (64)..(144): NCBI GI NO: 7487698 NR Description: hypothetical protein At2g39790

SEQ ID NO: 31778 - DNA, 1099 bp, Zea mays subsp. mays; identical to SEQ ID NO: 25190
  misc_feature (1)..(1099): Ceres Seq. ID no. 13577617

SEQ ID NO: 31779 - protein, 296 aa, Zea mays subsp. mays; identical to SEQ ID NO: 25191
  peptide (1)..(296): Ceres Seq. ID no. 13577618
  misc_feature (77)..(272): Pfam Name: NAP Pfam Description: Nucleosome assembly protein
  misc_feature (46)..(296): NCBI GI NO: 14550110 NR Description: nucleosome/chromatin assembly factor A [Zea mays]
  misc_feature (46)..(293): NCBI GI NO: 14550112 NR Description: nucleosome/chromatin assembly factor A [Zea mays]
  misc_feature (46)..(293): NCBI GI NO: 21739223 NR Description: OSJNBa0072F16.2
  misc_feature (51)..(296): NCBI GI NO: 25354177 NR Description: hypothetical protein F6A14.10
  misc_feature (51)..(296): NCBI GI NO: 18394656 NR Description: expressed protein [Arabidopsis thaliana]
  misc_feature (50)..(296): NCBI GI NO: 15221298 NR Description: SET protein, phospatase 2A inhibitor -related
  misc_feature (51)..(273): NCBI GI NO: 26451105 NR Description: unknown protein [Arabidopsis thaliana]
  misc_feature (46)..(293): NCBI GI NO: 2253411 NR Description: PP2A inhibitor [Tetraodon fluviatilis]
  misc_feature (46)..(293): NCBI GI NO: 28279779 NR Description: Similar to SET translocation
  misc_feature (46)..(295): NCBI GI NO: 2144100 NR Description: Set beta isoform - rat

SEQ ID NO: 31780 - protein, 251 aa, Zea mays subsp. mays; identical to SEQ ID NO: 25192
  peptide (1)..(251): Ceres Seq. ID no. 13577619
  misc_feature (32)..(227): Pfam Name: NAP Pfam Description: Nucleosome assembly protein
  misc_feature (1)..(251): NCBI GI NO: 14550110 NR Description: nucleosome/chromatin assembly factor A [Zea mays]
  misc_feature (1)..(248): NCBI GI NO: 14550112 NR Description: nucleosome/chromatin assembly factor A [Zea mays]
  misc_feature (1)..(248): NCBI GI NO: 21739223 NR Description: OSJNBa0072F16.2
  misc_feature (6)..(251): NCBI GI NO: 25354177 NR Description: hypothetical protein F6A14.10
  misc_feature (6)..(251): NCBI GI NO: 18394656 NR Description: expressed protein [Arabidopsis thaliana]
  misc_feature (5)..(251): NCBI GI NO: 15221298 NR Description: SET protein, phospatase 2A inhibitor -related
  misc_feature (6)..(228): NCBI GI NO: 26451105 NR Description: unknown protein [Arabidopsis thaliana]
  misc_feature (1)..(248): NCBI GI NO: 2253411 NR Description: PP2A inhibitor [Tetraodon fluviatilis]
  misc_feature (1)..(248): NCBI GI NO: 28279779 NR Description: Similar to SET translocation
  misc_feature (1)..(250): NCBI GI NO: 2144100 NR Description: Set beta isoform - rat

SEQ ID NO: 31781 - protein, 198 aa, Zea mays subsp. mays; identical to SEQ ID NO: 25193
  peptide (1)..(198): Ceres Seq. ID no. 13577620
  misc_feature (1)..(174): Pfam Name: NAP Pfam Description: Nucleosome assembly protein
  misc_feature (1)..(198): NCBI GI NO: 14550110 NR Description: nucleosome/chromatin assembly factor A [Zea mays]
  misc_feature (1)..(195): NCBI GI NO: 14550112 NR Description: nucleosome/chromatin assembly factor A [Zea mays]
  misc_feature (1)..(195): NCBI GI NO: 21739223 NR Description: OSJNBa0072F16.2
  misc_feature (1)..(198): NCBI GI NO: 25354177 NR Description: hypothetical protein F6A14.10
  misc_feature (1)..(198): NCBI GI NO: 18394656 NR Description: expressed protein [Arabidopsis thaliana]
  misc_feature (1)..(198): NCBI GI NO: 15221298 NR Description: SET protein, phospatase 2A inhibitor -related
  misc_feature (1)..(175): NCBI GI NO: 26451105 NR Description: unknown protein [Arabidopsis thaliana]
  misc_feature (1)..(195): NCBI GI NO: 2253411 NR Description: PP2A inhibitor [Tetraodon fluviatilis]
  misc_feature (1)..(195): NCBI GI NO: 28279779 NR Description: Similar to SET translocation
  misc_feature (1)..(197): NCBI GI NO: 2144100 NR Description: Set beta isoform - rat

SEQ ID NO: 31782 - DNA, 1626 bp, Zea mays subsp. mays
  misc_feature (1)..(1626): Ceres Seq. ID no. 12372619
ctctgattccttcctctcctctcgccccacgcccctctccatctgctcccgctccgcctcgcctagggttttgcccccaaacctagcctcccccgaatctcccacgccatggacgtcgagggcgaggtccccgccgccgccgcggcggcggtggcgaacggcctgggcggcgcgggcgcggaggaggcctctccgtcgccggtctcggctgagcagctcgacgtggaggcgtacgcggcgcagtactcggggcggacccgcctcgtgcgcctcctctttgtcgccgaccggtgcggggtggaggcgatgcagctcgaggcgctgcggatggcttacgacgagatcaagcgcggggaggacgtgcagctccaccgcgacgtcgtcaccaagatcggcggccgcctcggtccgcgctacggcctcgaccaggcgtgggtcttcagcgtctcccgccgcgccgaccagcgcaaggagaagctcgagagcgagctcaatggatacaggactaacttaatcaaagagagcatcagaatgggctacaatgacattggtgatttcttctatgcccatggccaactttcagatgctttcaaaagctacatcaggactcgggactattgcaccacttccaaacatatagttcagatgtgcatgaatgtgattctggttagcattgagctggggcaatatgcacatgtttcaaactatgtcagcaaagcagagcaaacccccgactctctggatcctaccattgttgcaaagctgaaggcagctgcaggattagccaacttggaaacaaagaaatacaaatttgctgctcgtaagtttgttgagacaggaattgaactaggaaacaacttctctgaagtcatagctcctcaagacgtggcagtctatggtgccctttgtgcacttgcttcttttgaccgttcagacctgaagagcaaagtcattgacaatatcaacttccgtaactttctggagctggtgcctgaagtaagggagctggttaatgatttttatgcaagtcgctatggatcttgcttgggtcatcttgagaagctaaagcctaacctgctcctggatatccatttgcatcagcatgtagagactctgtatatggagattcgccacaaagcgatcatacagtacacacttccttttatatctgttgacctcaacacgatggcagccgcctttaagacttcggtctccatgctgcagaaggagctggccgcactgattactgaggacaaaatacaggcccggatagactcccacaacaagatcctttacgcaaggcatgctgaccagagaaatgcaactttccagcgtgtccttcaaaccggcaatgactttgagagagatgtcaagtccatgcttctgcgtgccaacctcctcaagcatgattacattcagaagacaagcggaccaaggaagatgtaaagattgcgggcgtcgctgctaggcaaggcttcctgctgcatgcctctccacttttttttttgaagaattgttctgtgacataaaagggaccgaagtctgtctaaatgccctccccctctttctttttattggttgatgaaagttattgtcgaagtaatgtatggttgagcatctggatgt

SEQ ID NO: 31783 - protein, 445 aa, Zea mays subsp. mays
  peptide (1)..(445): Ceres Seq. ID no. 12372620
  misc_feature (295)..(399): Pfam Name: Pfam Description:  PCI domain
  misc_feature (1)..(445): NCBI GI NO: 7208213 NR Description: constitutive photomorphogenic 11
  misc_feature (1)..(445): NCBI GI NO: 10443485 NR Description: rCOP11 protein [Oryza sativa]
  misc_feature (23)..(445): NCBI GI NO: 432446 NR Description: FUS6
  misc_feature (23)..(445): NCBI GI NO: 18411857 NR Description: COP9 complex subunit, FUS6; protein id:At3g61140
  misc_feature (23)..(445): NCBI GI NO: 26450149 NR Description: putative FUSCA protein FUS6 [Arabidopsis thaliana]
  misc_feature (23)..(445): NCBI GI NO: 11282867 NR Description: FUSCA PROTEIN FUS6 - Arabidopsis thaliana
  misc_feature (103)..(440): NCBI GI NO: 24666528 NR Description: COP9 complex homolog subunit 1 CG3889-PA
  misc_feature (32)..(89): NCBI GI NO: 24666528 NR Description: COP9 complex homolog subunit 1 CG3889-PA
  misc_feature (103)..(440): NCBI GI NO: 4732103 NR Description: COP9 signalosome subunit 1 CSN1
  misc_feature (32)..(89): NCBI GI NO: 4732103 NR Description: COP9 signalosome subunit 1 CSN1
MDVEGEVPAAAAAAVANGLGGAGAEEASPSPVSAEQLDVEAYAAQYSGRTRLVRLLFVADRCGVEAMQLEALRMAYDEIKRGEDVQLHRDVVTKIGGRLGPRYGLDQAWVFSVSRRADQRKEKLESELNGYRTNLIKESIRMGYNDIGDFFYAHGQLSDAFKSYIRTRDYCTTSKHIVQMCMNVILVSIELGQYAHVSNYVSKAEQTPDSLDPTIVAKLKAAAGLANLETKKYKFAARKFVETGIELGNNFSEVIAPQDVAVYGALCALASFDRSDLKSKVIDNINFRNFLELVPEVRELVNDFYASRYGSCLGHLEKLKPNLLLDIHLHQHVETLYMEIRHKAIIQYTLPFISVDLNTMAAAFKTSVSMLQKELAALITEDKIQARIDSHNKILYARHADQRNATFQRVLQTGNDFERDVKSMLLRANLLKHDYIQKTSGPRKM

SEQ ID NO: 31784 - protein, 379 aa, Zea mays subsp. mays
  peptide (1)..(379): Ceres Seq. ID no. 12372621
  misc_feature (229)..(333): Pfam Name: Pfam Description:  PCI domain
  misc_feature (1)..(379): NCBI GI NO: 7208213 NR Description: constitutive photomorphogenic 11
  misc_feature (1)..(379): NCBI GI NO: 10443485 NR Description: rCOP11 protein [Oryza sativa]
  misc_feature (1)..(379): NCBI GI NO: 432446 NR Description: FUS6
  misc_feature (1)..(379): NCBI GI NO: 18411857 NR Description: COP9 complex subunit, FUS6; protein id:At3g61140
  misc_feature (1)..(379): NCBI GI NO: 26450149 NR Description: putative FUSCA protein FUS6 [Arabidopsis thaliana]
  misc_feature (1)..(379): NCBI GI NO: 11282867 NR Description: FUSCA PROTEIN FUS6 - Arabidopsis thaliana
  misc_feature (37)..(374): NCBI GI NO: 24666528 NR Description: COP9 complex homolog subunit 1 CG3889-PA
  misc_feature (1)..(23): NCBI GI NO: 24666528 NR Description: COP9 complex homolog subunit 1 CG3889-PA
  misc_feature (37)..(374): NCBI GI NO: 4732103 NR Description: COP9 signalosome subunit 1 CSN1
  misc_feature (1)..(23): NCBI GI NO: 4732103 NR Description: COP9 signalosome subunit 1 CSN1
MQLEALRMAYDEIKRGEDVQLHRDVVTKIGGRLGPRYGLDQAWVFSVSRRADQRKEKLESELNGYRTNLIKESIRMGYNDIGDFFYAHGQLSDAFKSYIRTRDYCTTSKHIVQMCMNVILVSIELGQYAHVSNYVSKAEQTPDSLDPTIVAKLKAAAGLANLETKKYKFAARKFVETGIELGNNFSEVIAPQDVAVYGALCALASFDRSDLKSKVIDNINFRNFLELVPEVRELVNDFYASRYGSCLGHLEKLKPNLLLDIHLHQHVETLYMEIRHKAIIQYTLPFISVDLNTMAAAFKTSVSMLQKELAALITEDKIQARIDSHNKILYARHADQRNATFQRVLQTGNDFERDVKSMLLRANLLKHDYIQKTSGPRKM

SEQ ID NO: 31785 - protein, 372 aa, Zea mays subsp. mays
  peptide (1)..(372): Ceres Seq. ID no. 12372622
  misc_feature (222)..(326): Pfam Name: Pfam Description:  PCI domain
  misc_feature (1)..(372): NCBI GI NO: 7208213 NR Description: constitutive photomorphogenic 11
  misc_feature (1)..(372): NCBI GI NO: 10443485 NR Description: rCOP11 protein [Oryza sativa]
  misc_feature (1)..(372): NCBI GI NO: 432446 NR Description: FUS6
  misc_feature (1)..(372): NCBI GI NO: 18411857 NR Description: COP9 complex subunit, FUS6; protein id:At3g61140
  misc_feature (1)..(372): NCBI GI NO: 26450149 NR Description: putative FUSCA protein FUS6 [Arabidopsis thaliana]
  misc_feature (1)..(372): NCBI GI NO: 11282867 NR Description: FUSCA PROTEIN FUS6 - Arabidopsis thaliana
  misc_feature (30)..(367): NCBI GI NO: 24666528 NR Description: COP9 complex homolog subunit 1 CG3889-PA
  misc_feature (1)..(16): NCBI GI NO: 24666528 NR Description: COP9 complex homolog subunit 1 CG3889-PA
  misc_feature (30)..(367): NCBI GI NO: 4732103 NR Description: COP9 signalosome subunit 1 CSN1
  misc_feature (1)..(16): NCBI GI NO: 4732103 NR Description: COP9 signalosome subunit 1 CSN1
MAYDEIKRGEDVQLHRDVVTKIGGRLGPRYGLDQAWVFSVSRRADQRKEKLESELNGYRTNLIKESIRMGYNDIGDFFYAHGQLSDAFKSYIRTRDYCTTSKHIVQMCMNVILVSIELGQYAHVSNYVSKAEQTPDSLDPTIVAKLKAAAGLANLETKKYKFAARKFVETGIELGNNFSEVIAPQDVAVYGALCALASFDRSDLKSKVIDNINFRNFLELVPEVRELVNDFYASRYGSCLGHLEKLKPNLLLDIHLHQHVETLYMEIRHKAIIQYTLPFISVDLNTMAAAFKTSVSMLQKELAALITEDKIQARIDSHNKILYARHADQRNATFQRVLQTGNDFERDVKSMLLRANLLKHDYIQKTSGPRKM

SEQ ID NO: 31786 - DNA, 1086 bp, Zea mays subsp. mays
  misc_feature (1)..(1086): Ceres Seq. ID no. 12358654
agtatctggaggaaggacaatgtctaggtcatctgactctgggaaaatgagtaatgatgagaaagaagactttgaagcaaatgaagatgactatatggatgtcgacaagggacatgctagtgacagtgatacagaaaaccgtatgtcagatactgactcagacaatgaaatacacagacctgaaacccctgaaagagagaaggcaccacacaggtgtatcaatatgcttcaagattgcagaagtgttgatgagtttgagaggctcaacaaaattaacgagggcacatatggtgttgtatacagagcaagggataagaagacaagtgagattgttgcattgaagaaggtaaagatggagaaggagcgagaaggtttcccattaacctctcttagggaaataaatatcctcttgtctttccacaatccttcaattgtggatgttaaggaagtagtagttggaagtagtctagatagtatttttatggttatggagtacatggaacatgatcttaaaggtgtcatggagaccatgaaacaaccatatacccaaagcgaggtaaagtgtttgatgcttcagctgctagaaggtgtaaaatatctacatgacaattgggtgcttcatagggatctgaagacctcaaatcttttttgaataaccgtggtgagttaaaaatatgtgattttggactgtctcgtcaatatggaagcccattaaaaccttatactcaactggttgtgactttgtggtacagggccccagaattgttgttaggaacaaaggagtattctactgctattgatatgtggtctgtgggctgtataatggctgagcttcttgccaaagaaccgttattcaatggaaaaacagagtttgaacagctagataagatttttagaacactcggcacacctaatgagaagatttggcctggctatgctaaattaccaggtgtgaaagtaaattttgttaaacaaccgtataatagactaagggataagttcccagccgcttctttttctgggcgaccaatcctgtctgaagctggttttgatctattgaacagactgctgacttatgaccctgat

SEQ ID NO: 31787 - protein, 216 aa, Zea mays subsp. mays
  peptide (1)..(216): Ceres Seq. ID no. 12358655
  misc_feature (85)..(215): Pfam Name: Pfam Description:  Protein kinase domain
  misc_feature (1)..(215): NCBI GI NO: 38344237 NR Description: OJ991113_30.14
  misc_feature (9)..(215): NCBI GI NO: 15220477 NR Description: putative protein kinase; protein id: At1g67580.1
  misc_feature (9)..(215): NCBI GI NO: 17064846 NR Description: putative protein kinase [Arabidopsis thaliana]
  misc_feature (16)..(215): NCBI GI NO: 15242731 NR Description: protein kinase; protein id: At5g63370
  misc_feature (8)..(215): NCBI GI NO: 3978441 NR Description: PITSLRE protein kinase alpha SV9 isoform
  misc_feature (5)..(215): NCBI GI NO: 34879827 NR Description: similar to cell division cycle 2 homolog (S
  misc_feature (15)..(215): NCBI GI NO: 507158 NR Description: PITSLRE alpha 1
  misc_feature (15)..(215): NCBI GI NO: 507160 NR Description: PITSLRE alpha 2-2
  misc_feature (15)..(215): NCBI GI NO: 507162 NR Description: PITSLRE alpha 2-3
  misc_feature (15)..(215): NCBI GI NO: 507164 NR Description: PITSLRE alpha 2-4
VSGGRTMSRSSDSGKMSNDEKEDFEANEDDYMDVDKGHASDSDTENRMSDTDSDNEIHRPETPEREKAPHRCINMLQDCRSVDEFERLNKINEGTYGVVYRARDKKTSEIVALKKVKMEKEREGFPLTSLREINILLSFHNPSIVDVKEVVVGSSLDSIFMVMEYMEHDLKGVMETMKQPYTQSEVKCLMLQLLEGVKYLHDNWVLHRDLKTSNLF

SEQ ID NO: 31788 - protein, 210 aa, Zea mays subsp. mays
  peptide (1)..(210): Ceres Seq. ID no. 12358656
  misc_feature (79)..(209): Pfam Name: Pfam Description:  Protein kinase domain
  misc_feature (1)..(209): NCBI GI NO: 38344237 NR Description: OJ991113_30.14
  misc_feature (3)..(209): NCBI GI NO: 15220477 NR Description: putative protein kinase; protein id: At1g67580.1
  misc_feature (3)..(209): NCBI GI NO: 17064846 NR Description: putative protein kinase [Arabidopsis thaliana]
  misc_feature (10)..(209): NCBI GI NO: 15242731 NR Description: protein kinase; protein id: At5g63370
  misc_feature (2)..(209): NCBI GI NO: 3978441 NR Description: PITSLRE protein kinase alpha SV9 isoform
  misc_feature (1)..(209): NCBI GI NO: 34879827 NR Description: similar to cell division cycle 2 homolog (S
  misc_feature (9)..(209): NCBI GI NO: 507158 NR Description: PITSLRE alpha 1
  misc_feature (9)..(209): NCBI GI NO: 507160 NR Description: PITSLRE alpha 2-2
  misc_feature (9)..(209): NCBI GI NO: 507168 NR Description: PITSLRE alpha 2-1
  misc_feature (9)..(209): NCBI GI NO: 507164 NR Description: PITSLRE alpha 2-4
MSRSSDSGKMSNDEKEDFEANEDDYMDVDKGHASDSDTENRMSDTDSDNEIHRPETPEREKAPHRCINMLQDCRSVDEFERLNKINEGTYGVVYRARDKKTSEIVALKKVKMEKEREGFPLTSLREINILLSFHNPSIVDVKEVVVGSSLDSIFMVMEYMEHDLKGVMETMKQPYTQSEVKCLMLQLLEGVKYLHDNWVLHRDLKTSNLF

SEQ ID NO: 31789 - protein, 201 aa, Zea mays subsp. mays
  peptide (1)..(201): Ceres Seq. ID no. 12358657
  misc_feature (70)..(200): Pfam Name: Pfam Description:  Protein kinase domain
  misc_feature (1)..(200): NCBI GI NO: 38344237 NR Description: OJ991113_30.14
  misc_feature (1)..(200): NCBI GI NO: 15220477 NR Description: putative protein kinase; protein id: At1g67580.1
  misc_feature (1)..(200): NCBI GI NO: 17064846 NR Description: putative protein kinase [Arabidopsis thaliana]
  misc_feature (1)..(200): NCBI GI NO: 15242731 NR Description: protein kinase; protein id: At5g63370
  misc_feature (1)..(200): NCBI GI NO: 3978441 NR Description: PITSLRE protein kinase alpha SV9 isoform
  misc_feature (1)..(200): NCBI GI NO: 34879827 NR Description: similar to cell division cycle 2 homolog (S
  misc_feature (1)..(200): NCBI GI NO: 507158 NR Description: PITSLRE alpha 1
  misc_feature (1)..(200): NCBI GI NO: 507160 NR Description: PITSLRE alpha 2-2
  misc_feature (1)..(200): NCBI GI NO: 507164 NR Description: PITSLRE alpha 2-4
  misc_feature (1)..(200): NCBI GI NO: 507168 NR Description: PITSLRE alpha 2-1
MSNDEKEDFEANEDDYMDVDKGHASDSDTENRMSDTDSDNEIHRPETPEREKAPHRCINMLQDCRSVDEFERLNKINEGTYGVVYRARDKKTSEIVALKKVKMEKEREGFPLTSLREINILLSFHNPSIVDVKEVVVGSSLDSIFMVMEYMEHDLKGVMETMKQPYTQSEVKCLMLQLLEGVKYLHDNWVLHRDLKTSNLF

SEQ ID NO: 31790 - DNA, 2101 bp, Zea mays subsp. mays
  misc_feature (1)..(2101): Ceres Seq. ID no. 12366931
agctggattggatatttggactagtgttcttcttggcttggccacccgcctactccgtcttcttcatacgagacaagccgtgcgcttcttcttggcctagcccttcgagcagggcaggagaggaggccactctgactgtcactctgagcttcgcgtcacctgagtactgacggacgacatgggagaagttgaggacatgtacacccaagacgggaccgtggacatgaaagggaatcccgccgtgaagaagggcaccggcaactggcgcgcctgcccctacatcctcgcgaacgagtgctgcgagaggctggcttactatggcatgagcaccaacctggtgaactacatgaagacccgacttggccaggtgaactccgttgcctccaacaacgtcaccaactggcaagggacgtgctacatcacgccgctcatcggcgccttcttcgccgacgcgtacatggggaggttctggaccatcgccatcttcatgatcatctacattttcggcctggcgctgctgacgatggcttcgtcggtgaaggggctggtgcctacgtcgtgcggcgacaaggatgtgtgccacccgacggacgcgcaggcggcggtggtgttcgtggcgctgtacctcatcgcgctgggcacgggcgggatcaagccgtgcgtgtcctccttcggcgccgaccagttcgacgagaacgacgagcgggagaagaagagcaagagctccttcttcaactggttctacttctccatcaacatcggcgcgctggtggcgtccacagtgctggtgtacgtgcagacgcacgtgggctggggctggggcttcggcatccccgccgtggtcatggccatcgccgtcggcagcttcttcgtgggcacgccgctgtacaggcaccagaagcccgggggcagcccgctgacgcgcatcgcgcaggtgctcgtcgcgtgcgcgcgcaagtggaacgtggccgtgcccgcggacaagtcgcggctgcacgagacggtggacggggagtccggcatcgaggggagccgcaagctggagcactcggagcagctggcgtgcctcgacagggctgccgtggtgacggccgaggacggcgcggaggcgagcccgtggcgcctgtgctcggtgacgcaggtggaggagctcaagagcgtgatccggctgctgcccatctgggccagcgggatcgtgttcgcggcggtgtactcgcagatgagcaccatgttcgtgctgcagggtaacacgctggaccagagcatggggccccggttcaagatcccctcggcgacgctgtccatggtggacaccatcagcgtcatcgtctgggtcccccgtgtacgaccgcgccatcgtgcccctggtgcgctcctacaccgggaggccgcgcgggttcacgcagctgcagcgcatgggcatcggcctcgtcgtctccatcttctccatggtggcggcgggcgtgctggacatcgtgcggctgcgcgccatcgcgcggcacggcctgtacggcgaggacgacatcgtgcccatctccatcttctggcagataccgcagtacttcatcatcgggtgcgcggaggtgttcaccttcgtggggcagctggagttcttctacgaccaggcgcccgacgccatgaggagcatgtgctccgcgctgtcgctcaccaccgtcgcgctcggcaactacctcagcacggtcctggtgaccatcgtcacccacatcaccaccaggcacggccgcatcgggtggatcccggagaacctcaaccgcggccacctcgactacttcttctggctgctcgccgtgctcagccttctcaacttccttgcctacctcgtcatcgccagctggtacaagtacaagaagacggccgatgattaccctggcgccaaaggggagcacggtacagagcactgatgggcgagatggcggaaatggagtgatttctatgtgtggttagctgtctgtcgacttgttttgccacagtttgggtgcttaaacgttaacgtacgtactagttcaatatagtgtctcgggggcgaattggttgtttacatgtcatgtgtttatatatgcgcaatgttcgatctcagtgg

SEQ ID NO: 31791 - protein, 567 aa, Zea mays subsp. mays
  peptide (1)..(567): Ceres Seq. ID no. 12366932
  misc_feature (97)..(387): Pfam Name: Pfam Description:  POT family
  misc_feature (1)..(387): NCBI GI NO: 7489404 NR Description: peptide transport protein - barley
  misc_feature (3)..(387): NCBI GI NO: 15232435 NR Description: peptide transport - like protein
  misc_feature (1)..(387): NCBI GI NO: 15240905 NR Description: oligopeptide transporter - like protein
  misc_feature (8)..(387): NCBI GI NO: 15076661 NR Description: peptide transporter
  misc_feature (3)..(387): NCBI GI NO: 4102839 NR Description: LeOPT1 [Lycopersicon esculentum]
  misc_feature (60)..(387): NCBI GI NO: 28973642 NR Description: putative oligopeptide transporter protein
  misc_feature (3)..(387): NCBI GI NO: 15226861 NR Description: histidine transport protein
  misc_feature (3)..(387): NCBI GI NO: 1076331 NR Description: histidine transport protein - Arabidopsis thaliana
  misc_feature (3)..(387): NCBI GI NO: 6635838 NR Description: amino acid/peptide transporter [Prunus dulcis]
  misc_feature (1)..(387): NCBI GI NO: 6409176 NR Description: nitrate transporter [Oryza sativa]
MGEVEDMYTQDGTVDMKGNPAVKKGTGNWRACPYILANECCERLAYYGMSTNLVNYMKTRLGQVNSVASNNVTNWQGTCYITPLIGAFFADAYMGRFWTIAIFMIIYIFGLALLTMASSVKGLVPTSCGDKDVCHPTDAQAAVVFVALYLIALGTGGIKPCVSSFGADQFDENDEREKKSKSSFFNWFYFSINIGALVASTVLVYVQTHVGWGWGFGIPAVVMAIAVGSFFVGTPLYRHQKPGGSPLTRIAQVLVACARKWNVAVPADKSRLHETVDGESGIEGSRKLEHSEQLACLDRAAVVTAEDGAEASPWRLCSVTQVEELKSVIRLLPIWASGIVFAAVYSQMSTMFVLQGNTLDQSMGPRFKIPSATLSMVDTISVIVWVPRVRPRHRAPGALLHREAARVHAAAAHGHRPRRLHLLHGGGGRAGHRAAARHRAARPVRRGRHRAHLHLLADTAVLHHRVRGGVHLRGAAGVLLRPGARRHEEHVLRAVAHHRRARQLPQHGPGDHRHPHHHQARPHRVDPGEPQPRPPRLLLLAARRAQPSQLPCLPRHRQLVQVQEDGR

SEQ ID NO: 31792 - protein, 561 aa, Zea mays subsp. mays
  peptide (1)..(561): Ceres Seq. ID no. 12366933
  misc_feature (91)..(381): Pfam Name: Pfam Description:  POT family
  misc_feature (1)..(381): NCBI GI NO: 7489404 NR Description: peptide transport protein - barley
  misc_feature (1)..(381): NCBI GI NO: 15232435 NR Description: peptide transport - like protein
  misc_feature (1)..(381): NCBI GI NO: 15240905 NR Description: oligopeptide transporter - like protein
  misc_feature (2)..(381): NCBI GI NO: 15076661 NR Description: peptide transporter
  misc_feature (1)..(381): NCBI GI NO: 4102839 NR Description: LeOPT1 [Lycopersicon esculentum]
  misc_feature (54)..(381): NCBI GI NO: 28973642 NR Description: putative oligopeptide transporter protein
  misc_feature (1)..(381): NCBI GI NO: 15226861 NR Description: histidine transport protein
  misc_feature (1)..(381): NCBI GI NO: 1076331 NR Description: histidine transport protein - Arabidopsis thaliana
  misc_feature (1)..(381): NCBI GI NO: 6635838 NR Description: amino acid/peptide transporter [Prunus dulcis]
  misc_feature (1)..(381): NCBI GI NO: 6409176 NR Description: nitrate transporter [Oryza sativa]
MYTQDGTVDMKGNPAVKKGTGNWRACPYILANECCERLAYYGMSTNLVNYMKTRLGQVNSVASNNVTNWQGTCYITPLIGAFFADAYMGRFWTIAIFMIIYIFGLALLTMASSVKGLVPTSCGDKDVCHPTDAQAAVVFVALYLIALGTGGIKPCVSSFGADQFDENDEREKKSKSSFFNWFYFSINIGALVASTVLVYVQTHVGWGWGFGIPAVVMAIAVGSFFVGTPLYRHQKPGGSPLTRIAQVLVACARKWNVAVPADKSRLHETVDGESGIEGSRKLEHSEQLACLDRAAVVTAEDGAEASPWRLCSVTQVEELKSVIRLLPIWASGIVFAAVYSQMSTMFVLQGNTLDQSMGPRFKIPSATLSMVDTISVIVWVPRVRPRHRAPGALLHREAARVHAAAAHGHRPRRLHLLHGGGGRAGHRAAARHRAARPVRRGRHRAHLHLLADTAVLHHRVRGGVHLRGAAGVLLRPGARRHEEHVLRAVAHHRRARQLPQHGPGDHRHPHHHQARPHRVDPGEPQPRPPRLLLLAARRAQPSQLPCLPRHRQLVQVQEDGR

SEQ ID NO: 31793 - protein, 552 aa, Zea mays subsp. mays
  peptide (1)..(552): Ceres Seq. ID no. 12366934
  misc_feature (82)..(372): Pfam Name: Pfam Description:  POT family
  misc_feature (1)..(372): NCBI GI NO: 7489404 NR Description: peptide transport protein - barley
  misc_feature (1)..(372): NCBI GI NO: 15232435 NR Description: peptide transport - like protein
  misc_feature (1)..(372): NCBI GI NO: 15240905 NR Description: oligopeptide transporter - like protein
  misc_feature (1)..(372): NCBI GI NO: 15076661 NR Description: peptide transporter
  misc_feature (1)..(372): NCBI GI NO: 4102839 NR Description: LeOPT1 [Lycopersicon esculentum]
  misc_feature (45)..(372): NCBI GI NO: 28973642 NR Description: putative oligopeptide transporter protein
  misc_feature (1)..(372): NCBI GI NO: 15226861 NR Description: histidine transport protein
  misc_feature (1)..(372): NCBI GI NO: 1076331 NR Description: histidine transport protein - Arabidopsis thaliana
  misc_feature (1)..(372): NCBI GI NO: 6635838 NR Description: amino acid/peptide transporter [Prunus dulcis]
  misc_feature (1)..(372): NCBI GI NO: 6409176 NR Description: nitrate transporter [Oryza sativa]
MKGNPAVKKGTGNWRACPYILANECCERLAYYGMSTNLVNYMKTRLGQVNSVASNNVTNWQGTCYITPLIGAFFADAYMGRFWTIAIFMIIYIFGLALLTMASSVKGLVPTSCGDKDVCHPTDAQAAVVFVALYLIALGTGGIKPCVSSFGADQFDENDEREKKSKSSFFNWFYFSINIGALVASTVLVYVQTHVGWGWGFGIPAVVMAIAVGSFFVGTPLYRHQKPGGSPLTRIAQVLVACARKWNVAVPADKSRLHETVDGESGIEGSRKLEHSEQLACLDRAAVVTAEDGAEASPWRLCSVTQVEELKSVIRLLPIWASGIVFAAVYSQMSTMFVLQGNTLDQSMGPRFKIPSATLSMVDTISVIVWVPRVRPRHRAPGALLHREAARVHAAAAHGHRPRRLHLLHGGGGRAGHRAAARHRAARPVRRGRHRAHLHLLADTAVLHHRVRGGVHLRGAAGVLLRPGARRHEEHVLRAVAHHRRARQLPQHGPGDHRHPHHHQARPHRVDPGEPQPRPPRLLLLAARRAQPSQLPCLPRHRQLVQVQEDGR

SEQ ID NO: 31794 - DNA, 1461 bp, Zea mays subsp. mays
  misc_feature (1)..(1461): Ceres Seq. ID no. 12353132
actagttcagcacttcagccttcactccactccaccacagtccacgcagcccaccgaaatggggaagctgctccctcgccacccttcccccctcctcctcctcgccgcggcgatctgcatctccagcagcagcctcgcggccgtccggggcgcgccggtgtaccgcgcggactacctggtggacgggaaccagctggtggacatgcagtaccacatgggccccgtcgtgtccgggacgccgaccaacctctacctcatctggtacgggcggtgggaggccgcggcgcaggccgtgctccgggacttcctcgcctcgctctcggccccggccccgttcccggccgtctccgactggtgggcgcgcacgccgcggatgtacgcggaccagacgggcgccaacgtgacgggcgccttcgccgtcgccggggagcactccgacgccgggtactcccacggcgcgtcgctccggcgcatcgacgtgcagtccgtgatccggtcggcggtgtacgcgtacccggacccgctgccgctggacccctacagcggggcgtacctggtgctgacgtcccccgacgtgcaggtggacgagttctgccgcgccgtctgcggcttccactacttcaccttcgcgtccgtggtcggggtcacggtgccctacgcctgggtcgggaacagcgccacgcagtgcccgggcaagtgcgcgtacccgttcgccgccgccgccgagtacggcgccgggggagcccagccccaggcggtgctgcggccgcccaacggcgacgctggggtggacgggatggtgatcgtgctggggcacgagctggcggagatgtccacgaacccgctggtgaacgcgtggtacgccggggacacgcccacggcgccgaccgagatcgcggacctgtgcctgggcgtgtacggtgatggcggcggcgcgggcggcctggtcgggaacgtgtcccgcgcgcccgatggcagcgcctacaacgtcaacggcgtcaacggccggcggttcctcgtgcagtggctctggaaccccgtccgcggcgcctgctacggccccaactccagcaactgacccgagtcgtcgctaggggcgagggcggttggaggacgcctcatgccattctgctggattgaatggcattgcagaaatccatggcggtttcaatggatggagacagcgttcgtccacttccctgtccgttcagggaatggtccacaggagacgggacgaggatcagatgatgaagccgacccagtaatttgaagctgcactgcatgagacacatcgtgtggatcctgcctgatctatctgcagttcggtaggaaacaacgagaaaatgccattttgttgttcgttttttttaccttgatttccgggactcgaattttgtttcagctcccgagccagcatctcttgcttgctgaaacaaagtggtcgcctgatcgattgctttc

SEQ ID NO: 31795 - protein, 358 aa, Zea mays subsp. mays
  peptide (1)..(358): Ceres Seq. ID no. 12353133
  misc_feature (68)..(355): Pfam Name: Pfam Description:  Phosphate-induced protein 1 conserved region
  misc_feature (30)..(358): NCBI GI NO: 34901824 NR Description: putative phi-1(phosphate-induced protein 1)
  misc_feature (63)..(358): NCBI GI NO: 18403760 NR Description: Expressed protein; protein id: At2g35150
  misc_feature (63)..(358): NCBI GI NO: 25408357 NR Description: hypothetical protein At2g35150
  misc_feature (63)..(356): NCBI GI NO: 18398352 NR Description: expressed protein; protein id: At2g17230
  misc_feature (63)..(356): NCBI GI NO: 21594010 NR Description: unknown [Arabidopsis thaliana]
  misc_feature (63)..(356): NCBI GI NO: 11875173 NR Description: contains ESTsC27834
  misc_feature (53)..(356): NCBI GI NO: 15242118 NR Description: putative protein; protein id: At5g51550
  misc_feature (53)..(356): NCBI GI NO: 16604527 NR Description: AT5g51550/K17N15_10 [Arabidopsis thaliana]
  misc_feature (53)..(356): NCBI GI NO: 21592873 NR Description: unknown [Arabidopsis thaliana]
  misc_feature (57)..(351): NCBI GI NO: 15219504 NR Description: phosphate-induced
LVQHFSLHSTPPQSTQPTEMGKLLPRHPSPLLLLAAAICISSSSLAAVRGAPVYRADYLVDGNQLVDMQYHMGPVVSGTPTNLYLIWYGRWEAAAQAVLRDFLASLSAPAPFPAVSDWWARTPRMYADQTGANVTGAFAVAGEHSDAGYSHGASLRRIDVQSVIRSAVYAYPDPLPLDPYSGAYLVLTSPDVQVDEFCRAVCGFHYFTFASVVGVTVPYAWVGNSATQCPGKCAYPFAAAAEYGAGGAQPQAVLRPPNGDAGVDGMVIVLGHELAEMSTNPLVNAWYAGDTPTAPTEIADLCLGVYGDGGGAGGLVGNVSRAPDGSAYNVNGVNGRRFLVQWLWNPVRGACYGPNSSN

SEQ ID NO: 31796 - protein, 339 aa, Zea mays subsp. mays
  peptide (1)..(339): Ceres Seq. ID no. 12353134
  misc_feature (49)..(336): Pfam Name: Pfam Description:  Phosphate-induced protein 1 conserved region
  misc_feature (11)..(339): NCBI GI NO: 34901824 NR Description: putative phi-1(phosphate-induced protein 1)
  misc_feature (44)..(339): NCBI GI NO: 18403760 NR Description: Expressed protein; protein id: At2g35150
  misc_feature (44)..(339): NCBI GI NO: 25408357 NR Description: hypothetical protein At2g35150
  misc_feature (44)..(337): NCBI GI NO: 18398352 NR Description: expressed protein; protein id: At2g17230
  misc_feature (44)..(337): NCBI GI NO: 21594010 NR Description: unknown [Arabidopsis thaliana]
  misc_feature (44)..(337): NCBI GI NO: 11875173 NR Description: contains ESTsC27834
  misc_feature (34)..(337): NCBI GI NO: 15242118 NR Description: putative protein; protein id: At5g51550
  misc_feature (34)..(337): NCBI GI NO: 16604527 NR Description: AT5g51550/K17N15_10 [Arabidopsis thaliana]
  misc_feature (34)..(337): NCBI GI NO: 21592873 NR Description: unknown [Arabidopsis thaliana]
  misc_feature (38)..(332): NCBI GI NO: 15219504 NR Description: phosphate-induced
MGKLLPRHPSPLLLLAAAICISSSSLAAVRGAPVYRADYLVDGNQLVDMQYHMGPVVSGTPTNLYLIWYGRWEAAAQAVLRDFLASLSAPAPFPAVSDWWARTPRMYADQTGANVTGAFAVAGEHSDAGYSHGASLRRIDVQSVIRSAVYAYPDPLPLDPYSGAYLVLTSPDVQVDEFCRAVCGFHYFTFASVVGVTVPYAWVGNSATQCPGKCAYPFAAAAEYGAGGAQPQAVLRPPNGDAGVDGMVIVLGHELAEMSTNPLVNAWYAGDTPTAPTEIADLCLGVYGDGGGAGGLVGNVSRAPDGSAYNVNGVNGRRFLVQWLWNPVRGACYGPNSSN

SEQ ID NO: 31797 - protein, 307 aa, Zea mays subsp. mays
  peptide (1)..(307): Ceres Seq. ID no. 12353135
  misc_feature (195)..(307): Pfam Name: Pfam Description:  Cupin
  misc_feature (35)..(290): NCBI GI NO: 23103936 NR Description: hypothetical protein [Azotobacter vinelandii]
TSSALQPSLHSTTVHAAHRNGEAAPSPPFPPPPPRRGDLHLQQQPRGRPGRAGVPRGLPGGREPAGGHAVPHGPRRVRDADQPLPHLVRAVGGRGAGRAPGLPRLALGPGPVPGRLRLVGAHAADVRGPDGRQRDGRLRRRRGALRRRVLPRRVAPAHRRAVRDPVGGVRVPGPAAAGPLQRGVPGADVPRRAGGRVLPRRLRLPLLHLRVRGRGHGALRLGREQRHAVPGQVRVPVRRRRRVRRRGSPAPGGAAAAQRRRWGGRDGDRAGARAGGDVHEPAGERVVRRGHAHGADRDRGPVPGRVR

SEQ ID NO: 31798 - DNA, 1772 bp, Zea mays subsp. mays
  misc_feature (1)..(1772): Ceres Seq. ID no. 13496422
ccattacctagaacatcctaatcgaaaaactactcgatggaaccagcaacatgggccgcgttcctcggcattgccctttgcgcagcggcagcgctcttccttttgcgtggccggcgcccggtctacaaccccccgccgggccccaagccatggccgatcatcggcaaccttaacctcatgggcgagctgccccaccgctccatgaacgagctctccaagcggtacggtccgctcatgcagctctggttcgggtcgttgcctgttgtcgtcggcgcgtccgccgagatggcaaagctcttcctcaagaccaacgacgcggcgttctccgaccggccgaggttcgcagtcggcaagtacaccgcgtacgactgctccggccttctgtgggctccttttgagccgtacctgcgccaggcacgcaggatctgcgccaccgagctcttcagcgccacgcggctcgagtccttcgagcacatccgcgacgaggaggtgcgcgtgatgctccgacagctgcgccaagcggctgggcgcaccgtgcggcttagggactacctgcagatgttggcgctcggcgtgatctcgcgcatagttctgggcaagaagtacgtcatggaggaggcggcggacggtgagggggactcagcgccggcgataacgcctgccgagttcagggagatggtggacgagttcttcgcgcttcacggtgcgtttaacattggtgattatatcccttggctagattggctggacctgcagggctacgttgctaggatgaagagaatgaaggcgaggtttggtcgattcctggaacgagtcttggacgtgcacaacgagcggcgactacgcgagggagggaactttgtggcaaaggatatgttggacgtgctgctgcagctggccgatgacactagtcttgaagtccagctcagcagggacaatgttaaggctatcacacaggacctaatcatcgcaggcacggatagtaatgcaaacacgctggagtgggctgtctcggagctcctcaagaaccctaagatcttagccaaggccatggaggagctgaaccatgtcatagggccggaccgactggtgacggaaagcgacctccctcgcctcccctacatcgaggctgtgctcaaggagaccatgcgcgtgcaccctgccgcgccgatgctggcaccccacgtggcccgcgaggacacatccgtggacggatacgacgtgctcgctggcacggtcttgttcatcaacgtgtgggcaatcggccgcgaccctggactgtgggacgcgccggaggagttccggccggagcggttcgtcgagagcaagatcgacgtgaggggccatgacttccagctgctgccgttcggctctggccggcgaatgtgccccgggatcaacctcgcgctaaaggtgatggctttgagtcttgccaatctgctacacggcttcgagtggaggcttccggacggcgtgacggcagaggagctgagcatggatgaggccttcaagctcgcggtaccgcgtaaattcccgctcatggtcgtggccgagcccaggttgccagctcgcctgtatactggcgcttgatgccagtacgtgtcttcggttgttggcatgcgtggagtatagcacatgattttcagctcttggaactttgttttaataaaacacaaatatatgtgttatgttggttagatgaatgtgaatataaagttgacaacctaggtaattcgaacccctattggtatataattttactttatttttgc

SEQ ID NO: 31799 - protein, 517 aa, Zea mays subsp. mays
  peptide (1)..(517): Ceres Seq. ID no. 13496423
  misc_feature (33)..(501): Pfam Name: Pfam Description:  Cytochrome P450
  misc_feature (1)..(517): NCBI GI NO: 18377404 NR Description: cytochrome P450 monooxygenase CYP92A1
  misc_feature (5)..(515): NCBI GI NO: 14423327 NR Description: elicitor-inducible cytochrome P450
  misc_feature (1)..(501): NCBI GI NO: 7430637 NR Description: cytochrome P450 - common tobacco
  misc_feature (5)..(515): NCBI GI NO: 7430636 NR Description: probable cytochrome P450
  misc_feature (16)..(498): NCBI GI NO: 12004682 NR Description: cytochrome P450 [Pisum sativum]
  misc_feature (21)..(516): NCBI GI NO: 27151498 NR Description: Flavonoid 3'-monooxygenase
  misc_feature (8)..(515): NCBI GI NO: 37694931 NR Description: flavonoid 3'-hydroxylase [Ipomoea purpurea]
  misc_feature (33)..(514): NCBI GI NO: 12231880 NR Description: putative flavonoid 3'-hydroxylase
  misc_feature (12)..(514): NCBI GI NO: 12231882 NR Description: flavonoid 3',5'-hydroxylase
  misc_feature (13)..(514): NCBI GI NO: 12231914 NR Description: flavonoid 3'-hydroxylase [Pelargonium x hortorum]
MEPATWAAFLGIALCAAAALFLLRGRRPVYNPPPGPKPWPIIGNLNLMGELPHRSMNELSKRYGPLMQLWFGSLPVVVGASAEMAKLFLKTNDAAFSDRPRFAVGKYTAYDCSGLLWAPFEPYLRQARRICATELFSATRLESFEHIRDEEVRVMLRQLRQAAGRTVRLRDYLQMLALGVISRIVLGKKYVMEEAADGEGDSAPAITPAEFREMVDEFFALHGAFNIGDYIPWLDWLDLQGYVARMKRMKARFGRFLERVLDVHNERRLREGGNFVAKDMLDVLLQLADDTSLEVQLSRDNVKAITQDLIIAGTDSNANTLEWAVSELLKNPKILAKAMEELNHVIGPDRLVTESDLPRLPYIEAVLKETMRVHPAAPMLAPHVAREDTSVDGYDVLAGTVLFINVWAIGRDPGLWDAPEEFRPERFVESKIDVRGHDFQLLPFGSGRRMCPGINLALKVMALSLANLLHGFEWRLPDGVTAEELSMDEAFKLAVPRKFPLMVVAEPRLPARLYTGA

SEQ ID NO: 31800 - protein, 470 aa, Zea mays subsp. mays
  peptide (1)..(470): Ceres Seq. ID no. 13496424
  misc_feature (1)..(454): Pfam Name: Pfam Description:  Cytochrome P450
  misc_feature (1)..(470): NCBI GI NO: 18377404 NR Description: cytochrome P450 monooxygenase CYP92A1
  misc_feature (1)..(468): NCBI GI NO: 14423327 NR Description: elicitor-inducible cytochrome P450
  misc_feature (1)..(454): NCBI GI NO: 7430637 NR Description: cytochrome P450 - common tobacco
  misc_feature (1)..(468): NCBI GI NO: 7430636 NR Description: probable cytochrome P450
  misc_feature (1)..(451): NCBI GI NO: 12004682 NR Description: cytochrome P450 [Pisum sativum]
  misc_feature (1)..(469): NCBI GI NO: 27151498 NR Description: Flavonoid 3'-monooxygenase
  misc_feature (1)..(468): NCBI GI NO: 37694931 NR Description: flavonoid 3'-hydroxylase [Ipomoea purpurea]
  misc_feature (1)..(467): NCBI GI NO: 12231880 NR Description: putative flavonoid 3'-hydroxylase
  misc_feature (1)..(467): NCBI GI NO: 12231882 NR Description: flavonoid 3',5'-hydroxylase
  misc_feature (1)..(467): NCBI GI NO: 12231914 NR Description: flavonoid 3'-hydroxylase [Pelargonium x hortorum]
MGELPHRSMNELSKRYGPLMQLWFGSLPVVVGASAEMAKLFLKTNDAAFSDRPRFAVGKYTAYDCSGLLWAPFEPYLRQARRICATELFSATRLESFEHIRDEEVRVMLRQLRQAAGRTVRLRDYLQMLALGVISRIVLGKKYVMEEAADGEGDSAPAITPAEFREMVDEFFALHGAFNIGDYIPWLDWLDLQGYVARMKRMKARFGRFLERVLDVHNERRLREGGNFVAKDMLDVLLQLADDTSLEVQLSRDNVKAITQDLIIAGTDSNANTLEWAVSELLKNPKILAKAMEELNHVIGPDRLVTESDLPRLPYIEAVLKETMRVHPAAPMLAPHVAREDTSVDGYDVLAGTVLFINVWAIGRDPGLWDAPEEFRPERFVESKIDVRGHDFQLLPFGSGRRMCPGINLALKVMALSLANLLHGFEWRLPDGVTAEELSMDEAFKLAVPRKFPLMVVAEPRLPARLYTGA

SEQ ID NO: 31801 - protein, 462 aa, Zea mays subsp. mays
  peptide (1)..(462): Ceres Seq. ID no. 13496425
  misc_feature (1)..(446): Pfam Name: Pfam Description:  Cytochrome P450
  misc_feature (1)..(462): NCBI GI NO: 18377404 NR Description: cytochrome P450 monooxygenase CYP92A1
  misc_feature (1)..(460): NCBI GI NO: 14423327 NR Description: elicitor-inducible cytochrome P450
  misc_feature (1)..(446): NCBI GI NO: 7430637 NR Description: cytochrome P450 - common tobacco
  misc_feature (1)..(460): NCBI GI NO: 7430636 NR Description: probable cytochrome P450
  misc_feature (1)..(443): NCBI GI NO: 12004682 NR Description: cytochrome P450 [Pisum sativum]
  misc_feature (1)..(461): NCBI GI NO: 27151498 NR Description: Flavonoid 3'-monooxygenase
  misc_feature (1)..(460): NCBI GI NO: 37694931 NR Description: flavonoid 3'-hydroxylase [Ipomoea purpurea]
  misc_feature (1)..(459): NCBI GI NO: 12231880 NR Description: putative flavonoid 3'-hydroxylase
  misc_feature (1)..(459): NCBI GI NO: 12231882 NR Description: flavonoid 3',5'-hydroxylase
  misc_feature (1)..(459): NCBI GI NO: 12231914 NR Description: flavonoid 3'-hydroxylase [Pelargonium x hortorum]
MNELSKRYGPLMQLWFGSLPVVVGASAEMAKLFLKTNDAAFSDRPRFAVGKYTAYDCSGLLWAPFEPYLRQARRICATELFSATRLESFEHIRDEEVRVMLRQLRQAAGRTVRLRDYLQMLALGVISRIVLGKKYVMEEAADGEGDSAPAITPAEFREMVDEFFALHGAFNIGDYIPWLDWLDLQGYVARMKRMKARFGRFLERVLDVHNERRLREGGNFVAKDMLDVLLQLADDTSLEVQLSRDNVKAITQDLIIAGTDSNANTLEWAVSELLKNPKILAKAMEELNHVIGPDRLVTESDLPRLPYIEAVLKETMRVHPAAPMLAPHVAREDTSVDGYDVLAGTVLFINVWAIGRDPGLWDAPEEFRPERFVESKIDVRGHDFQLLPFGSGRRMCPGINLALKVMALSLANLLHGFEWRLPDGVTAEELSMDEAFKLAVPRKFPLMVVAEPRLPARLYTGA

SEQ ID NO: 31802 - DNA, 1573 bp, Zea mays subsp. mays
  misc_feature (1)..(1573): Ceres Seq. ID no. 12366004
acacgaggctccagggcctccatcgccacaccggtgcgtgcgagcgcgattaccagaggcgggcggcagggacgatgctgctgcaaaggcgcggcggcctcctctgctgcgggtgcggcgccagcgccgtggccgtggccgtcagtggccgcgttccggaagacgacggcggtgccgtcgtcgatggccagccgcctgacgccaagagcgtgtctggtaccagtgtctccgctgccgtgacgaccgcaaacgcgaggcagctctcgtgggcgcaggtggaggccatgacgggaggcttcacgtcagccatcgtcggcgagggcggcttcagcaccgtttacctcgcccgcctcgctggctccctcgccgccgtgaaggtccatcgtagtagcgagcgtcttcatcgcgcgttccgccaggagctcgacgcgctcctccgcgttcgccatccccacatcgtccgcctcctcgccttctgcgaccagcgagacgaaggcgtgctggtgctagagttcgcgccgaacggcagcctgcacgagcagctccacggcggcggcgcgggcgcggcgccgatgccgtgggcgcggcgggtgccggtggcgctgcaggtggcccgcgccctggagtacctccacgagcggtgcgagccgcaggtggtgcacggcgacgtgaaggcgtcgaacgtgctgctggacgcgggcatgggcgccaggctgtgcgacttcgggtcggcgcgcgcggggttctcggcggccgtggccgttgccgctgcaggcccgcgcccgcgcgccgtgttcgggtccccgggctacgtcgacccgcactacctccgctccggcgtggtcaccaagaagagcgacgtgtacagcttcggcgtgctcctgctggagctgctcaccggcgtgcaggcgttccgcgacggccggctcctgacggcgtccgtggcgccgaggctcgccgccgccgcagccggcgacctcgtggaccggaggctggggtgccgatacgacgcccgcgaggcggcggccgtgctggcgctagcggccgcgtgcgtccgggacaaaccgggcctccggccgtcgatggccgacgtggtgcgggccctggagcagctgcagccgcagcacggccggagcttgttgggcgccggagggaagctgtagctgctgtcgtagacacgtggcgcgcattgttgtttgtggtggtcgtggggatgcgactgctcaactgaccacaccctccctctattggaattgggttggtgaggaacaggaggcgttgggatttgcgctttgggggtattggggtggggggtgatttgcttatcatctttagctgggatgatgggtcatcatgtcattagccaccaaatcaaaagtagagcaactgctgagataaaacgaacagcaggaggatggaagtatccgtcattatcaagtgtgtatacagtagtaactaaaatgtaaacagagttgcttctttttcgtctgtgttgcatgtatgatgtacctgtgtgtggtatgcacacatgtttagccaaaagaaaagaactgtgcatatacattatcattct

SEQ ID NO: 31803 - protein, 386 aa, Zea mays subsp. mays
  peptide (1)..(386): Ceres Seq. ID no. 12366005
  misc_feature (103)..(368): Pfam Name: Pfam Description:  Protein kinase domain
  misc_feature (25)..(377): NCBI GI NO: 27476081 NR Description: Hypothetical protein
  misc_feature (29)..(370): NCBI GI NO: 37536060 NR Description: putative receptor protein kinase
  misc_feature (37)..(370): NCBI GI NO: 38344983 NR Description: OSJNBa0011L07.13
  misc_feature (73)..(383): NCBI GI NO: 15235071 NR Description: putative protein kinase; protein id: At4g10390
  misc_feature (88)..(315): NCBI GI NO: 30692836 NR Description: protein kinase family [Arabidopsis thaliana]
  misc_feature (88)..(315): NCBI GI NO: 25403176 NR Description: probable protein kinase
  misc_feature (85)..(375): NCBI GI NO: 18402188 NR Description: unknown protein; protein id: At3g19300.1
  misc_feature (199)..(370): NCBI GI NO: 29367339 NR Description: putative receptor protein kinase
  misc_feature (85)..(376): NCBI GI NO: 38345516 NR Description: OSJNBa0039K24.19
  misc_feature (64)..(370): NCBI GI NO: 15227018 NR Description: putative receptor-like protein kinase
TRLQGLHRHTGACERDYQRRAAGTMLLQRRGGLLCCGCGASAVAVAVSGRVPEDDGGAVVDGQPPDAKSVSGTSVSAAVTTANARQLSWAQVEAMTGGFTSAIVGEGGFSTVYLARLAGSLAAVKVHRSSERLHRAFRQELDALLRVRHPHIVRLLAFCDQRDEGVLVLEFAPNGSLHEQLHGGGAGAAPMPWARRVPVALQVARALEYLHERCEPQVVHGDVKASNVLLDAGMGARLCDFGSARAGFSAAVAVAAAGPRPRAVFGSPGYVDPHYLRSGVVTKKSDVYSFGVLLLELLTGVQAFRDGRLLTASVAPRLAAAAAGDLVDRRLGCRYDAREAAAVLALAAACVRDKPGLRPSMADVVRALEQLQPQHGRSLLGAGGKL

SEQ ID NO: 31804 - protein, 362 aa, Zea mays subsp. mays
  peptide (1)..(362): Ceres Seq. ID no. 12366006
  misc_feature (79)..(344): Pfam Name: Pfam Description:  Protein kinase domain
  misc_feature (1)..(353): NCBI GI NO: 27476081 NR Description: Hypothetical protein
  misc_feature (5)..(346): NCBI GI NO: 37536060 NR Description: putative receptor protein kinase
  misc_feature (13)..(346): NCBI GI NO: 38344983 NR Description: OSJNBa0011L07.13
  misc_feature (49)..(359): NCBI GI NO: 15235071 NR Description: putative protein kinase; protein id: At4g10390
  misc_feature (64)..(291): NCBI GI NO: 30692836 NR Description: protein kinase family [Arabidopsis thaliana]
  misc_feature (64)..(291): NCBI GI NO: 25403176 NR Description: probable protein kinase
  misc_feature (61)..(351): NCBI GI NO: 18402188 NR Description: unknown protein; protein id: At3g19300.1
  misc_feature (175)..(346): NCBI GI NO: 29367339 NR Description: putative receptor protein kinase
  misc_feature (61)..(352): NCBI GI NO: 38345516 NR Description: OSJNBa0039K24.19
  misc_feature (40)..(346): NCBI GI NO: 15227018 NR Description: putative receptor-like protein kinase
MLLQRRGGLLCCGCGASAVAVAVSGRVPEDDGGAVVDGQPPDAKSVSGTSVSAAVTTANARQLSWAQVEAMTGGFTSAIVGEGGFSTVYLARLAGSLAAVKVHRSSERLHRAFRQELDALLRVRHPHIVRLLAFCDQRDEGVLVLEFAPNGSLHEQLHGGGAGAAPMPWARRVPVALQVARALEYLHERCEPQVVHGDVKASNVLLDAGMGARLCDFGSARAGFSAAVAVAAAGPRPRAVFGSPGYVDPHYLRSGVVTKKSDVYSFGVLLLELLTGVQAFRDGRLLTASVAPRLAAAAAGDLVDRRLGCRYDAREAAAVLALAAACVRDKPGLRPSMADVVRALEQLQPQHGRSLLGAGGKL

SEQ ID NO: 31805 - protein, 292 aa, Zea mays subsp. mays
  peptide (1)..(292): Ceres Seq. ID no. 12366007
  misc_feature (9)..(274): Pfam Name: Pfam Description:  Protein kinase domain
  misc_feature (1)..(283): NCBI GI NO: 27476081 NR Description: Hypothetical protein
  misc_feature (1)..(276): NCBI GI NO: 37536060 NR Description: putative receptor protein kinase
  misc_feature (1)..(276): NCBI GI NO: 38344983 NR Description: OSJNBa0011L07.13
  misc_feature (1)..(289): NCBI GI NO: 15235071 NR Description: putative protein kinase; protein id: At4g10390
  misc_feature (1)..(221): NCBI GI NO: 30692836 NR Description: protein kinase family [Arabidopsis thaliana]
  misc_feature (1)..(221): NCBI GI NO: 25403176 NR Description: probable protein kinase
  misc_feature (1)..(281): NCBI GI NO: 18402188 NR Description: unknown protein; protein id: At3g19300.1
  misc_feature (105)..(276): NCBI GI NO: 29367339 NR Description: putative receptor protein kinase
  misc_feature (1)..(282): NCBI GI NO: 38345516 NR Description: OSJNBa0039K24.19
  misc_feature (1)..(276): NCBI GI NO: 15227018 NR Description: putative receptor-like protein kinase
MTGGFTSAIVGEGGFSTVYLARLAGSLAAVKVHRSSERLHRAFRQELDALLRVRHPHIVRLLAFCDQRDEGVLVLEFAPNGSLHEQLHGGGAGAAPMPWARRVPVALQVARALEYLHERCEPQVVHGDVKASNVLLDAGMGARLCDFGSARAGFSAAVAVAAAGPRPRAVFGSPGYVDPHYLRSGVVTKKSDVYSFGVLLLELLTGVQAFRDGRLLTASVAPRLAAAAAGDLVDRRLGCRYDAREAAAVLALAAACVRDKPGLRPSMADVVRALEQLQPQHGRSLLGAGGKL

SEQ ID NO: 31806 - DNA, 1714 bp, Zea mays subsp. mays
  misc_feature (1)..(1714): Ceres Seq. ID no. 12363889
gcacgagaccattacctagaacatcctaatcgaaaagatttgccggaaggcgcctcggcggaagctgctatctagttgaagccagccatggccgccgagcccccggcgtacttgctgctccttcccctcatcgccataccgctcatcgtcttcctcgtcctgtcccgccgaagggatgaccagcggcgcttcccaccggcgccgtgggcgctgccggtcatcggccacctgcaccacctcgccggcgcgccaccgcaccgtgccctgcgggaccttgcgaggcgccacggcccgctcatgacgctccgcttctggcgagctccgggtcgtggtcgcctcgtcgccggacgccgcgcgggagatcttgaggacccacgacgtggacttcgcgtcgcggcccatcgggccgatgctgcagctcgtgttccggggcgccgagggcctcatcttcgcgccctacggcgacgggtggcggcagctccgcaagatctgcaccctcgaactcctcagcgcccgccgcgtccactccttccggcccgtccgcgaggacgaggtcggccgcctcctcggctcggtcgcgtccgccgcggcggcggggttgcccgtgaacctgagtgagaggatcacggcgttcgtcgcggacgcagcggtgcgcgccatcatcggcagccgggagcgagcaccgcgacgagttcttgcgcctgctgatggacgggctcaagataattccgggattgagcctgccggacctcttcccgtcgtcacgcctcgcgatgctcgtcagcagcgttcccggtaaaatcgagcgccgccggaaaggcctccttgacatcgtcgaccccatcattctggagcatcaggagaagagagcggccggtggcatagacgaagatgaggacttgcttgacgtgctcttgagactccagaaagacatggactcccagtaccctctcaccaccgacaacatcaaatccgtcctcatcgacatgtttggagcaagcagcgagacgtcggcgacgacgctgaagtggacaatggccgagctgatgcggaacccggcggtgatgcggaaggcgcaagatgaggtcaggggagcactcgccggccacgacgaggtggcggaggacagcctggtcaatctgcggtacctgcagctagtcataaaggagacgctgcggctgcacccgccggcgccattgctgctgccgcgggagtgccgcagcccgtgccaggtgctcggctacgacgtgcctcgtggcaccatggtgctggtgaacgcgtgggcaataggcagggacccagcgctgtgggacgcgccggaggatttcgtgccggaaaggttcgaggagagtggacgagacttcaagggcatggattttgagttcatcccgttcggtgcgggaaggaggatgtgccccggcatggcgttcgggctggcgcacattgagctcgctctcgcggcgttgctgtttcacttcgactggaagctaccggaaggggtggtcggctggtcgccgaggagatagacatggccgaggcggtcgcgatcacggcccctccgcgatctgatttagtggtgctccctgttactaggctaccggtgtcaatataatgtgcttcggcccaaaagcttattttctttcagtatgctagaaatagaacaacaacttttctttcgctttcggcggttgtgaaggtcgaaaccttttcctcg

SEQ ID NO: 31807 - protein, 272 aa, Zea mays subsp. mays
  peptide (1)..(272): Ceres Seq. ID no. 12363890
  misc_feature (1)..(266): Pfam Name: Pfam Description:  Cytochrome P450
  misc_feature (1)..(260): NCBI GI NO: 34896754 NR Description: putative cytochrome P450
  misc_feature (1)..(266): NCBI GI NO: 34914838 NR Description: putative cytochrome P450
  misc_feature (1)..(264): NCBI GI NO: 34897000 NR Description: putative cytochrome P450
  misc_feature (1)..(266): NCBI GI NO: 37534744 NR Description: putative cytochrome P450
  misc_feature (1)..(262): NCBI GI NO: 37534746 NR Description: putative cytochrome P450
  misc_feature (1)..(266): NCBI GI NO: 38345354 NR Description: OSJNBa0032I19.6
  misc_feature (1)..(265): NCBI GI NO: 12331298 NR Description: cytochrome P450 [Solanum tuberosum]
  misc_feature (1)..(265): NCBI GI NO: 5915836 NR Description: Cytochrome P450 71D7
  misc_feature (1)..(265): NCBI GI NO: 5915835 NR Description: Cytochrome P450 71D6
  misc_feature (1)..(264): NCBI GI NO: 13516744 NR Description: cytochrome P450 [Triticum aestivum]
MDGLKIIPGLSLPDLFPSSRLAMLVSSVPGKIERRRKGLLDIVDPIILEHQEKRAAGGIDEDEDLLDVLLRLQKDMDSQYPLTTDNIKSVLIDMFGASSETSATTLKWTMAELMRNPAVMRKAQDEVRGALAGHDEVAEDSLVNLRYLQLVIKETLRLHPPAPLLLPRECRSPCQVLGYDVPRGTMVLVNAWAIGRDPALWDAPEDFVPERFEESGRDFKGMDFEFIPFGAGRRMCPGMAFGLAHIELALAALLFHFDWKLPEGVVGWSPRR

SEQ ID NO: 31808 - protein, 250 aa, Zea mays subsp. mays
  peptide (1)..(250): Ceres Seq. ID no. 12363891
  misc_feature (1)..(244): Pfam Name: Pfam Description:  Cytochrome P450
  misc_feature (1)..(238): NCBI GI NO: 34896754 NR Description: putative cytochrome P450
  misc_feature (1)..(244): NCBI GI NO: 34914838 NR Description: putative cytochrome P450
  misc_feature (1)..(242): NCBI GI NO: 34897000 NR Description: putative cytochrome P450
  misc_feature (1)..(244): NCBI GI NO: 37534744 NR Description: putative cytochrome P450
  misc_feature (1)..(240): NCBI GI NO: 37534746 NR Description: putative cytochrome P450
  misc_feature (1)..(244): NCBI GI NO: 38345354 NR Description: OSJNBa0032I19.6
  misc_feature (1)..(243): NCBI GI NO: 12331298 NR Description: cytochrome P450 [Solanum tuberosum]
  misc_feature (1)..(243): NCBI GI NO: 5915836 NR Description: Cytochrome P450 71D7
  misc_feature (1)..(243): NCBI GI NO: 5915835 NR Description: Cytochrome P450 71D6
  misc_feature (1)..(242): NCBI GI NO: 13516744 NR Description: cytochrome P450 [Triticum aestivum]
MLVSSVPGKIERRRKGLLDIVDPIILEHQEKRAAGGIDEDEDLLDVLLRLQKDMDSQYPLTTDNIKSVLIDMFGASSETSATTLKWTMAELMRNPAVMRKAQDEVRGALAGHDEVAEDSLVNLRYLQLVIKETLRLHPPAPLLLPRECRSPCQVLGYDVPRGTMVLVNAWAIGRDPALWDAPEDFVPERFEESGRDFKGMDFEFIPFGAGRRMCPGMAFGLAHIELALAALLFHFDWKLPEGVVGWSPRR

SEQ ID NO: 31809 - protein, 197 aa, Zea mays subsp. mays
  peptide (1)..(197): Ceres Seq. ID no. 12363892
  misc_feature (1)..(191): Pfam Name: Pfam Description:  Cytochrome P450
  misc_feature (1)..(185): NCBI GI NO: 34896754 NR Description: putative cytochrome P450
  misc_feature (1)..(191): NCBI GI NO: 34914838 NR Description: putative cytochrome P450
  misc_feature (1)..(189): NCBI GI NO: 34897000 NR Description: putative cytochrome P450
  misc_feature (1)..(191): NCBI GI NO: 37534744 NR Description: putative cytochrome P450
  misc_feature (1)..(187): NCBI GI NO: 37534746 NR Description: putative cytochrome P450
  misc_feature (1)..(191): NCBI GI NO: 38345354 NR Description: OSJNBa0032I19.6
  misc_feature (1)..(190): NCBI GI NO: 12331298 NR Description: cytochrome P450 [Solanum tuberosum]
  misc_feature (1)..(190): NCBI GI NO: 5915836 NR Description: Cytochrome P450 71D7
  misc_feature (1)..(190): NCBI GI NO: 5915835 NR Description: Cytochrome P450 71D6
  misc_feature (1)..(189): NCBI GI NO: 13516744 NR Description: cytochrome P450 [Triticum aestivum]
MDSQYPLTTDNIKSVLIDMFGASSETSATTLKWTMAELMRNPAVMRKAQDEVRGALAGHDEVAEDSLVNLRYLQLVIKETLRLHPPAPLLLPRECRSPCQVLGYDVPRGTMVLVNAWAIGRDPALWDAPEDFVPERFEESGRDFKGMDFEFIPFGAGRRMCPGMAFGLAHIELALAALLFHFDWKLPEGVVGWSPRR

SEQ ID NO: 31810 - DNA, 1627 bp, Zea mays subsp. mays
  misc_feature (1)..(1627): Ceres Seq. ID no. 12350273
attctcttcctcttccggtgctcgtgctcgtgctcgtgctctccgccctccccctccgccacctcgcgcggaacggaacccaggccgccgccgacccagccaccgctaggcgaccgcgcggcatggtggcgcttttacactacctatgctagtttgcctgatgctacatttccacgatggttaagctgactatgatagcgcgtgtcactgatggccttccattgtcggagggattagatgatagtcgggatctgaaagatgctgacttctacaagcagcaagcaaaactgttgttcaagaacttgtccagagggcagcatgaggcgtcaaggatgtcaattgagacaggaccataccttttccagtatcctaagacctttttctcatttgcaaaattctttgttccacaattaatcatttagaaatatatgtgattcttcatcatgatcctaaattagagtttttgtgaactggcaagtttaggcagcctaaccatataccgtaaacttgaccagtattgtgtatatattggattcaatattaagtagttcaagttcctttgacaagcaccagcttatgcatatcatatgattatcgtctgtctccattgatgtgtggattacaccaagtaagcgctatcactaatgacgtatggtatgaaaatgatcattttctgcactaaaatgcttctggtgctctagttgtaccttaattcaataaaacagctacatcatagaaggccgtgtttgctatttgactttgtgtgaccgttcttatcccaagaaacttgcattccagtatctcgaagatctcaaaaatgaatttgagaaagtcaatggcagccaaattgaaacagctgcaaggccatatgcatttattaaatttggtatggttctctgctcatgtcttgtatttttttttcctcattcgcttaatatttctgctaggtgaaagtgtatgtgttcctgtgtacttgttcagatgcattcatacagaagaccaagaaactgtatttggataccagaacacagaggaaccttgctaagctgaatgatgagctctatgaggtgcaccagatcatgactcgcaatgttcaagaagttctcggtgttggtgaaaaactagaccaggtgagtgagatgtcaagtaggttgacttcggatactagaatctatgcagagaaggcgaaagatctcaatcgccaggcattgattcgtaaatatgcccccgttgctattgtgattgggatagtggtgatgctcttctgggtgaagaacaagatatggtgactggtgccatcttgcgatttcacagttatcatgctggaaccagctgagttgtcttgtcttccctcgtgcaaccatatgtttgatcgtggtcccaaaaagaaaagatggctcgatggtttatcccgcatctgccgattcaagcgactactttagctatcaaaagcaaaaccacggtagtagagatagccttggaactgcacatttctattaactggacatgtataaatatagttctcgtgagcgcaccatgtaatcgtcgaaattcatccatgtgttgtgacattttttgagcacagttgaacatgtggtggagcctggaggcaggtcattctcagccc

SEQ ID NO: 31811 - protein, 81 aa, Zea mays subsp. mays
  peptide (1)..(81): Ceres Seq. ID no. 12350274
  misc_feature (1)..(64): NCBI GI NO: 28269424 NR Description: putative vesicle trafficking protein
  misc_feature (1)..(64): NCBI GI NO: 25402691 NR Description: hypothetical protein
  misc_feature (1)..(64): NCBI GI NO: 15221123 NR Description: putative vesicle transport protein
  misc_feature (1)..(64): NCBI GI NO: 34904386 NR Description: unnamed protein product
  misc_feature (1)..(64): NCBI GI NO: 34015230 NR Description: putative vesicle trafficking protein
  misc_feature (1)..(64): NCBI GI NO: 29351641 NR Description: Similar to SEC22 vesicle trafficking protein-like 1
  misc_feature (1)..(64): NCBI GI NO: 32450293 NR Description: Unknown (protein for MGC:64555) [Xenopus laevis]
  misc_feature (1)..(81): NCBI GI NO: 35215218 NR Description: putative vesicle trafficking protein
MVKLTMIARVTDGLPLSEGLDDSRDLKDADFYKQQAKLLFKNLSRGQHEASRMSIETGPYLFQYPKTFFSFAKFFVPQLII

SEQ ID NO: 31812 - protein, 76 aa, Zea mays subsp. mays
  peptide (1)..(76): Ceres Seq. ID no. 12350275
  misc_feature (1)..(59): NCBI GI NO: 28269424 NR Description: putative vesicle trafficking protein
  misc_feature (1)..(59): NCBI GI NO: 25402691 NR Description: hypothetical protein
  misc_feature (1)..(59): NCBI GI NO: 15221123 NR Description: putative vesicle transport protein
  misc_feature (1)..(59): NCBI GI NO: 34904386 NR Description: unnamed protein product
  misc_feature (1)..(59): NCBI GI NO: 34015230 NR Description: putative vesicle trafficking protein
  misc_feature (1)..(59): NCBI GI NO: 29351641 NR Description: Similar to SEC22 vesicle trafficking protein-like 1
  misc_feature (1)..(59): NCBI GI NO: 32450293 NR Description: Unknown (protein for MGC:64555) [Xenopus laevis]
  misc_feature (1)..(76): NCBI GI NO: 35215218 NR Description: putative vesicle trafficking protein
MIARVTDGLPLSEGLDDSRDLKDADFYKQQAKLLFKNLSRGQHEASRMSIETGPYLFQYPKTFFSFAKFFVPQLII

SEQ ID NO: 31813 - protein, 75 aa, Zea mays subsp. mays
  peptide (1)..(75): Ceres Seq. ID no. 12350276
MNLRKSMAAKLKQLQGHMHLLNLVWFSAHVLYFFFLIRLIFLLGESVCVPVYLFRCIHTEDQETVFGYQNTEEPC

SEQ ID NO: 31814 - DNA, 1468 bp, Zea mays subsp. mays
  misc_feature (1)..(1468): Ceres Seq. ID no. 12566388
gcacgagaccattacctagaacatcctaatcgaaaaacctcctcttctcgcctgtgccttttgcccctgtgctcgccacacgcggcgcaaccgcccacccacccagccaggagaagaagatctccgtcgcctgctcttcgcttcgcttcgaatcggaggtgtcgagtagccagtggtgtccctatggattcagcttttagaagagctctcaatgagcctatgtgcttggaagaaaccgtcgtccaacaaggaattgaaaggtgcccattcctgaggaacatcaatgagcctacaagtttttccttctcgtccgtcaacttccctattcccgcaagaggagccaagggaccgattttcgaagatgggcctaattttgacatggcatttcgagttttccatggtagagatggggttgttccactttcagaagggtcattggcccagattgagaagccactgccaaagcccaatcctgagttcaacccattggcagccaaagcagcaaccatcagtctatctgcatttggagggtttttcagctttggtgacttctcaaataagcgcaataagaaaaactccaacaagaagaaccccaacaacctcccccagaataaaggccagcctaacaataacaaccatgaagcactgagcaacgagtggctggagatgggccaatgtccacttgcgaaatcttatagggcattaagtggaattgtgccacttgtcgcaaagatgatgacacccccagctggtatgaaacttaagtgcccacctgccgtggttgctgcccgcgcagcactatcccgcacagcctttgctaaggggcttcgccctcagcccctgccaacaaaaatactggtgattgcattgcttggtatggcagcaaatgttcctctgggcatctggagggagcacacacagaagttttcattgcagtggtttgccgcagtacatgctgcagtgccgttcatagggatgctcaggaaatctgtgctgatgcctaagacagccatggcccttactatagccgcctcgatattgggtcagacaatcgggtcaagagctgaacgtatcagactgaagagggccgcggcagcaaaattagcaagagagagccatggtgacgctgctgactacatcaaagcaccaatgagtctgaaaacagggaaccacactgttcagttttgggatccgctttccctcagagctgaaagcacagtggctgcaggtaccacagcagttcttgtccctgccatttctgctttcaactgatgacaggaatggattcattacgattgtaccagcatcgctggttggtgtattcttttttttctcctattctaaataatctgattgttgtatccattactgtacttttgagcttaagaaagaaatacttcacggcaaactcttcatcctgttttggtggccacatgacagcgaataaattagagaacacgttgagctg

SEQ ID NO: 31815 - protein, 423 aa, Zea mays subsp. mays
  peptide (1)..(423): Ceres Seq. ID no. 12566389
  misc_feature (62)..(417): NCBI GI NO: 37537220 NR Description: unknown protein
  misc_feature (199)..(419): NCBI GI NO: 34897958 NR Description: contains ESTsAU068433
  misc_feature (53)..(221): NCBI GI NO: 34897958 NR Description: contains ESTsAU068433
  misc_feature (62)..(413): NCBI GI NO: 33146734 NR Description: unknown protein
  misc_feature (62)..(413): NCBI GI NO: 34899856 NR Description: OJ1714_H10.10
  misc_feature (82)..(415): NCBI GI NO: 15234866 NR Description: putative protein; protein id: At4g25030
  misc_feature (85)..(383): NCBI GI NO: 21595083 NR Description: unknown [Arabidopsis thaliana]
  misc_feature (85)..(368): NCBI GI NO: 21954084 NR Description: unknown protein [Arabidopsis thaliana]
  misc_feature (85)..(368): NCBI GI NO: 30694759 NR Description: expressed protein [Arabidopsis thaliana]
ARDHYLEHPNRKTSSSRLCLLPLCSPHAAQPPTHPARRRRSPSPALRFASNRRCRVASGVPMDSAFRRALNEPMCLEETVVQQGIERCPFLRNINEPTSFSFSSVNFPIPARGAKGPIFEDGPNFDMAFRVFHGRDGVVPLSEGSLAQIEKPLPKPNPEFNPLAAKAATISLSAFGGFFSFGDFSNKRNKKNSNKKNPNNLPQNKGQPNNNNHEALSNEWLEMGQCPLAKSYRALSGIVPLVAKMMTPPAGMKLKCPPAVVAARAALSRTAFAKGLRPQPLPTKILVIALLGMAANVPLGIWREHTQKFSLQWFAAVHAAVPFIGMLRKSVLMPKTAMALTIAASILGQTIGSRAERIRLKRAAAAKLARESHGDAADYIKAPMSLKTGNHTVQFWDPLSLRAESTVAAGTTAVLVPAISAFN

SEQ ID NO: 31816 - protein, 362 aa, Zea mays subsp. mays
  peptide (1)..(362): Ceres Seq. ID no. 12566390
  misc_feature (1)..(356): NCBI GI NO: 37537220 NR Description: unknown protein
  misc_feature (138)..(358): NCBI GI NO: 34897958 NR Description: contains ESTsAU068433
  misc_feature (1)..(160): NCBI GI NO: 34897958 NR Description: contains ESTsAU068433
  misc_feature (1)..(352): NCBI GI NO: 33146734 NR Description: unknown protein
  misc_feature (1)..(352): NCBI GI NO: 34899856 NR Description: OJ1714_H10.10
  misc_feature (21)..(354): NCBI GI NO: 15234866 NR Description: putative protein; protein id: At4g25030
  misc_feature (24)..(322): NCBI GI NO: 21595083 NR Description: unknown [Arabidopsis thaliana]
  misc_feature (24)..(307): NCBI GI NO: 21954084 NR Description: unknown protein [Arabidopsis thaliana]
  misc_feature (24)..(307): NCBI GI NO: 30694759 NR Description: expressed protein [Arabidopsis thaliana]
MDSAFRRALNEPMCLEETVVQQGIERCPFLRNINEPTSFSFSSVNFPIPARGAKGPIFEDGPNFDMAFRVFHGRDGVVPLSEGSLAQIEKPLPKPNPEFNPLAAKAATISLSAFGGFFSFGDFSNKRNKKNSNKKNPNNLPQNKGQPNNNNHEALSNEWLEMGQCPLAKSYRALSGIVPLVAKMMTPPAGMKLKCPPAVVAARAALSRTAFAKGLRPQPLPTKILVIALLGMAANVPLGIWREHTQKFSLQWFAAVHAAVPFIGMLRKSVLMPKTAMALTIAASILGQTIGSRAERIRLKRAAAAKLARESHGDAADYIKAPMSLKTGNHTVQFWDPLSLRAESTVAAGTTAVLVPAISAFN

SEQ ID NO: 31817 - protein, 350 aa, Zea mays subsp. mays
  peptide (1)..(350): Ceres Seq. ID no. 12566391
  misc_feature (1)..(344): NCBI GI NO: 37537220 NR Description: unknown protein
  misc_feature (126)..(346): NCBI GI NO: 34897958 NR Description: contains ESTsAU068433
  misc_feature (1)..(148): NCBI GI NO: 34897958 NR Description: contains ESTsAU068433
  misc_feature (1)..(340): NCBI GI NO: 33146734 NR Description: unknown protein
  misc_feature (1)..(340): NCBI GI NO: 34899856 NR Description: OJ1714_H10.10
  misc_feature (9)..(342): NCBI GI NO: 15234866 NR Description: putative protein; protein id: At4g25030
  misc_feature (12)..(310): NCBI GI NO: 21595083 NR Description: unknown [Arabidopsis thaliana]
  misc_feature (12)..(295): NCBI GI NO: 21954084 NR Description: unknown protein [Arabidopsis thaliana]
  misc_feature (12)..(295): NCBI GI NO: 30694759 NR Description: expressed protein [Arabidopsis thaliana]
MCLEETVVQQGIERCPFLRNINEPTSFSFSSVNFPIPARGAKGPIFEDGPNFDMAFRVFHGRDGVVPLSEGSLAQIEKPLPKPNPEFNPLAAKAATISLSAFGGFFSFGDFSNKRNKKNSNKKNPNNLPQNKGQPNNNNHEALSNEWLEMGQCPLAKSYRALSGIVPLVAKMMTPPAGMKLKCPPAVVAARAALSRTAFAKGLRPQPLPTKILVIALLGMAANVPLGIWREHTQKFSLQWFAAVHAAVPFIGMLRKSVLMPKTAMALTIAASILGQTIGSRAERIRLKRAAAAKLARESHGDAADYIKAPMSLKTGNHTVQFWDPLSLRAESTVAAGTTAVLVPAISAFN

SEQ ID NO: 31818 - DNA, 1490 bp, Zea mays subsp. mays
  misc_feature (1)..(1490): Ceres Seq. ID no. 12365955
aaggatcacttacgctgacacggttgaggcgacccaccagttcgacgaggagaacgtgctcagccgaggccgccacggcctcgtgttcaaggcttgttacagtgacggcaccgtgctggcgattctgcggctcccgtccaggtctgccgatggcgccgtggtgatcgacgagggatcgttcaggaaggaggccgagtctctcgggaaggtgaagcacaggaacctcacggtgctccgtggctactatgccgggcctccgccggacgtccggctgctggtctatgactacatgcccaacggcaacctcgccacgctgctgcaggaagcgtcacaccgggacggccacattctcaactggccgatgaggcacctcatcgcgctcggcgtctcgcgcggtcttgcgttcctgcaccagtccggggtggtgcacggcgacgtcaagccgcagaacattctcttcgacgccgacttcgagccgcacctgtctgatttcggcctcgagccgatggtggtgactgcggccgccgccgccgcgtcgacatcggctgcaactgcaacaccacccgtgggctccctcggctacgtggcccccgacgcggccgctgccgggcaggccacgagggagggcgacgtgtacagcttcggcatcgtgctgctggagctcctcacgggtcggcgccccggcatgttcgccggggagaaggaggaggaggaggaagaggacatcgtgaagtgggtgaagcggcagctgcagcgcggcgccgtggcggaactgctggagccgggcctgctggagctggacccggagtcgtccgagtgggaggagttcctgctgggcatcaaggtcgggctgctgtgcaccgcgtccgacccgctggaccgcccggccatgggcgacgtggtgttcatgctggagggctgccgcgtcggcccggacatcccgtccccgtcctccgccgaccccacctcccagccgtcgccggcctgatctcccggcggctccggcattgccgcccgccagattcagttcggtagcttgttccatttttttttctgtcgctgattgatttatttaattagttcagattagttttgctcccgtcgacagtcgaactgacacgtgggggccggtaaccgtttcccgccagtagccgttggttaggggaggccagtcagcagcgggcacggcggagcagggagccatgtgcgcactgctgctcaagcgtgtgcgtgtcgtcgtgctgcgcatgtggggtttccctgcccaagcatcggcaacggctactagaggcaggacatgcctgtcgcctcctggccgttgatctcggccgatctgtacctgtactctctaacgattgatttcgtgtagtggcctgcttggcttcctgggatccttgtcttttaatctcgtttcaccaatgcaacaatcggccgttttgtgccacgtgctgtacatttgtctgtattttgttatcctgattgattggccc

SEQ ID NO: 31819 - protein, 328 aa, Zea mays subsp. mays
  peptide (1)..(328): Ceres Seq. ID no. 12365956
  misc_feature (1)..(328): NCBI GI NO: 38345533 NR Description: OSJNBa0020J04.8
  misc_feature (1)..(328): NCBI GI NO: 19347728 NR Description: putative receptor protein kinase
  misc_feature (1)..(328): NCBI GI NO: 7434426 NR Description: hypothetical protein F23E13
  misc_feature (1)..(328): NCBI GI NO: 30690596 NR Description: leucine rich repeat protein family
  misc_feature (1)..(328): NCBI GI NO: 15222322 NR Description: leucine-rich repeat transmembrane protein kinase
  misc_feature (1)..(323): NCBI GI NO: 13620169 NR Description: hypothetical protein [Capsella rubella]
  misc_feature (1)..(328): NCBI GI NO: 15219817 NR Description: receptor-like kinase, putative
  misc_feature (1)..(328): NCBI GI NO: 25404291 NR Description: probable Serine/Threonine protein kinase F8A5.31
  misc_feature (1)..(311): NCBI GI NO: 34906992 NR Description: putative receptor-like protein
  misc_feature (1)..(323): NCBI GI NO: 15222751 NR Description: receptor kinase, putative; protein id: At1g55610.1
RITYADTVEATHQFDEENVLSRGRHGLVFKACYSDGTVLAILRLPSRSADGAVVIDEGSFRKEAESLGKVKHRNLTVLRGYYAGPPPDVRLLVYDYMPNGNLATLLQEASHRDGHILNWPMRHLIALGVSRGLAFLHQSGVVHGDVKPQNILFDADFEPHLSDFGLEPMVVTAAAAAASTSAATATPPVGSLGYVAPDAAAAGQATREGDVYSFGIVLLELLTGRRPGMFAGEKEEEEEEDIVKWVKRQLQRGAVAELLEPGLLELDPESSEWEEFLLGIKVGLLCTASDPLDRPAMGDVVFMLEGCRVGPDIPSPSSADPTSQPSPA

SEQ ID NO: 31820 - protein, 232 aa, Zea mays subsp. mays
  peptide (1)..(232): Ceres Seq. ID no. 12365957
  misc_feature (1)..(232): NCBI GI NO: 38345533 NR Description: OSJNBa0020J04.8
  misc_feature (1)..(232): NCBI GI NO: 19347728 NR Description: putative receptor protein kinase
  misc_feature (1)..(232): NCBI GI NO: 7434426 NR Description: hypothetical protein F23E13
  misc_feature (1)..(232): NCBI GI NO: 30690596 NR Description: leucine rich repeat protein family
  misc_feature (1)..(232): NCBI GI NO: 15222322 NR Description: leucine-rich repeat transmembrane protein kinase
  misc_feature (1)..(227): NCBI GI NO: 13620169 NR Description: hypothetical protein [Capsella rubella]
  misc_feature (1)..(232): NCBI GI NO: 15219817 NR Description: receptor-like kinase, putative
  misc_feature (1)..(232): NCBI GI NO: 25404291 NR Description: probable Serine/Threonine protein kinase F8A5.31
  misc_feature (1)..(215): NCBI GI NO: 34906992 NR Description: putative receptor-like protein
  misc_feature (1)..(227): NCBI GI NO: 15222751 NR Description: receptor kinase, putative; protein id: At1g55610.1
MPNGNLATLLQEASHRDGHILNWPMRHLIALGVSRGLAFLHQSGVVHGDVKPQNILFDADFEPHLSDFGLEPMVVTAAAAAASTSAATATPPVGSLGYVAPDAAAAGQATREGDVYSFGIVLLELLTGRRPGMFAGEKEEEEEEDIVKWVKRQLQRGAVAELLEPGLLELDPESSEWEEFLLGIKVGLLCTASDPLDRPAMGDVVFMLEGCRVGPDIPSPSSADPTSQPSPA

SEQ ID NO: 31821 - protein, 208 aa, Zea mays subsp. mays
  peptide (1)..(208): Ceres Seq. ID no. 12365958
  misc_feature (1)..(208): NCBI GI NO: 38345533 NR Description: OSJNBa0020J04.8
  misc_feature (1)..(208): NCBI GI NO: 19347728 NR Description: putative receptor protein kinase
  misc_feature (1)..(208): NCBI GI NO: 7434426 NR Description: hypothetical protein F23E13
  misc_feature (1)..(208): NCBI GI NO: 30690596 NR Description: leucine rich repeat protein family
  misc_feature (1)..(208): NCBI GI NO: 15222322 NR Description: leucine-rich repeat transmembrane protein kinase
  misc_feature (1)..(203): NCBI GI NO: 13620169 NR Description: hypothetical protein [Capsella rubella]
  misc_feature (1)..(208): NCBI GI NO: 15219817 NR Description: receptor-like kinase, putative
  misc_feature (1)..(208): NCBI GI NO: 25404291 NR Description: probable Serine/Threonine protein kinase F8A5.31
  misc_feature (1)..(191): NCBI GI NO: 34906992 NR Description: putative receptor-like protein
  misc_feature (1)..(203): NCBI GI NO: 15222751 NR Description: receptor kinase, putative; protein id: At1g55610.1
MRHLIALGVSRGLAFLHQSGVVHGDVKPQNILFDADFEPHLSDFGLEPMVVTAAAAAASTSAATATPPVGSLGYVAPDAAAAGQATREGDVYSFGIVLLELLTGRRPGMFAGEKEEEEEEDIVKWVKRQLQRGAVAELLEPGLLELDPESSEWEEFLLGIKVGLLCTASDPLDRPAMGDVVFMLEGCRVGPDIPSPSSADPTSQPSPA

SEQ ID NO: 31822 - DNA, 1425 bp, Zea mays subsp. mays
  misc_feature (1)..(1425): Ceres Seq. ID no. 12391880
aactaaccaacggacggaagtggcgtggcgaggcaaggccgccgcgaagccgagcaaatccaagcctccctcctctacccgttcctctcctgccttctcgggatctgcccgcccgccttgtgtgatcttgccgcctcgccccccgcggttggagctccggctgcacgacaccatgagcccccgcgcgtagaggctgggagagagggagcggggaacaaagttaggcaccaacaaagttaagtggggaggccagagctgcccagctgggtcgctgttctaccagagggatggacgggagcgccggctccttcgtcgccgtccgccggctctccggctccgaccgcgccgccgccttccaccactcctcttcggcggaggtcgtgacggggtcgacggcgtggatcgggagggggctctcctgcgtctgcgcgcagaggagggacagcgatgcgcgcctttccttcgatttgacgcctgtgcaggaagaatgcctacagaggttacaaaaccgtatagaagttcagtatgatagtgcaaacagagagcatcaggaagcactacagtccctttggtgtgcttcttttcctggcaccgagcttcgggggctaatatcagaacagtggaaagagatgggttggcaagggaaagacccatctacagattttagaggtggaggcttcatctccttggagaatctattgtactttgctaggaactatccaaaatctttccaggaactccttcgcaagcagaatggtgaccgtgcaatctgggagtatccatttgctgtcgctggtgtaaatataaccttcatgctcattcagatgcttgatctccaatcagttaaaccgaggtcattgttcggagcagttttcctaaagcttctttcagaaaacgatcaagcttttgacattctctactgcataaccttcaagctgatggatcagcaatggcttgacatgcatgctacttacatggacttcaacacggtcatgaagtctacacggcgtcagctagaaagggagctgttaattgaagatattcagaggattgaggacatgccatcatacaggcttctggcccggtagctagaagaaactgaaaccttaacatggctacatattgcaaggcggcttgagatgctaatggatcgcaacttatgtggacggcgacaatcttgaaatgtagatgacatgtatccttgtgtgttaggtacttgtggtctctggtaacctgatctctgaagattacaagatagggtttttttcctggtgatagaatgccacgtagggtaactgaagtgtctgatcagctcccatggccaaaaaaaaatttgtagggtgtgttattacaatctggtcgttgtccatcataccacgaaaggaagtattcctagggttgttgttgtaaacaggaggatttggg

SEQ ID NO: 31823 - protein, 266 aa, Zea mays subsp. mays
  peptide (1)..(266): Ceres Seq. ID no. 12391881
  misc_feature (86)..(246): Pfam Name: Pfam Description:  Protein of unknown function, DUF609
  misc_feature (1)..(266): NCBI GI NO: 14140119 NR Description: putative protein [Oryza sativa]
  misc_feature (1)..(266): NCBI GI NO: 38345956 NR Description: OSJNBb0038F03.14
  misc_feature (1)..(264): NCBI GI NO: 18406626 NR Description: expressed protein; protein id: At2g44770
  misc_feature (1)..(264): NCBI GI NO: 15810014 NR Description: At2g44770/F16B22.26 [Arabidopsis thaliana]
  misc_feature (1)..(266): NCBI GI NO: 18411543 NR Description: putative protein; protein id: At3g60260
  misc_feature (1)..(264): NCBI GI NO: 7485547 NR Description: hypothetical protein At2g44770
  misc_feature (1)..(266): NCBI GI NO: 11288393 NR Description: hypothetical protein F27H5
  misc_feature (33)..(265): NCBI GI NO: 18408759 NR Description: hypothetical protein; protein id: At1g67400.1
  misc_feature (28)..(264): NCBI GI NO: 15218859 NR Description: hypothetical protein; protein id: At1g03620.1
  misc_feature (32)..(264): NCBI GI NO: 38344760 NR Description: OSJNBa0068L06.3
MDGSAGSFVAVRRLSGSDRAAAFHHSSSAEVVTGSTAWIGRGLSCVCAQRRDSDARLSFDLTPVQEECLQRLQNRIEVQYDSANREHQEALQSLWCASFPGTELRGLISEQWKEMGWQGKDPSTDFRGGGFISLENLLYFARNYPKSFQELLRKQNGDRAIWEYPFAVAGVNITFMLIQMLDLQSVKPRSLFGAVFLKLLSENDQAFDILYCITFKLMDQQWLDMHATYMDFNTVMKSTRRQLERELLIEDIQRIEDMPSYRLLAR

SEQ ID NO: 31824 - protein, 152 aa, Zea mays subsp. mays
  peptide (1)..(152): Ceres Seq. ID no. 12391882
  misc_feature (1)..(132): Pfam Name: Pfam Description:  Protein of unknown function, DUF609
  misc_feature (1)..(152): NCBI GI NO: 14140119 NR Description: putative protein [Oryza sativa]
  misc_feature (1)..(152): NCBI GI NO: 38345956 NR Description: OSJNBb0038F03.14
  misc_feature (1)..(150): NCBI GI NO: 18406626 NR Description: expressed protein; protein id: At2g44770
  misc_feature (1)..(150): NCBI GI NO: 15810014 NR Description: At2g44770/F16B22.26 [Arabidopsis thaliana]
  misc_feature (1)..(152): NCBI GI NO: 18411543 NR Description: putative protein; protein id: At3g60260
  misc_feature (1)..(150): NCBI GI NO: 7485547 NR Description: hypothetical protein At2g44770
  misc_feature (1)..(152): NCBI GI NO: 11288393 NR Description: hypothetical protein F27H5
  misc_feature (1)..(151): NCBI GI NO: 18408759 NR Description: hypothetical protein; protein id: At1g67400.1
  misc_feature (1)..(150): NCBI GI NO: 15218859 NR Description: hypothetical protein; protein id: At1g03620.1
  misc_feature (1)..(150): NCBI GI NO: 38344760 NR Description: OSJNBa0068L06.3
MGWQGKDPSTDFRGGGFISLENLLYFARNYPKSFQELLRKQNGDRAIWEYPFAVAGVNITFMLIQMLDLQSVKPRSLFGAVFLKLLSENDQAFDILYCITFKLMDQQWLDMHATYMDFNTVMKSTRRQLERELLIEDIQRIEDMPSYRLLAR

SEQ ID NO: 31825 - DNA, 1199 bp, Zea mays subsp. mays
  misc_feature (1)..(1199): Ceres Seq. ID no. 12407579
gcaaatcgccccccaaaccaaccgggccggccgacacaagcagcatcccgtcggcggcgatggacctggtgtcgagcgacctcgcggcgctgggcgcggtggagctggtccgcgtctcggcgtcgatcccgcgcgcggctccgcgcaccttcgcgctgctcaccgcctgcctcgtcttcccgctctccttcgccgtgctcgcgcactccctcttcacccaccccatcctgctccgcatccggggcgccgcccactcggggttcgcgccgtggctcggcctcttcgcgtaccagttcatgtacctcatcgtcctcttcaccttctccctcctctccaccgccgccgccgtcttcaccgtcgcctccctctacgccgggaagcccgcgtccgtctcctcctcgctcagcgcgctgcgccccatcctgccccgcctcctccgcaccttcctctgggtctccctcctcatgctcgcctaccacctcgccttcgcgctcgccgtcctcctgctcgtcgtcctcgtcttcctcgggatccacgtctacatctccgcgctgtggcacctcgccagcgtcgtctccgtgctcgagccgctctgcgggctcgccgccatggccaagagcaggcagctgctccagggccgcaccggcaccgcagccacgcttgtcgtctcctacttcgcggtctgcggcgcgacctcgctgctgttccgtgccgctgtcgttaagggacgcaccgaggaggggagcttcggcctggccttgcctggccggctgcttgtcggcgccgtgctggtgtgcgttcttgtctctgtcaatctgctaggactgctcgtgcagagtgtcttctactacgcctgcaaggccttccacagccagcagattgaccgcactgcattgtatgagcaccttggaggctaccttggggagtacgtgccactcaagagcaatatccagatggagaacctttgagagttggagcataggacaagggtaatcttctcacctctcattgctacatactagcagttttctatggatctttctcaaaagatgactatggtttacttggagctatctggtcttgttgtttctagtatcctgtagtagtgtagtttagaatctgtacaagtgaaaatgcgcagtatggaaccaatctatggaatggaacgtagatgcatgaacaaggttgtctttcgtctc

SEQ ID NO: 31826 - protein, 321 aa, Zea mays subsp. mays
  peptide (1)..(321): Ceres Seq. ID no. 12407580
  misc_feature (160)..(321): NCBI GI NO: 34908936 NR Description: P0691E06.20
  misc_feature (20)..(172): NCBI GI NO: 34908936 NR Description: P0691E06.20
  misc_feature (90)..(320): NCBI GI NO: 30684945 NR Description: expressed protein [Arabidopsis thaliana]
  misc_feature (90)..(320): NCBI GI NO: 15241607 NR Description: putative protein; protein id: At5g44860
  misc_feature (90)..(321): NCBI GI NO: 18397813 NR Description: expressed protein; protein id: At1g31130
  misc_feature (20)..(320): NCBI GI NO: 7485737 NR Description: hypothetical protein F18F4
  misc_feature (20)..(277): NCBI GI NO: 15241607 NR Description: putative protein; protein id: At5g44860
  misc_feature (20)..(175): NCBI GI NO: 30684945 NR Description: expressed protein [Arabidopsis thaliana]
  misc_feature (20)..(172): NCBI GI NO: 18397813 NR Description: expressed protein; protein id: At1g31130
KSPPKPTGPADTSSIPSAAMDLVSSDLAALGAVELVRVSASIPRAAPRTFALLTACLVFPLSFAVLAHSLFTHPILLRIRGAAHSGFAPWLGLFAYQFMYLIVLFTFSLLSTAAAVFTVASLYAGKPASVSSSLSALRPILPRLLRTFLWVSLLMLAYHLAFALAVLLLVVLVFLGIHVYISALWHLASVVSVLEPLCGLAAMAKSRQLLQGRTGTAATLVVSYFAVCGATSLLFRAAVVKGRTEEGSFGLALPGRLLVGAVLVCVLVSVNLLGLLVQSVFYYACKAFHSQQIDRTALYEHLGGYLGEYVPLKSNIQMENL

SEQ ID NO: 31827 - protein, 302 aa, Zea mays subsp. mays
  peptide (1)..(302): Ceres Seq. ID no. 12407581
  misc_feature (141)..(302): NCBI GI NO: 34908936 NR Description: P0691E06.20
  misc_feature (1)..(153): NCBI GI NO: 34908936 NR Description: P0691E06.20
  misc_feature (71)..(301): NCBI GI NO: 30684945 NR Description: expressed protein [Arabidopsis thaliana]
  misc_feature (71)..(301): NCBI GI NO: 15241607 NR Description: putative protein; protein id: At5g44860
  misc_feature (71)..(302): NCBI GI NO: 18397813 NR Description: expressed protein; protein id: At1g31130
  misc_feature (1)..(301): NCBI GI NO: 7485737 NR Description: hypothetical protein F18F4
  misc_feature (1)..(258): NCBI GI NO: 15241607 NR Description: putative protein; protein id: At5g44860
  misc_feature (1)..(156): NCBI GI NO: 30684945 NR Description: expressed protein [Arabidopsis thaliana]
  misc_feature (1)..(153): NCBI GI NO: 18397813 NR Description: expressed protein; protein id: At1g31130
MDLVSSDLAALGAVELVRVSASIPRAAPRTFALLTACLVFPLSFAVLAHSLFTHPILLRIRGAAHSGFAPWLGLFAYQFMYLIVLFTFSLLSTAAAVFTVASLYAGKPASVSSSLSALRPILPRLLRTFLWVSLLMLAYHLAFALAVLLLVVLVFLGIHVYISALWHLASVVSVLEPLCGLAAMAKSRQLLQGRTGTAATLVVSYFAVCGATSLLFRAAVVKGRTEEGSFGLALPGRLLVGAVLVCVLVSVNLLGLLVQSVFYYACKAFHSQQIDRTALYEHLGGYLGEYVPLKSNIQMENL

SEQ ID NO: 31828 - protein, 273 aa, Zea mays subsp. mays
  peptide (1)..(273): Ceres Seq. ID no. 12407582
  misc_feature (49)..(205): Pfam Name: Pfam Description:  Glycoprotein GG/GX
  misc_feature (35)..(273): NCBI GI NO: 13592175 NR Description: ppg3 [Leishmania major]
  misc_feature (37)..(245): NCBI GI NO: 11359723 NR Description: proteophosphoglycan, membrane-associated
  misc_feature (35)..(273): NCBI GI NO: 13592175 NR Description: ppg3 [Leishmania major]
  misc_feature (37)..(273): NCBI GI NO: 5420387 NR Description: proteophosphoglycan [Leishmania major]
  misc_feature (37)..(273): NCBI GI NO: 13592175 NR Description: ppg3 [Leishmania major]
  misc_feature (37)..(273): NCBI GI NO: 13592175 NR Description: ppg3 [Leishmania major]
  misc_feature (37)..(273): NCBI GI NO: 13592175 NR Description: ppg3 [Leishmania major]
  misc_feature (35)..(273): NCBI GI NO: 13592175 NR Description: ppg3 [Leishmania major]
  misc_feature (54)..(273): NCBI GI NO: 11359723 NR Description: proteophosphoglycan, membrane-associated
  misc_feature (35)..(273): NCBI GI NO: 13592175 NR Description: ppg3 [Leishmania major]
ANRPPNQPGRPTQAASRRRRWTWCRATSRRWARWSWSASRRRSRARLRAPSRCSPPASSSRSPSPCSRTPSSPTPSCSASGAPPTRGSRRGSASSRTSSCTSSSSSPSPSSPPPPPSSPSPPSTPGSPRPSPPRSARCAPSCPASSAPSSGSPSSCSPTTSPSRSPSSCSSSSSSSGSTSTSPRCGTSPASSPCSSRSAGSPPWPRAGSCSRAAPAPQPRLSSPTSRSAARPRCCSVPLSLRDAPRRGASAWPCLAGCLSAPCWCAFLSLSIC

SEQ ID NO: 31829 - DNA, 1728 bp, Zea mays subsp. mays
  misc_feature (1)..(1728): Ceres Seq. ID no. 12352730
acatcacactcgcttcaatattgacaccaccaacgcacgcacgacccttcttcctcctcccggcggcggctaggctaccgctattgatttctccttgcatcgcctttattgcgctcacctgctctgccaagtgccaacgtcgtacacttccagcagtggagggagccggagcacgagctgcccgctggacgagccgtcgccgccacagaaatctacatataattgcagccccaaccacctcgttcctcttccccttccccctccccagccaaatccgctttcctagctctaatcgccgccgatctcgccggaggaactgctagctcgctgctcccttcacttctcagattaaaagttgcctcaagaagaagatccctctgcgccgctgcatgttgagcgagcctaccgtagcgacgagcgcggatatgaattggtgttgtgttcctaaggccaagagagaagagaacccttactccaacagcatcggcggcatctactccgagaagaacataaggctcttctcctatgccgagttaagatctgctaccgacaacttcaaccgcaccaacaaagtgggacgaggcggattcgggacagtctataagggaaccatccgaagcgggcgagaggtcgcggtgaaggtcctctccgccgagtccaggcagggcatcagggagttcctgacggagatcgacgtcatcagcaacgtcaagcaccccaacctcgtcgaactcatcggctgctgcgtcgagggaagcaaccggattctggtgtatgagtacctcaagaacagcagccttgaccgtgcgctgctggcttctaacagtgagcctgccgacttcacctggagcgtcaggtctgctatatgcctcggagtcgctcggggccttgcgtacctgcacgaagagatcgcggcgccgatcgtgcacagagacatcaaggccagcaacatactgctcgacaggaactacgtccccaagatcggggatttcggtctggccaagctgtttcctgacaatgtcacccacatcagcacccgcgtcgcgggaacaacaggctaccttgcgcctgagtacgcctggcatggccagctcaccaagaaagcggacatctacagctttggtgtccttgtcctggagatagtgagcggcactagtagctccaggagcatactcatggatgacaagattctcctagagaaggcatgggagctgtacgaagcgaagaggctcaaggaactggtggatccagcccttgtagactgccctgaggaagaagccatcaggtacatcatggtggccctcttctgcctacaggcggccgccgcgcgccggccgacgatgccccaggtcgtcaccatgctgtccaagcccgtccggatcaacgagagcgagctgacggcgccggggtacctccaggagtacagcaggcggagccccttgtccaaggccaccacttccaccgactccaggttcaagaacctggcgtcccaggaggactccaacatgttcagcacggtggtgccacccacggtgaccgagatgagccccaggtgaagcaaccgccatgtaattttgactgattccttccttgcgttttgtcaaccggcgactatatgatgtagtgccaagtgtgttttcctcctgcaaatgcggcaactagatcttgtacatatagattagtgaatccatgccagacccagagcaatgcaagattgctgtttgttgc

SEQ ID NO: 31830 - protein, 388 aa, Zea mays subsp. mays
  peptide (1)..(388): Ceres Seq. ID no. 12352731
  misc_feature (15)..(388): NCBI GI NO: 38344039 NR Description: OSJNBb0017I01.6
  misc_feature (40)..(388): NCBI GI NO: 5923666 NR Description: putative receptor ser/thr protein kinase
  misc_feature (40)..(388): NCBI GI NO: 18398327 NR Description: putative receptor ser/thr protein kinase
  misc_feature (40)..(376): NCBI GI NO: 34901978 NR Description: putative receptor ser/thr protein
  misc_feature (40)..(388): NCBI GI NO: 6403501 NR Description: putative protein kinase [Arabidopsis thaliana]
  misc_feature (16)..(385): NCBI GI NO: 38344329 NR Description: OSJNBa0058K23.11
  misc_feature (33)..(376): NCBI GI NO: 18394385 NR Description: receptor-like serine/threonine kinase, putative
  misc_feature (14)..(376): NCBI GI NO: 25287648 NR Description: hypothetical protein F19K19.4
  misc_feature (44)..(388): NCBI GI NO: 6056376 NR Description: Similar to serine/threonine kinases
  misc_feature (44)..(388): NCBI GI NO: 18405700 NR Description: similar to receptor-like protein kinase, putative
MLSEPTVATSADMNWCCVPKAKREENPYSNSIGGIYSEKNIRLFSYAELRSATDNFNRTNKVGRGGFGTVYKGTIRSGREVAVKVLSAESRQGIREFLTEIDVISNVKHPNLVELIGCCVEGSNRILVYEYLKNSSLDRALLASNSEPADFTWSVRSAICLGVARGLAYLHEEIAAPIVHRDIKASNILLDRNYVPKIGDFGLAKLFPDNVTHISTRVAGTTGYLAPEYAWHGQLTKKADIYSFGVLVLEIVSGTSSSRSILMDDKILLEKAWELYEAKRLKELVDPALVDCPEEEAIRYIMVALFCLQAAAARRPTMPQVVTMLSKPVRINESELTAPGYLQEYSRRSPLSKATTSTDSRFKNLASQEDSNMFSTVVPPTVTEMSPR

SEQ ID NO: 31831 - protein, 376 aa, Zea mays subsp. mays
  peptide (1)..(376): Ceres Seq. ID no. 12352732
  misc_feature (3)..(376): NCBI GI NO: 38344039 NR Description: OSJNBb0017I01.6
  misc_feature (28)..(376): NCBI GI NO: 5923666 NR Description: putative receptor ser/thr protein kinase
  misc_feature (28)..(376): NCBI GI NO: 18398327 NR Description: putative receptor ser/thr protein kinase
  misc_feature (28)..(364): NCBI GI NO: 34901978 NR Description: putative receptor ser/thr protein
  misc_feature (28)..(376): NCBI GI NO: 6403501 NR Description: putative protein kinase [Arabidopsis thaliana]
  misc_feature (4)..(373): NCBI GI NO: 38344329 NR Description: OSJNBa0058K23.11
  misc_feature (21)..(364): NCBI GI NO: 18394385 NR Description: receptor-like serine/threonine kinase, putative
  misc_feature (2)..(364): NCBI GI NO: 25287648 NR Description: hypothetical protein F19K19.4
  misc_feature (32)..(376): NCBI GI NO: 6056376 NR Description: Similar to serine/threonine kinases
  misc_feature (32)..(376): NCBI GI NO: 18405700 NR Description: similar to receptor-like protein kinase, putative
MNWCCVPKAKREENPYSNSIGGIYSEKNIRLFSYAELRSATDNFNRTNKVGRGGFGTVYKGTIRSGREVAVKVLSAESRQGIREFLTEIDVISNVKHPNLVELIGCCVEGSNRILVYEYLKNSSLDRALLASNSEPADFTWSVRSAICLGVARGLAYLHEEIAAPIVHRDIKASNILLDRNYVPKIGDFGLAKLFPDNVTHISTRVAGTTGYLAPEYAWHGQLTKKADIYSFGVLVLEIVSGTSSSRSILMDDKILLEKAWELYEAKRLKELVDPALVDCPEEEAIRYIMVALFCLQAAAARRPTMPQVVTMLSKPVRINESELTAPGYLQEYSRRSPLSKATTSTDSRFKNLASQEDSNMFSTVVPPTVTEMSPR

SEQ ID NO: 31832 - DNA, 1118 bp, Zea mays subsp. mays
  misc_feature (1)..(1118): Ceres Seq. ID no. 12406447
atccgaccagcgtttactcctaactagtttgccgatcgagcccgggcgacgtgagatacgagcggcgtcgaccggcgccggcgagcctccgcagccgcagccgcccgatctgggttttctttcgtagcggtagcggaagatgagccaggaccaggagaacggaggcaccaacgggcagcacgccgccgacgtgatggaggtggagccgaagcgccgggcgccgcggctgaacgagcgcatcctgtcgtcgctgtcgcggaggtccgtcgccgcgcacccctggcacgacctcgagatcggtcctgaagctccggccgtcttcaacgtcgtcgtggagatcaccaaggggagcaaggtgaagtacgagctggacaagaagacggggctcatcaaggtggaccggatcctctactcgtccgtcgtctaccctcacaactacggcttcgtgccccggacgctctgcgaggacaacgaccccatggacgtcctcgtgctcatgcaggaacccgtccttcccggcgccttcctccgcgccagggccatcggcctcatgcctatgatagatcagggagagaaggacgacaagatcatcgccgtctgcgccgacgaccccgagtaccgccactacaacgacatcagcgagctctcccctcaccgcctccaggagatccgccgcttctttgaagactacaagaagaacgagaacaaggaggtggccgtcaacgacttcctgcccgccgccgctgcccgcgaagccatccagtactccatggacctgtacggccagtacatcatgcagaccctgcggcggtagagcgttcctaccagatcccatgccagctgagctgacgcaagagcacagatcgacagaatccttgtggtctcgtctcatgcatggatagccaggtcacatggcttgtcgacgacgaccatgcatctcttcttcccagcgatatatattttagcctgtatcttcccttatttattatagtcttttgggtttggtggaatctgtccacagtgtggtttgatctatgtattcctcttctacatttctcccagaacgaatcgatgagattaataataatgttactacaaccctgttgttttgtcgaccg

SEQ ID NO: 31833 - protein, 224 aa, Zea mays subsp. mays
  peptide (1)..(224): Ceres Seq. ID no. 12406448
  misc_feature (62)..(216): Pfam Name: Pfam Description:  Inorganic pyrophosphatase
  misc_feature (22)..(224): NCBI GI NO: 4033424 NR Description: Soluble inorganic pyrophosphatase
  misc_feature (25)..(224): NCBI GI NO: 38345829 NR Description: OSJNBa0070M12.12
  misc_feature (20)..(224): NCBI GI NO: 5669924 NR Description: soluble inorganic pyrophosphatase
  misc_feature (25)..(224): NCBI GI NO: 15226453 NR Description: putative inorganic pyrophosphatase
  misc_feature (24)..(224): NCBI GI NO: 15223288 NR Description: soluble inorganic pyrophosphatase, putative
  misc_feature (20)..(224): NCBI GI NO: 2500047 NR Description: Soluble inorganic pyrophosphatase
  misc_feature (25)..(224): NCBI GI NO: 26451240 NR Description: putative inorganic pyrophosphatase
  misc_feature (24)..(183): NCBI GI NO: 25290346 NR Description: protein T25K16.5 [imported] - Arabidopsis thaliana
  misc_feature (185)..(224): NCBI GI NO: 25290346 NR Description: protein T25K16.5 [imported] - Arabidopsis thaliana
  misc_feature (4)..(224): NCBI GI NO: 40642617 NR Description: soluble pyrophosphatase [Beta vulgaris]
MSQDQENGGTNGQHAADVMEVEPKRRAPRLNERILSSLSRRSVAAHPWHDLEIGPEAPAVFNVVVEITKGSKVKYELDKKTGLIKVDRILYSSVVYPHNYGFVPRTLCEDNDPMDVLVLMQEPVLPGAFLRARAIGLMPMIDQGEKDDKIIAVCADDPEYRHYNDISELSPHRLQEIRRFFEDYKKNENKEVAVNDFLPAAAAREAIQYSMDLYGQYIMQTLRR

SEQ ID NO: 31834 - protein, 206 aa, Zea mays subsp. mays
  peptide (1)..(206): Ceres Seq. ID no. 12406449
  misc_feature (44)..(198): Pfam Name: Pfam Description:  Inorganic pyrophosphatase
  misc_feature (4)..(206): NCBI GI NO: 4033424 NR Description: Soluble inorganic pyrophosphatase
  misc_feature (7)..(206): NCBI GI NO: 38345829 NR Description: OSJNBa0070M12.12
  misc_feature (2)..(206): NCBI GI NO: 5669924 NR Description: soluble inorganic pyrophosphatase
  misc_feature (7)..(206): NCBI GI NO: 15226453 NR Description: putative inorganic pyrophosphatase
  misc_feature (6)..(206): NCBI GI NO: 15223288 NR Description: soluble inorganic pyrophosphatase, putative
  misc_feature (2)..(206): NCBI GI NO: 2500047 NR Description: Soluble inorganic pyrophosphatase
  misc_feature (7)..(206): NCBI GI NO: 26451240 NR Description: putative inorganic pyrophosphatase
  misc_feature (6)..(165): NCBI GI NO: 25290346 NR Description: protein T25K16.5 [imported] - Arabidopsis thaliana
  misc_feature (167)..(206): NCBI GI NO: 25290346 NR Description: protein T25K16.5 [imported] - Arabidopsis thaliana
  misc_feature (1)..(206): NCBI GI NO: 40642617 NR Description: soluble pyrophosphatase [Beta vulgaris]
MEVEPKRRAPRLNERILSSLSRRSVAAHPWHDLEIGPEAPAVFNVVVEITKGSKVKYELDKKTGLIKVDRILYSSVVYPHNYGFVPRTLCEDNDPMDVLVLMQEPVLPGAFLRARAIGLMPMIDQGEKDDKIIAVCADDPEYRHYNDISELSPHRLQEIRRFFEDYKKNENKEVAVNDFLPAAAAREAIQYSMDLYGQYIMQTLRR

SEQ ID NO: 31835 - DNA, 933 bp, Zea mays subsp. mays
  misc_feature (1)..(933): Ceres Seq. ID no. 12373437
atcactcaccaagactccaagcactcacctcctcagctcattgccagccttttggttccttccagctagcaaccggacggccagccagccagcagactagtagtagctcttctcacacctactgtgtctgtgtctgtgtgtgctcgcctttagcggcaagcgacccacccccccttcggtagcgagcgacaatgcagtacgcggcggcggagcaggcgtggtacatgccggcgaccacgacgatgatggcggagagcgcggtggcgcgcgtggagcggctggcgtcggagagcgcggtggtggtgttcagcgtgagcagctgctgcatgtgccacgccgtgaagcggctcttctgcggcatgggcgtgcacccgacggtgcacgagctggacctggacccgcgcggacgagagctggagcacgccctcgcccgcctcatcggctacggccccgccggcgcgcccgtcgtccccgtcgtcttcatcggcgggaagctggtcggcgccatggaccgggtcatggccgcgcatatcaacggctccctcgtcccacttctcaaggaggccggcgcgctctggctctgaactgtaggcaggccggccggcaggccgcgcgccattgctggtgactcgtgtgccaacaggctacgcagcttcttccgttgtctaagttagttccttgttgctgtagaacctgatgtcacttgctgcaagctaatcaaactacgtactaagctacggtgataggaggatacatccatggacagggccggatggtggtagatcagtgatgcatcggattgggcttaatatgtgtgtgcgtgcatgtggtgtttgacgcatgcgctggatttgctttgcttggggtgctacactgttaccaccactgttgtttaatttgatatcctttaattttaataccttggttcctctc

SEQ ID NO: 31836 - protein, 130 aa, Zea mays subsp. mays
  peptide (1)..(130): Ceres Seq. ID no. 12373438
  misc_feature (35)..(122): Pfam Name: Pfam Description:  Glutaredoxin
  misc_feature (1)..(130): NCBI GI NO: 21740746 NR Description: OSJNBa0072K14.11
  misc_feature (18)..(130): NCBI GI NO: 15232836 NR Description: putative glutaredoxin; protein id: At3g02000.1
  misc_feature (24)..(130): NCBI GI NO: 15241297 NR Description: glutaredoxin-like protein; protein id: At5g14070
  misc_feature (30)..(128): NCBI GI NO: 1532163 NR Description: similar to glutaredoxin encoded by GenBankAccession Number Z49699
  misc_feature (30)..(130): NCBI GI NO: 21537203 NR Description: glutaredoxin-like protein [Arabidopsis thaliana]
  misc_feature (26)..(130): NCBI GI NO: 34914726 NR Description: P0560B06.28
  misc_feature (1)..(130): NCBI GI NO: 33146704 NR Description: glutaredoxin-like protein
  misc_feature (26)..(130): NCBI GI NO: 34907208 NR Description: putative glutaredoxin
  misc_feature (27)..(130): NCBI GI NO: 15234680 NR Description: glutaredoxin homolog; protein id: At4g15700.1
  misc_feature (26)..(130): NCBI GI NO: 15234671 NR Description: glutaredoxin; protein id: At4g15660.1
MQYAAAEQAWYMPATTTMMAESAVARVERLASESAVVVFSVSSCCMCHAVKRLFCGMGVHPTVHELDLDPRGRELEHALARLIGYGPAGAPVVPVVFIGGKLVGAMDRVMAAHINGSLVPLLKEAGALWL

SEQ ID NO: 31837 - protein, 119 aa, Zea mays subsp. mays
  peptide (1)..(119): Ceres Seq. ID no. 12373439
  misc_feature (24)..(111): Pfam Name: Pfam Description:  Glutaredoxin
  misc_feature (1)..(119): NCBI GI NO: 21740746 NR Description: OSJNBa0072K14.11
  misc_feature (7)..(119): NCBI GI NO: 15232836 NR Description: putative glutaredoxin; protein id: At3g02000.1
  misc_feature (13)..(119): NCBI GI NO: 15241297 NR Description: glutaredoxin-like protein; protein id: At5g14070
  misc_feature (19)..(117): NCBI GI NO: 1532163 NR Description: similar to glutaredoxin encoded by GenBankAccession Number Z49699
  misc_feature (19)..(119): NCBI GI NO: 21537203 NR Description: glutaredoxin-like protein [Arabidopsis thaliana]
  misc_feature (15)..(119): NCBI GI NO: 34914726 NR Description: P0560B06.28
  misc_feature (1)..(119): NCBI GI NO: 33146704 NR Description: glutaredoxin-like protein
  misc_feature (15)..(119): NCBI GI NO: 34907208 NR Description: putative glutaredoxin
  misc_feature (16)..(119): NCBI GI NO: 15234680 NR Description: glutaredoxin homolog; protein id: At4g15700.1
  misc_feature (15)..(119): NCBI GI NO: 15234671 NR Description: glutaredoxin; protein id: At4g15660.1
MPATTTMMAESAVARVERLASESAVVVFSVSSCCMCHAVKRLFCGMGVHPTVHELDLDPRGRELEHALARLIGYGPAGAPVVPVVFIGGKLVGAMDRVMAAHINGSLVPLLKEAGALWL

SEQ ID NO: 31838 - protein, 113 aa, Zea mays subsp. mays
  peptide (1)..(113): Ceres Seq. ID no. 12373440
  misc_feature (18)..(105): Pfam Name: Pfam Description:  Glutaredoxin
  misc_feature (1)..(113): NCBI GI NO: 21740746 NR Description: OSJNBa0072K14.11
  misc_feature (1)..(113): NCBI GI NO: 15232836 NR Description: putative glutaredoxin; protein id: At3g02000.1
  misc_feature (7)..(113): NCBI GI NO: 15241297 NR Description: glutaredoxin-like protein; protein id: At5g14070
  misc_feature (13)..(111): NCBI GI NO: 1532163 NR Description: similar to glutaredoxin encoded by GenBankAccession Number Z49699
  misc_feature (13)..(113): NCBI GI NO: 21537203 NR Description: glutaredoxin-like protein [Arabidopsis thaliana]
  misc_feature (9)..(113): NCBI GI NO: 34914726 NR Description: P0560B06.28
  misc_feature (1)..(113): NCBI GI NO: 33146704 NR Description: glutaredoxin-like protein
  misc_feature (9)..(113): NCBI GI NO: 34907208 NR Description: putative glutaredoxin
  misc_feature (10)..(113): NCBI GI NO: 15234680 NR Description: glutaredoxin homolog; protein id: At4g15700.1
  misc_feature (9)..(113): NCBI GI NO: 15234671 NR Description: glutaredoxin; protein id: At4g15660.1
MMAESAVARVERLASESAVVVFSVSSCCMCHAVKRLFCGMGVHPTVHELDLDPRGRELEHALARLIGYGPAGAPVVPVVFIGGKLVGAMDRVMAAHINGSLVPLLKEAGALWL

SEQ ID NO: 31839 - DNA, 1764 bp, Zea mays subsp. mays
  misc_feature (1)..(1764): Ceres Seq. ID no. 12350277
agtctctttaaaaggccctcgagaaaaatctccgcgtcaccaccaagcacgtccccgttccattacaacaaaagatcgtgctagtaagcaatacgctcaatttgagtttgaggtcgatttctggagcattcgagttcttttccagtaaacttttcaggtttaagcgcggattgatggcagagctgctgtagatttggagcattttggggttggttttttgcgatttgaggatcgaatcgggctggtacaaccgcgctcacgtgcatatataaggcgaattggcggtttgttggctacaattgttcggttcttatcttgaagggtggtgcgaattggaggattcttcccgaatcgagaaggtgtaggccaaattcgcaaggaagctgcagctatccgcgtgagaaggctgcctctcacaaattctcggtcggtgccatcccggcggtggactgcttttgggcttcttcgaaggttcgtatcttttggctcaggagaaagtggttctgaaggcctcgggcttctcatccccaattcgatccgttcccgagacggtgattgggtcatagatggggacggggtcgagcatcctgggcgcggatggagagtggggggagacgtccctcggcgacatgccggagagctgcgtggcggcggtactcctctacctcgacccgccggagatctgccaggtggcccgtctcaacagcgccttccgcggcgccgcctcggcggactgcgtctgggccgccaagcttcccgccaactaccgttaccttgcggccctagccgcggccgccgatgacgagggctgtggcgatggagatgccagcggcaagcgcttgaccaagaaggagatttacgctcgtctgtgccgatccactttctttgatgccggcagaaagtaattctggattctgaagaacaagggagccctttgcatgagtatatcatcaaaggcaatgactattaccgggatagatgatcggaggtactggagccacctcgctacagaggaatcaagattccatactgttgcctatctccagcagatttggtggctcgaggtagatggggagcttgagttctgctttcctgctggtgcctacagcctttttttcatcttcacctgggtcgaccctataggcgcatgggtcgttggctttgtggaactgagcatgttcatggttgggatgtcacgcccacacggttccagctcacgacctctgatgagcagcaggcgacatccgaatattatctgcatctacatgaacaagggggctggaagctttaccatgttggtgattttgtcatatcaaattccgatgagcccatgaaactcaagttctcaatgatgcagatcgattgcacacatatgaaaggcggcttgtgcgttgactccgtgtttatatatcctaaagggtacaagcctgagaaggcgaacatagtctgcacctagttcggcaaagttggccttgtacctctcctgcatgatgaaacaagaggcaattcaaatgtggatggctagcctttttcctggcgatccttacctgaaagcccattgtacattctttttgttttttcccttcattctggtagttttgcatgaatgtaaggtctttcttgtttttttttgggtagtgttagttaaacaggtggagaatagggaatttagaaacaggtcaagtgaagtaagtcttgagtcattgaggcggtagattgccatacagcaataataatgttcggcgagctggattgatttttttg

SEQ ID NO: 31840 - protein, 131 aa, Zea mays subsp. mays
  peptide (1)..(131): Ceres Seq. ID no. 12350278
  misc_feature (1)..(60): NCBI GI NO: 38567911 NR Description: OSJNBa0088I22.7
  misc_feature (1)..(60): NCBI GI NO: 37536186 NR Description: unknown protein
  misc_feature (1)..(60): NCBI GI NO: 30695337 NR Description: F-box protein (lectin-related)
  misc_feature (1)..(60): NCBI GI NO: 23397334 NR Description: unknown protein [Arabidopsis thaliana]
  misc_feature (1)..(68): NCBI GI NO: 15242282 NR Description: putative protein; protein id: At5g52120
  misc_feature (1)..(60): NCBI GI NO: 15222051 NR Description: hypothetical protein; protein id: At1g12710.1
  misc_feature (1)..(60): NCBI GI NO: 15231726 NR Description: putative protein; protein id: At3g53000.1
  misc_feature (1)..(60): NCBI GI NO: 15221677 NR Description: unknown protein; protein id: At1g63090.1
  misc_feature (1)..(60): NCBI GI NO: 27754673 NR Description: unknown protein [Arabidopsis thaliana]
  misc_feature (1)..(62): NCBI GI NO: 28812128 NR Description: P0443G08.20
MSISSKAMTITGIDDRRYWSHLATEESRFHTVAYLQQIWWLEVDGELEFCFPAGAYSLFFIFTWVDPIGAWVVGFVELSMFMVGMSRPHGSSSRPLMSSRRHPNIICIYMNKGAGSFTMLVILSYQIPMSP

SEQ ID NO: 31841 - protein, 124 aa, Zea mays subsp. mays
  peptide (1)..(124): Ceres Seq. ID no. 12350279
  misc_feature (1)..(53): NCBI GI NO: 38567911 NR Description: OSJNBa0088I22.7
  misc_feature (1)..(53): NCBI GI NO: 37536186 NR Description: unknown protein
  misc_feature (1)..(53): NCBI GI NO: 30695337 NR Description: F-box protein (lectin-related)
  misc_feature (1)..(53): NCBI GI NO: 23397334 NR Description: unknown protein [Arabidopsis thaliana]
  misc_feature (1)..(61): NCBI GI NO: 15242282 NR Description: putative protein; protein id: At5g52120
  misc_feature (1)..(53): NCBI GI NO: 15222051 NR Description: hypothetical protein; protein id: At1g12710.1
  misc_feature (1)..(53): NCBI GI NO: 15231726 NR Description: putative protein; protein id: At3g53000.1
  misc_feature (1)..(53): NCBI GI NO: 15221677 NR Description: unknown protein; protein id: At1g63090.1
  misc_feature (1)..(53): NCBI GI NO: 27754673 NR Description: unknown protein [Arabidopsis thaliana]
  misc_feature (1)..(55): NCBI GI NO: 28812128 NR Description: P0443G08.20
MTITGIDDRRYWSHLATEESRFHTVAYLQQIWWLEVDGELEFCFPAGAYSLFFIFTWVDPIGAWVVGFVELSMFMVGMSRPHGSSSRPLMSSRRHPNIICIYMNKGAGSFTMLVILSYQIPMSP

SEQ ID NO: 31842 - protein, 112 aa, Zea mays subsp. mays
  peptide (1)..(112): Ceres Seq. ID no. 12350280
  misc_feature (22)..(112): NCBI GI NO: 38567911 NR Description: OSJNBa0088I22.7
  misc_feature (1)..(112): NCBI GI NO: 37536186 NR Description: unknown protein
  misc_feature (19)..(112): NCBI GI NO: 30695337 NR Description: F-box protein (lectin-related)
  misc_feature (19)..(112): NCBI GI NO: 23397334 NR Description: unknown protein [Arabidopsis thaliana]
  misc_feature (1)..(112): NCBI GI NO: 15242282 NR Description: putative protein; protein id: At5g52120
  misc_feature (3)..(112): NCBI GI NO: 15222051 NR Description: hypothetical protein; protein id: At1g12710.1
  misc_feature (1)..(112): NCBI GI NO: 15231726 NR Description: putative protein; protein id: At3g53000.1
  misc_feature (5)..(112): NCBI GI NO: 15221677 NR Description: unknown protein; protein id: At1g63090.1
  misc_feature (1)..(112): NCBI GI NO: 28812128 NR Description: P0443G08.20
  misc_feature (21)..(112): NCBI GI NO: 15238574 NR Description: phloem-specific lectin-like protein
MGTGSSILGADGEWGETSLGDMPESCVAAVLLYLDPPEICQVARLNSAFRGAASADCVWAAKLPANYRYLAALAAAADDEGCGDGDASGKRLTKKEIYARLCRSTFFDAGRK

SEQ ID NO: 31843 - DNA, 1280 bp, Zea mays subsp. mays
  misc_feature (1)..(1280): Ceres Seq. ID no. 12354459
gacgagcaagcaagcagttgcagttgcagcggcctcctcctctgcttcctccctcctcctcctcaccatggtgctggctgcgcacgatccccctccccttgtgttcgacgctgcccgcctgagcggcctctccgacatcccgcagcagttcatctggccggcggacgagagccccaccccggactccgccgaggagctggccgtgccgctcatcgacctctccggggacgccgccgaggtggtccggcaggtccggcgcgcctgcgacctgcacggcttcttccaggtggtggggcacggcatcgacgcggcgctgacggcggaggcccaccgctgcatggacgccttcttcacgctgccgctcccggacaagcagcgcgcgcagcgccgccagggggacagctgcggctacgccagcagcttcacgggccggttcgcgtccaagctgccctggaaggagacgctgtcgttccgctacaccgacgacgacgacggcgacaagtccaaggacgtcgtggcgtcctacttcgtggacaagctgggcgaggggtaccggcaccacggggaggtgtacgggcgctactgctctgagatgagccgtctgtcgctggagctcatggaggtgctaggcgagagcctgggcgtgggccggcgccacttccggcgcttcttccaggggaacgactccatcatgcgcctcaactactacccgccgtgccagcggccctacgacacgctgggcacggggccgcattgcgaccccacgtcgctcaccatcctgcaccaggacgacgtgggcggactccaggtgttcgacgccgccacgctcgcgtggcgctccatcaggcccccgcccgggcgccttcgtcgtcaacatcggcgacaccttcatggcgctctccaacgggcgctacaggagctgcctccaccgcgccgtcgtcaacagccgggtggcacgccgctcgctcgccttcttcctgtgcccggagatggacaaggtggtcaggccgcccaaggagctggtggacgacgccaacccgagggcgtacccggacttcacgtggaggacgctgctggacttcaccatgaggcactacaggtcggacatgaggacgctcgaggccttctccaactggctcagcaccagtagcaatggcggacagcacctgctggagaagaagtaggcatgctatttgggtatggaagatggtggatgtaagcaaacaaagccaaattaagcagagtaggttaattaaggttggctgatgatccatttaggg

SEQ ID NO: 31844 - protein, 382 aa, Zea mays subsp. mays
  peptide (1)..(382): Ceres Seq. ID no. 12354460
  misc_feature (227)..(288): Pfam Name: II Pfam Description: 2OG-Fe
  misc_feature (34)..(283): NCBI GI NO: 7433220 NR Description: gibberellin 20-dioxygenase (EC 1
  misc_feature (34)..(283): NCBI GI NO: 7433219 NR Description: gibberellin 20-dioxygenase (EC 1
  misc_feature (34)..(283): NCBI GI NO: 7433218 NR Description: gibberellin 20-dioxygenase (EC 1.14.11.-)
  misc_feature (34)..(283): NCBI GI NO: 13625521 NR Description: gibberellin 20-oxidase [Lolium perenne]
  misc_feature (34)..(283): NCBI GI NO: 13625523 NR Description: gibberellin 20-oxidase [Lolium perenne]
  misc_feature (34)..(283): NCBI GI NO: 13625519 NR Description: gibberellin 20-oxidase [Lolium perenne]
  misc_feature (34)..(283): NCBI GI NO: 13625525 NR Description: gibberellin 20-oxidase [Lolium perenne]
  misc_feature (33)..(288): NCBI GI NO: 30102973 NR Description: putative gibberelin 20-oxidase
  misc_feature (23)..(288): NCBI GI NO: 7433224 NR Description: probable gibberellin C-20 oxidase (EC 1
  misc_feature (29)..(283): NCBI GI NO: 30519873 NR Description: gibberellin 20-oxidase [Nicotiana tabacum]
TSKQAVAVAAASSSASSLLLLTMVLAAHDPPPLVFDAARLSGLSDIPQQFIWPADESPTPDSAEELAVPLIDLSGDAAEVVRQVRRACDLHGFFQVVGHGIDAALTAEAHRCMDAFFTLPLPDKQRAQRRQGDSCGYASSFTGRFASKLPWKETLSFRYTDDDDGDKSKDVVASYFVDKLGEGYRHHGEVYGRYCSEMSRLSLELMEVLGESLGVGRRHFRRFFQGNDSIMRLNYYPPCQRPYDTLGTGPHCDPTSLTILHQDDVGGLQVFDAATLAWRSIRPPPGRLRRQHRRHLHGALQRALQELPPPRRRQQPGGTPLARLLPVPGDGQGGQAAQGAGGRRQPEGVPGLHVEDAAGLHHEALQVGHEDARGLLQLAQHQ

SEQ ID NO: 31845 - protein, 360 aa, Zea mays subsp. mays
  peptide (1)..(360): Ceres Seq. ID no. 12354461
  misc_feature (205)..(266): Pfam Name: II Pfam Description: 2OG-Fe
  misc_feature (12)..(261): NCBI GI NO: 7433220 NR Description: gibberellin 20-dioxygenase (EC 1
  misc_feature (12)..(261): NCBI GI NO: 7433219 NR Description: gibberellin 20-dioxygenase (EC 1
  misc_feature (12)..(261): NCBI GI NO: 7433218 NR Description: gibberellin 20-dioxygenase (EC 1.14.11.-)
  misc_feature (12)..(261): NCBI GI NO: 13625521 NR Description: gibberellin 20-oxidase [Lolium perenne]
  misc_feature (12)..(261): NCBI GI NO: 13625523 NR Description: gibberellin 20-oxidase [Lolium perenne]
  misc_feature (12)..(261): NCBI GI NO: 13625519 NR Description: gibberellin 20-oxidase [Lolium perenne]
  misc_feature (12)..(261): NCBI GI NO: 13625525 NR Description: gibberellin 20-oxidase [Lolium perenne]
  misc_feature (11)..(266): NCBI GI NO: 30102973 NR Description: putative gibberelin 20-oxidase
  misc_feature (1)..(266): NCBI GI NO: 7433224 NR Description: probable gibberellin C-20 oxidase (EC 1
  misc_feature (7)..(261): NCBI GI NO: 30519873 NR Description: gibberellin 20-oxidase [Nicotiana tabacum]
MVLAAHDPPPLVFDAARLSGLSDIPQQFIWPADESPTPDSAEELAVPLIDLSGDAAEVVRQVRRACDLHGFFQVVGHGIDAALTAEAHRCMDAFFTLPLPDKQRAQRRQGDSCGYASSFTGRFASKLPWKETLSFRYTDDDDGDKSKDVVASYFVDKLGEGYRHHGEVYGRYCSEMSRLSLELMEVLGESLGVGRRHFRRFFQGNDSIMRLNYYPPCQRPYDTLGTGPHCDPTSLTILHQDDVGGLQVFDAATLAWRSIRPPPGRLRRQHRRHLHGALQRALQELPPPRRRQQPGGTPLARLLPVPGDGQGGQAAQGAGGRRQPEGVPGLHVEDAAGLHHEALQVGHEDARGLLQLAQHQ

SEQ ID NO: 31846 - protein, 270 aa, Zea mays subsp. mays
  peptide (1)..(270): Ceres Seq. ID no. 12354462
  misc_feature (115)..(176): Pfam Name: II Pfam Description: 2OG-Fe
  misc_feature (1)..(171): NCBI GI NO: 7433220 NR Description: gibberellin 20-dioxygenase (EC 1
  misc_feature (1)..(171): NCBI GI NO: 7433219 NR Description: gibberellin 20-dioxygenase (EC 1
  misc_feature (1)..(171): NCBI GI NO: 7433218 NR Description: gibberellin 20-dioxygenase (EC 1.14.11.-)
  misc_feature (1)..(171): NCBI GI NO: 13625521 NR Description: gibberellin 20-oxidase [Lolium perenne]
  misc_feature (1)..(171): NCBI GI NO: 13625523 NR Description: gibberellin 20-oxidase [Lolium perenne]
  misc_feature (1)..(171): NCBI GI NO: 13625519 NR Description: gibberellin 20-oxidase [Lolium perenne]
  misc_feature (1)..(171): NCBI GI NO: 13625525 NR Description: gibberellin 20-oxidase [Lolium perenne]
  misc_feature (1)..(176): NCBI GI NO: 30102973 NR Description: putative gibberelin 20-oxidase
  misc_feature (1)..(176): NCBI GI NO: 7433224 NR Description: probable gibberellin C-20 oxidase (EC 1
  misc_feature (1)..(171): NCBI GI NO: 30519873 NR Description: gibberellin 20-oxidase [Nicotiana tabacum]
MDAFFTLPLPDKQRAQRRQGDSCGYASSFTGRFASKLPWKETLSFRYTDDDDGDKSKDVVASYFVDKLGEGYRHHGEVYGRYCSEMSRLSLELMEVLGESLGVGRRHFRRFFQGNDSIMRLNYYPPCQRPYDTLGTGPHCDPTSLTILHQDDVGGLQVFDAATLAWRSIRPPPGRLRRQHRRHLHGALQRALQELPPPRRRQQPGGTPLARLLPVPGDGQGGQAAQGAGGRRQPEGVPGLHVEDAAGLHHEALQVGHEDARGLLQLAQHQ

SEQ ID NO: 31847 - DNA, 1616 bp, Zea mays subsp. mays
  misc_feature (1)..(1616): Ceres Seq. ID no. 12637795
cttccttcctttccccgctcttctcccacacaaacgccaccgccgcatcgaatccgagacgccgatctcggattcgccgtcaccacacgctgccctcgtcgcgctctcccgccgccgccgctcgtctcgtcagccatggcaggattggcaccagaagggtcgcaatttgatgacaagcagtatgacaagaaaatgcaggagatattaactgaagacttcttcacttcatatgatgatgtttgtgaaagttttgacagcatgggactgcaagagaaccttctgagaggcatctatgcctatggttttgagaagccatcggctattcagcaaaggggaatagttcccttctgcaaggggcttgacgtgattcagcaagctcagtctggaactggaaaaacagctaccttctgttctggaatcttgcagcaacttgattatggattggttgaatgccaggcattggttcttgctccaacccgtgagcttgctcagcaaattgagaaggttatgcgtgctcttggggactatttgggtgtcaaagtgcatgcctgtgttggtggaacatctgttcgtgaggaccaaaggattcttgccagtggtgtgcatgttgttgtgggcacaccaggacgtgtgtttgatatgttgcgcaggcagtctctccgtcccgacaacatcaagatgtttgtgttggatgaggctgatgagatgctctcccgtggattcaaggatcagatctatgatatcttccagcttcttccatccaagattcaggtcggtgtcttctcagctaccatgccccctgaggcccttgagatcacgcgcaagttcatgaacaaacctgtgaggattctcgtcaagagagatgagctcacccttgagggtatcaagcaattctatgtcaatatcgacaaggaagattggaagctcgacactctgtgtgacctgtatgagaccctggcaatcacccagagtgtcatctttgtgaacacacgccgcaaggtggactggctcacggacaagatgaggagcagggaccacaccgtgtcagctacacacggtgatatggaccagaacaccagggacatcatcatgagggagttcaggtccgggtcctctcgtgtgctcatcaccaccgacctgctcgcccgtggtatcgacgtccagcaggtctcacttgtcatcaactacgacctgccgacccagccagagaactacctccaccgcatcggccgtagtggtcggtttggaaggaagggtgttgccatcaacttcgtcacccgcgacgacgagcgaatgctgtttgacatccagaggttctacaacgtgaccgttgaggagctgccggccaatgtcgccgaccttctctagatagtatggctgctaaggtttctggataaaggagtttgtttttgttaaaatacgccaacttttctctgctttggatgagtggtaaggtccggggtctgttcgtattgtggcgaaggatgggttttaagtttattttgtcgtatgcaacgtttcggaatttttgtagcgagtaggctacgtgccgctcctgggctagctgggtgctgagacactactgaagtatttttaccttagctgttgggcttatg

SEQ ID NO: 31848 - protein, 455 aa, Zea mays subsp. mays
  peptide (1)..(455): Ceres Seq. ID no. 12637796
  misc_feature (95)..(298): Pfam Name: Pfam Description:  DEAD/DEAH box helicase
  misc_feature (46)..(455): NCBI GI NO: 2500522 NR Description: Eukaryotic initiation factor 4A (eIF-4A) (eIF4A)
  misc_feature (46)..(455): NCBI GI NO: 2341061 NR Description: translational initiation factor eIF-4A [Zea mays]
  misc_feature (46)..(455): NCBI GI NO: 2286151 NR Description: translation initiation factor [Zea mays]
  misc_feature (46)..(455): NCBI GI NO: 1170509 NR Description: EUKARYOTIC INITIATION FACTOR 4A (EIF-4A) (EIF4A)
  misc_feature (46)..(455): NCBI GI NO: 547712 NR Description: Eukaryotic initiation factor 4A (eIF-4A) (eIF4A)
  misc_feature (46)..(455): NCBI GI NO: 2500518 NR Description: Eukaryotic initiation factor 4A-11
  misc_feature (46)..(455): NCBI GI NO: 2119933 NR Description: translation initiation factor eIF-4A
  misc_feature (46)..(455): NCBI GI NO: 2119938 NR Description: translation initiation factor eIF-4A
  misc_feature (46)..(455): NCBI GI NO: 2500520 NR Description: Eukaryotic initiation factor 4A-14
  misc_feature (46)..(455): NCBI GI NO: 1170511 NR Description: Eukaryotic initiation factor 4A-10
LPSFPRSSPTQTPPPHRIRDADLGFAVTTRCPRRALPPPPLVSSAMAGLAPEGSQFDDKQYDKKMQEILTEDFFTSYDDVCESFDSMGLQENLLRGIYAYGFEKPSAIQQRGIVPFCKGLDVIQQAQSGTGKTATFCSGILQQLDYGLVECQALVLAPTRELAQQIEKVMRALGDYLGVKVHACVGGTSVREDQRILASGVHVVVGTPGRVFDMLRRQSLRPDNIKMFVLDEADEMLSRGFKDQIYDIFQLLPSKIQVGVFSATMPPEALEITRKFMNKPVRILVKRDELTLEGIKQFYVNIDKEDWKLDTLCDLYETLAITQSVIFVNTRRKVDWLTDKMRSRDHTVSATHGDMDQNTRDIIMREFRSGSSRVLITTDLLARGIDVQQVSLVINYDLPTQPENYLHRIGRSGRFGRKGVAINFVTRDDERMLFDIQRFYNVTVEELPANVADLL

SEQ ID NO: 31849 - protein, 410 aa, Zea mays subsp. mays
  peptide (1)..(410): Ceres Seq. ID no. 12637797
  misc_feature (50)..(253): Pfam Name: Pfam Description:  DEAD/DEAH box helicase
  misc_feature (1)..(410): NCBI GI NO: 2500522 NR Description: Eukaryotic initiation factor 4A (eIF-4A) (eIF4A)
  misc_feature (1)..(410): NCBI GI NO: 2341061 NR Description: translational initiation factor eIF-4A [Zea mays]
  misc_feature (1)..(410): NCBI GI NO: 2286151 NR Description: translation initiation factor [Zea mays]
  misc_feature (1)..(410): NCBI GI NO: 1170509 NR Description: EUKARYOTIC INITIATION FACTOR 4A (EIF-4A) (EIF4A)
  misc_feature (1)..(410): NCBI GI NO: 547712 NR Description: Eukaryotic initiation factor 4A (eIF-4A) (eIF4A)
  misc_feature (1)..(410): NCBI GI NO: 2500518 NR Description: Eukaryotic initiation factor 4A-11
  misc_feature (1)..(410): NCBI GI NO: 2119933 NR Description: translation initiation factor eIF-4A
  misc_feature (1)..(410): NCBI GI NO: 2119938 NR Description: translation initiation factor eIF-4A
  misc_feature (1)..(410): NCBI GI NO: 2500520 NR Description: Eukaryotic initiation factor 4A-14
  misc_feature (1)..(410): NCBI GI NO: 1170511 NR Description: Eukaryotic initiation factor 4A-10
MAGLAPEGSQFDDKQYDKKMQEILTEDFFTSYDDVCESFDSMGLQENLLRGIYAYGFEKPSAIQQRGIVPFCKGLDVIQQAQSGTGKTATFCSGILQQLDYGLVECQALVLAPTRELAQQIEKVMRALGDYLGVKVHACVGGTSVREDQRILASGVHVVVGTPGRVFDMLRRQSLRPDNIKMFVLDEADEMLSRGFKDQIYDIFQLLPSKIQVGVFSATMPPEALEITRKFMNKPVRILVKRDELTLEGIKQFYVNIDKEDWKLDTLCDLYETLAITQSVIFVNTRRKVDWLTDKMRSRDHTVSATHGDMDQNTRDIIMREFRSGSSRVLITTDLLARGIDVQQVSLVINYDLPTQPENYLHRIGRSGRFGRKGVAINFVTRDDERMLFDIQRFYNVTVEELPANVADLL

SEQ ID NO: 31850 - protein, 391 aa, Zea mays subsp. mays
  peptide (1)..(391): Ceres Seq. ID no. 12637798
  misc_feature (31)..(234): Pfam Name: Pfam Description:  DEAD/DEAH box helicase
  misc_feature (1)..(391): NCBI GI NO: 2500522 NR Description: Eukaryotic initiation factor 4A (eIF-4A) (eIF4A)
  misc_feature (1)..(391): NCBI GI NO: 2341061 NR Description: translational initiation factor eIF-4A [Zea mays]
  misc_feature (1)..(391): NCBI GI NO: 2286151 NR Description: translation initiation factor [Zea mays]
  misc_feature (1)..(391): NCBI GI NO: 1170509 NR Description: EUKARYOTIC INITIATION FACTOR 4A (EIF-4A) (EIF4A)
  misc_feature (1)..(391): NCBI GI NO: 547712 NR Description: Eukaryotic initiation factor 4A (eIF-4A) (eIF4A)
  misc_feature (1)..(391): NCBI GI NO: 2500518 NR Description: Eukaryotic initiation factor 4A-11
  misc_feature (1)..(391): NCBI GI NO: 2119933 NR Description: translation initiation factor eIF-4A
  misc_feature (1)..(391): NCBI GI NO: 2119938 NR Description: translation initiation factor eIF-4A
  misc_feature (1)..(391): NCBI GI NO: 2500520 NR Description: Eukaryotic initiation factor 4A-14
  misc_feature (1)..(391): NCBI GI NO: 1170511 NR Description: Eukaryotic initiation factor 4A-10
MQEILTEDFFTSYDDVCESFDSMGLQENLLRGIYAYGFEKPSAIQQRGIVPFCKGLDVIQQAQSGTGKTATFCSGILQQLDYGLVECQALVLAPTRELAQQIEKVMRALGDYLGVKVHACVGGTSVREDQRILASGVHVVVGTPGRVFDMLRRQSLRPDNIKMFVLDEADEMLSRGFKDQIYDIFQLLPSKIQVGVFSATMPPEALEITRKFMNKPVRILVKRDELTLEGIKQFYVNIDKEDWKLDTLCDLYETLAITQSVIFVNTRRKVDWLTDKMRSRDHTVSATHGDMDQNTRDIIMREFRSGSSRVLITTDLLARGIDVQQVSLVINYDLPTQPENYLHRIGRSGRFGRKGVAINFVTRDDERMLFDIQRFYNVTVEELPANVADLL

SEQ ID NO: 31851 - DNA, 1051 bp, Zea mays subsp. mays
  misc_feature (1)..(1051): Ceres Seq. ID no. 12544505
caatagccattcaatcattcaagcgaagcagccaccactctctccactgtgactccgtgacctgcctgccctgctgcacaagcacagcacacacaccccgcacaccgcaccagctcagctcagctcaccaagacaatcaatcatggctcgtccgcgcagtgtcgctgccgctgcccccctcctcctgctgctcgccgccgccgcagcggggctcgtgtccgccgcgtcgccggcagccagcgacttcgtccgcaagtcgtgccgcacgacgcagtacccttcggtgtgcgagcagagcctggcgtcgtacggcgggtcgccgccgccacggagcccgcgggagctggcgcgcgccgcgctgtcggtgagcgcggaccgcgcgcgcgccgcgtcgacgtacgtgggccgcctgtgcggcgccagcaacggcaaaggcgcgaagaaggggtcgggatcggcgtcggcgtcggcaggtcccgtgcgcgactgcctggacaatctggcggacagcgtgggccacctccgcgacgcggcgcaggagatgggcggcgccgggatgggccgcgcggggacgccggcgttcaggtggcacctcagcaacgtgcagacctggtgcagcgccgcgctcaccgacgaggacacctgcctcgacggcctctcgtcccgcgccgtcgacgccggcacgcgcgccgccatccggggcaaggtcgtcgaggtcgcgcaggtcaccagcaacgcgctcgcgctcgtcaataaggtcgggcctgggtactaacacgggaaggggacccaagatccaggcccaggcccaggcccaggcccagcccagataccacacccgctactagtatagtactaggcgcctccacctccacggcgttgggtgtttctcgtccgttaatagctcggtttgctttgcttgtgtttgtgtaagatatacattagttaagggcaataagcttgtactattatgagtggcggccgaggagtacagtacgttctcctctgtccgatcatgccaccatattaatgtgggagatatcttttgtcc

SEQ ID NO: 31852 - protein, 210 aa, Zea mays subsp. mays
  peptide (1)..(210): Ceres Seq. ID no. 12544506
  misc_feature (12)..(208): NCBI GI NO: 32489696 NR Description: OSJNBb0004G23.9
  misc_feature (1)..(205): NCBI GI NO: 7406663 NR Description: putative ripening-related protein [Vitis vinifera]
  misc_feature (1)..(210): NCBI GI NO: 112717 NR Description: 21 KD PROTEIN PRECURSOR (1.2 PROTEIN)
  misc_feature (13)..(210): NCBI GI NO: 15241799 NR Description: ripening-related protein - like
  misc_feature (13)..(210): NCBI GI NO: 21618088 NR Description: ripening-related protein-like
  misc_feature (14)..(205): NCBI GI NO: 18407657 NR Description: expressed protein; protein id: At1g62770
  misc_feature (14)..(205): NCBI GI NO: 21618013 NR Description: putative ripening-related protein
  misc_feature (34)..(204): NCBI GI NO: 18394174 NR Description: expressed protein; protein id: At1g14890
  misc_feature (13)..(205): NCBI GI NO: 15234547 NR Description: putative protein; protein id: At4g12390
  misc_feature (24)..(205): NCBI GI NO: 7488727 NR Description: 21K protein precursor - alfalfa
MARPRSVAAAAPLLLLLAAAAAGLVSAASPAASDFVRKSCRTTQYPSVCEQSLASYGGSPPPRSPRELARAALSVSADRARAASTYVGRLCGASNGKGAKKGSGSASASAGPVRDCLDNLADSVGHLRDAAQEMGGAGMGRAGTPAFRWHLSNVQTWCSAALTDEDTCLDGLSSRAVDAGTRAAIRGKVVEVAQVTSNALALVNKVGPGY

SEQ ID NO: 31853 - protein, 121 aa, Zea mays subsp. mays
  peptide (1)..(121): Ceres Seq. ID no. 12544507
  misc_feature (75)..(121): NCBI GI NO: 5821145 NR Description: RNA binding protein [Homo sapiens]
  misc_feature (75)..(121): NCBI GI NO: 5821143 NR Description: RNA binding protein [Homo sapiens]
  misc_feature (75)..(121): NCBI GI NO: 6649242 NR Description: splicing coactivator subunit SRm300 [Homo sapiens]
  misc_feature (75)..(121): NCBI GI NO: 19923466 NR Description: splicing coactivator subunit SRm300
  misc_feature (26)..(121): NCBI GI NO: 5821151 NR Description: RNA binding protein [Homo sapiens]
  misc_feature (26)..(121): NCBI GI NO: 6634015 NR Description: KIAA0324 protein [Homo sapiens]
  misc_feature (26)..(121): NCBI GI NO: 7512967 NR Description: hypothetical protein KIAA0324 - human (fragment)
  misc_feature (26)..(121): NCBI GI NO: 6649242 NR Description: splicing coactivator subunit SRm300 [Homo sapiens]
  misc_feature (26)..(121): NCBI GI NO: 19923466 NR Description: splicing coactivator subunit SRm300
IAIQSFKRSSHHSLHCDSVTCLPCCTSTAHTPRTPHQLSSAHQDNQSWLVRAVSLPLPPSSCCSPPPQRGSCPPRRRQPATSSASRAARRSTLRCASRAWRRTAGRRRHGARGSWRAPRCR

SEQ ID NO: 31854 - DNA, 735 bp, Zea mays subsp. mays
  misc_feature (1)..(735): Ceres Seq. ID no. 12400721
aattccacccatcgccgccgaaatcccgttgcgtctctcgcgcgttaccaagctctcaagttttctcgcgccgacggcaatggatgaggtcaccgaggccgtgaacaacctcaacatctcgggcgtaggggccgcgggcgttgccggggcggaagggcacaagaagaatcgcatccaggtctccaacactaagaagcccctcttcttctatgtcaacctcgccaagaggtacatgcagctgcacaacgaagtagagctgtcggccctcggcatggccattgcgacggtggtgacagtagcagaaattctgaaaaataacgggcttgctgtcgcgaagagtatcatgacatctactgttgatatcaaggacgagactaggacccggcctatccagaaggccaagattgaaatattgcttggcaagacggagaagtttgatgagctgatggcagcggctgccgaggagagggaggctaatggggccgaggaacaaagctgagtacctgcaaggaaggaccttgttgtagcttatttactgttttctgctgctagatttgtcttcttcatagtttgtcgagtgggctagagacgattacttgtataatcaattaaaggtgcggcttatttagtgtgcttttacttgattcatttatgttggaatgatacaagttgtgttcaatatggtatactctagattcatcactatcttcaatttagaagatagtgcgttgctcc

SEQ ID NO: 31855 - protein, 165 aa, Zea mays subsp. mays
  peptide (1)..(165): Ceres Seq. ID no. 12400722
  misc_feature (26)..(165): NCBI GI NO: 34910240 NR Description: OSJNBa0089K24.4
  misc_feature (27)..(165): NCBI GI NO: 18397011 NR Description: expressed protein; protein id: At1g29250
  misc_feature (27)..(165): NCBI GI NO: 18403464 NR Description: expressed protein; protein id: At2g34160
  misc_feature (36)..(165): NCBI GI NO: 15229322 NR Description: unknown protein; protein id: At3g04620.1
  misc_feature (58)..(165): NCBI GI NO: 15029401 NR Description: unknown [Leishmania infantum]
  misc_feature (58)..(165): NCBI GI NO: 8745040 NR Description: conserved hypothetical protein L6293.01
IPPIAAEIPLRLSRVTKLSSFLAPTAMDEVTEAVNNLNISGVGAAGVAGAEGHKKNRIQVSNTKKPLFFYVNLAKRYMQLHNEVELSALGMAIATVVTVAEILKNNGLAVAKSIMTSTVDIKDETRTRPIQKAKIEILLGKTEKFDELMAAAAEEREANGAEEQS

SEQ ID NO: 31856 - protein, 139 aa, Zea mays subsp. mays
  peptide (1)..(139): Ceres Seq. ID no. 12400723
  misc_feature (1)..(139): NCBI GI NO: 34910240 NR Description: OSJNBa0089K24.4
  misc_feature (1)..(139): NCBI GI NO: 18397011 NR Description: expressed protein; protein id: At1g29250
  misc_feature (1)..(139): NCBI GI NO: 18403464 NR Description: expressed protein; protein id: At2g34160
  misc_feature (10)..(139): NCBI GI NO: 15229322 NR Description: unknown protein; protein id: At3g04620.1
  misc_feature (32)..(139): NCBI GI NO: 15029401 NR Description: unknown [Leishmania infantum]
  misc_feature (32)..(139): NCBI GI NO: 8745040 NR Description: conserved hypothetical protein L6293.01
MDEVTEAVNNLNISGVGAAGVAGAEGHKKNRIQVSNTKKPLFFYVNLAKRYMQLHNEVELSALGMAIATVVTVAEILKNNGLAVAKSIMTSTVDIKDETRTRPIQKAKIEILLGKTEKFDELMAAAAEEREANGAEEQS

SEQ ID NO: 31857 - protein, 88 aa, Zea mays subsp. mays
  peptide (1)..(88): Ceres Seq. ID no. 12400724
  misc_feature (1)..(88): NCBI GI NO: 34910240 NR Description: OSJNBa0089K24.4
  misc_feature (1)..(88): NCBI GI NO: 18397011 NR Description: expressed protein; protein id: At1g29250
  misc_feature (1)..(88): NCBI GI NO: 18403464 NR Description: expressed protein; protein id: At2g34160
  misc_feature (1)..(88): NCBI GI NO: 15229322 NR Description: unknown protein; protein id: At3g04620.1
  misc_feature (1)..(88): NCBI GI NO: 15029401 NR Description: unknown [Leishmania infantum]
  misc_feature (1)..(88): NCBI GI NO: 8745040 NR Description: conserved hypothetical protein L6293.01
MQLHNEVELSALGMAIATVVTVAEILKNNGLAVAKSIMTSTVDIKDETRTRPIQKAKIEILLGKTEKFDELMAAAAEEREANGAEEQS

SEQ ID NO: 31858 - DNA, 1037 bp, Zea mays subsp. mays
  misc_feature (1)..(1037): Ceres Seq. ID no. 12355548
attcgatccgttcccttgccctaagacccacccctgatttcatttccccaatcatggcggcggctctgtcggggacggcggtgtccacggctgcgcttctagccccaatccgagctccaaccagcgcgtttatccggcgctcccagctcacctgtcatcgcctccactcactaaaatgccgccgcgctgggcccatcgtccccgcggccgctgctgccgcggcgggcagcagctcgccgtcgtcagccgttttccacggcgagtgcttcgtggtgggcgacaatatcgacactgaccagatcatccccgccgagcacctcactctggtgccctccaagccggacgagtaccgcaagctcggttccttcgccttcgcggggctcccatccgcagcctacccgacgccgttcgtcgctccgggtgaggagtcctcccgctacgccatcattgtcggcggagccaacttcgggtgcggttcctctcgcgagcacgcgcccgtcgcgcttggggccgctggcgcacgcgccattgttgcggagggctacgcgcgcatcttttttcgcaactccgtggccactggagaggtgtaccctctggagctcacggacgttggtgcctggaaggagtgcaagacaggggatgtggtcaccgtggaccttgctaactccgtttttattaaccacacctctggcaaggagtacaagctgaaaccaattggtgatgctggccctgtaattgaggcgggagggatctttgcctacgcccggaagacaggaatgattgcgtcgaaagctgctgcatgagggaaagcttaggcagccgagcctctgcggagatgaagtaagctggagttaggaccaagagttgctgcacctacttgatgtcgacggtgtctcgaaataagttgcggcctaccggaattatgatgaatcaatcaatttggcctgtcacagatcgttttttttgttactagtacttgtacaattgtactcctgcctgctactgtccttatctgtttgaataactgctctgttgtc

SEQ ID NO: 31859 - protein, 266 aa, Zea mays subsp. mays
  peptide (1)..(266): Ceres Seq. ID no. 12355549
  misc_feature (18)..(265): NCBI GI NO: 14140144 NR Description: putative protein [Oryza sativa]
  misc_feature (18)..(265): NCBI GI NO: 15224221 NR Description: 3-isopropylmalate dehydratase, small subunit
  misc_feature (13)..(262): NCBI GI NO: 15231608 NR Description: 3-isopropylmalate dehydratase-like protein
  misc_feature (16)..(264): NCBI GI NO: 15224222 NR Description: 3-isopropylmalate dehydratase, small subunit
  misc_feature (86)..(263): NCBI GI NO: 23041579 NR Description: hypothetical protein
  misc_feature (83)..(265): NCBI GI NO: 21673448 NR Description: 3-isopropylmalate dehydratase
  misc_feature (86)..(256): NCBI GI NO: 15643321 NR Description: 3-isopropylmalate dehydratase, small subunit
  misc_feature (86)..(256): NCBI GI NO: 23051508 NR Description: hypothetical protein [Methanosarcina barkeri]
  misc_feature (82)..(256): NCBI GI NO: 15669463 NR Description: 3-isopropylmalate dehydratase (leuD)
  misc_feature (84)..(263): NCBI GI NO: 7994624 NR Description: 3-ISOPROPYLMALATE DEHYDRATASE SMALL SUBUNIT
SIRSLALRPTPDFISPIMAAALSGTAVSTAALLAPIRAPTSAFIRRSQLTCHRLHSLKCRRAGPIVPAAAAAAAGSSSPSSAVFHGECFVVGDNIDTDQIIPAEHLTLVPSKPDEYRKLGSFAFAGLPSAAYPTPFVAPGEESSRYAIIVGGANFGCGSSREHAPVALGAAGARAIVAEGYARIFFRNSVATGEVYPLELTDVGAWKECKTGDVVTVDLANSVFINHTSGKEYKLKPIGDAGPVIEAGGIFAYARKTGMIASKAAA

SEQ ID NO: 31860 - protein, 249 aa, Zea mays subsp. mays
  peptide (1)..(249): Ceres Seq. ID no. 12355550
  misc_feature (1)..(248): NCBI GI NO: 14140144 NR Description: putative protein [Oryza sativa]
  misc_feature (1)..(248): NCBI GI NO: 15224221 NR Description: 3-isopropylmalate dehydratase, small subunit
  misc_feature (1)..(245): NCBI GI NO: 15231608 NR Description: 3-isopropylmalate dehydratase-like protein
  misc_feature (1)..(247): NCBI GI NO: 15224222 NR Description: 3-isopropylmalate dehydratase, small subunit
  misc_feature (69)..(246): NCBI GI NO: 23041579 NR Description: hypothetical protein
  misc_feature (66)..(248): NCBI GI NO: 21673448 NR Description: 3-isopropylmalate dehydratase
  misc_feature (69)..(239): NCBI GI NO: 15643321 NR Description: 3-isopropylmalate dehydratase, small subunit
  misc_feature (69)..(239): NCBI GI NO: 23051508 NR Description: hypothetical protein [Methanosarcina barkeri]
  misc_feature (65)..(239): NCBI GI NO: 15669463 NR Description: 3-isopropylmalate dehydratase (leuD)
  misc_feature (67)..(246): NCBI GI NO: 7994624 NR Description: 3-ISOPROPYLMALATE DEHYDRATASE SMALL SUBUNIT
MAAALSGTAVSTAALLAPIRAPTSAFIRRSQLTCHRLHSLKCRRAGPIVPAAAAAAAGSSSPSSAVFHGECFVVGDNIDTDQIIPAEHLTLVPSKPDEYRKLGSFAFAGLPSAAYPTPFVAPGEESSRYAIIVGGANFGCGSSREHAPVALGAAGARAIVAEGYARIFFRNSVATGEVYPLELTDVGAWKECKTGDVVTVDLANSVFINHTSGKEYKLKPIGDAGPVIEAGGIFAYARKTGMIASKAAA

SEQ ID NO: 31861 - DNA, 2064 bp, Zea mays subsp. mays; identical to SEQ ID NO: 31202
  misc_feature (1)..(2064): Ceres Seq. ID no. 13622175

SEQ ID NO: 31862 - protein, 562 aa, Zea mays subsp. mays; identical to SEQ ID NO: 31203
  peptide (1)..(562): Ceres Seq. ID no. 13622176
  misc_feature (133)..(408): Pfam Name: Pfam Description:  Nucleotidyl transferase
  misc_feature (53)..(562): NCBI GI NO: 13892040 NR Description: ADP-glucose pyrophosphorylase small subunit
  misc_feature (56)..(562): NCBI GI NO: 13508485 NR Description: ADP-glucose pyrophosphorylase small subunit
  misc_feature (53)..(562): NCBI GI NO: 27464770 NR Description: ADP-glucose pyrophosphorylase small subunit
  misc_feature (56)..(562): NCBI GI NO: 14582768 NR Description: ADP-glucose pyrophosphorylase small subunit
  misc_feature (53)..(562): NCBI GI NO: 38423972 NR Description: putative glucose-1-phosphate adenylyltransferase
  misc_feature (56)..(562): NCBI GI NO: 1707940 NR Description: Glucose-1-phosphate adenylyltransferase small subunit
  misc_feature (104)..(562): NCBI GI NO: 21666502 NR Description: ADP-glucose pyrophosphorylase small subunit
  misc_feature (96)..(562): NCBI GI NO: 15238933 NR Description: glucose-1-phosphate adenylyltransferase
  misc_feature (51)..(562): NCBI GI NO: 1237080 NR Description: ADP-glucose pyrophosphorylase [Pisum sativum]
  misc_feature (104)..(562): NCBI GI NO: 17865468 NR Description: Glucose-1-phosphate adenylyltransferase small subunit

SEQ ID NO: 31863 - protein, 510 aa, Zea mays subsp. mays; identical to SEQ ID NO: 31204
  peptide (1)..(510): Ceres Seq. ID no. 13622177
  misc_feature (81)..(356): Pfam Name: Pfam Description:  Nucleotidyl transferase
  misc_feature (1)..(510): NCBI GI NO: 13892040 NR Description: ADP-glucose pyrophosphorylase small subunit
  misc_feature (4)..(510): NCBI GI NO: 13508485 NR Description: ADP-glucose pyrophosphorylase small subunit
  misc_feature (1)..(510): NCBI GI NO: 27464770 NR Description: ADP-glucose pyrophosphorylase small subunit
  misc_feature (4)..(510): NCBI GI NO: 14582768 NR Description: ADP-glucose pyrophosphorylase small subunit
  misc_feature (1)..(510): NCBI GI NO: 38423972 NR Description: putative glucose-1-phosphate adenylyltransferase
  misc_feature (4)..(510): NCBI GI NO: 1707940 NR Description: Glucose-1-phosphate adenylyltransferase small subunit
  misc_feature (52)..(510): NCBI GI NO: 21666502 NR Description: ADP-glucose pyrophosphorylase small subunit
  misc_feature (44)..(510): NCBI GI NO: 15238933 NR Description: glucose-1-phosphate adenylyltransferase
  misc_feature (1)..(510): NCBI GI NO: 1237080 NR Description: ADP-glucose pyrophosphorylase [Pisum sativum]
  misc_feature (52)..(510): NCBI GI NO: 17865468 NR Description: Glucose-1-phosphate adenylyltransferase small subunit

SEQ ID NO: 31864 - protein, 506 aa, Zea mays subsp. mays; identical to SEQ ID NO: 31205
  peptide (1)..(506): Ceres Seq. ID no. 13622178
  misc_feature (77)..(352): Pfam Name: Pfam Description:  Nucleotidyl transferase
  misc_feature (1)..(506): NCBI GI NO: 13892040 NR Description: ADP-glucose pyrophosphorylase small subunit
  misc_feature (1)..(506): NCBI GI NO: 13508485 NR Description: ADP-glucose pyrophosphorylase small subunit
  misc_feature (1)..(506): NCBI GI NO: 27464770 NR Description: ADP-glucose pyrophosphorylase small subunit
  misc_feature (1)..(506): NCBI GI NO: 14582768 NR Description: ADP-glucose pyrophosphorylase small subunit
  misc_feature (1)..(506): NCBI GI NO: 38423972 NR Description: putative glucose-1-phosphate adenylyltransferase
  misc_feature (1)..(506): NCBI GI NO: 1707940 NR Description: Glucose-1-phosphate adenylyltransferase small subunit
  misc_feature (48)..(506): NCBI GI NO: 21666502 NR Description: ADP-glucose pyrophosphorylase small subunit
  misc_feature (40)..(506): NCBI GI NO: 15238933 NR Description: glucose-1-phosphate adenylyltransferase
  misc_feature (1)..(506): NCBI GI NO: 1237080 NR Description: ADP-glucose pyrophosphorylase [Pisum sativum]
  misc_feature (48)..(506): NCBI GI NO: 17865468 NR Description: Glucose-1-phosphate adenylyltransferase small subunit

SEQ ID NO: 31865 - DNA, 1173 bp, Zea mays subsp. mays
  misc_feature (1)..(1173): Ceres Seq. ID no. 12355551
acactacaccgtaaccgtcgccggaatcgatcgacccaaagctccccttagagcccgagctctatccaacccacgaacgggatcccgatgcccatggcggcctcggttcttgtcgccgcaccggcggtctcgcccccgctgacgtggcggagatgggctcctcttctcgccgcgtcacatccacgggcgaacccgcctcccgcactgcgcctgcgggcgcccgctcctcctctccgggcctcctccgttccccgcgattcctgcgccggagccgccgtccggaggacgccgtgtgcggcggcggcggcattaggtggaggtgtgaaggcggagtccacggagcgggaggcgcccgatcgggatgctctgaagcgggtggcgctgctcgcgcttggctgctgcgctgcagccgccgcgctcggctgcggcgcggcgcgggcagcggcggaggactccatcaaggcgtcaggattcgggctacgggtggcggagtcgctgcggaggctcggatggcccgacgacaccgtcgtgttcgcgctcgcgacgctgccggtgatcgagctgcggggggcgatccccgttgggtattggctgcggctccatccagtccgcctcaccatcctatccgttcttgggaacatggtgcctgtaccattcatcatcctctacctgaagaaactcgcaacatttttgtctcagaaaagttcgtccgcgactcgaattatggacctcctctttgagcgggcacggcgcaaggctgctcctgttgaggaattccagtggctcggcttgatgctgtttgttgctgttccattcccaggcacgggagcgtggacaggggccttcattgcatctgtactaggcatgccgttctggtcaggttttacagcaaatttcgtgggagtcgtccttgcagggctgctggtgaacttgctcatgaatcttggcctaaaatacgccattgtcactggagtagttttgttctttgtttcaaccgtcatgtggagtgttcttcgttcccttaagaagtccgttaatgtcaagtgatctagtagtctttatcaaactgttcctaatcccttcagagttcagccttgcgtaggaagcttagttgtgtaattttaagtggagctttcagcttccaggtggatctacaagagagaataacactcc

SEQ ID NO: 31866 - protein, 319 aa, Zea mays subsp. mays
  peptide (1)..(319): Ceres Seq. ID no. 12355552
  misc_feature (4)..(319): NCBI GI NO: 34897152 NR Description: unknown protein
  misc_feature (114)..(316): NCBI GI NO: 15227004 NR Description: putative transport protein; protein id:At2g02590
  misc_feature (154)..(288): NCBI GI NO: 11499286 NR Description: small multidrug export protein (qacE)
  misc_feature (143)..(295): NCBI GI NO: 21227925 NR Description: putative small multi-drug export protein
  misc_feature (148)..(280): NCBI GI NO: 28212098 NR Description: putative small multi-drug export protein
  misc_feature (154)..(282): NCBI GI NO: 15613797 NR Description: small multidrug export related protein
  misc_feature (143)..(295): NCBI GI NO: 23052254 NR Description: hypothetical protein [Methanosarcina barkeri]
  misc_feature (147)..(287): NCBI GI NO: 22537969 NR Description: conserved hypothetical protein
  misc_feature (148)..(288): NCBI GI NO: 18978147 NR Description: putative small multidrug export protein; (qacE)
  misc_feature (148)..(279): NCBI GI NO: 14591427 NR Description: hypothetical protein [Pyrococcus horikoshii]
MPMAASVLVAAPAVSPPLTWRRWAPLLAASHPRANPPPALRLRAPAPPLRASSVPRDSCAGAAVRRTPCAAAAALGGGVKAESTEREAPDRDALKRVALLALGCCAAAAALGCGAARAAAEDSIKASGFGLRVAESLRRLGWPDDTVVFALATLPVIELRGAIPVGYWLRLHPVRLTILSVLGNMVPVPFIILYLKKLATFLSQKSSSATRIMDLLFERARRKAAPVEEFQWLGLMLFVAVPFPGTGAWTGAFIASVLGMPFWSGFTANFVGVVLAGLLVNLLMNLGLKYAIVTGVVLFFVSTVMWSVLRSLKKSVNVK

SEQ ID NO: 31867 - protein, 317 aa, Zea mays subsp. mays
  peptide (1)..(317): Ceres Seq. ID no. 12355553
  misc_feature (2)..(317): NCBI GI NO: 34897152 NR Description: unknown protein
  misc_feature (112)..(314): NCBI GI NO: 15227004 NR Description: putative transport protein; protein id:At2g02590
  misc_feature (152)..(286): NCBI GI NO: 11499286 NR Description: small multidrug export protein (qacE)
  misc_feature (141)..(293): NCBI GI NO: 21227925 NR Description: putative small multi-drug export protein
  misc_feature (146)..(278): NCBI GI NO: 28212098 NR Description: putative small multi-drug export protein
  misc_feature (152)..(280): NCBI GI NO: 15613797 NR Description: small multidrug export related protein
  misc_feature (141)..(293): NCBI GI NO: 23052254 NR Description: hypothetical protein [Methanosarcina barkeri]
  misc_feature (145)..(285): NCBI GI NO: 22537969 NR Description: conserved hypothetical protein
  misc_feature (146)..(286): NCBI GI NO: 18978147 NR Description: putative small multidrug export protein; (qacE)
  misc_feature (146)..(277): NCBI GI NO: 14591427 NR Description: hypothetical protein [Pyrococcus horikoshii]
MAASVLVAAPAVSPPLTWRRWAPLLAASHPRANPPPALRLRAPAPPLRASSVPRDSCAGAAVRRTPCAAAAALGGGVKAESTEREAPDRDALKRVALLALGCCAAAAALGCGAARAAAEDSIKASGFGLRVAESLRRLGWPDDTVVFALATLPVIELRGAIPVGYWLRLHPVRLTILSVLGNMVPVPFIILYLKKLATFLSQKSSSATRIMDLLFERARRKAAPVEEFQWLGLMLFVAVPFPGTGAWTGAFIASVLGMPFWSGFTANFVGVVLAGLLVNLLMNLGLKYAIVTGVVLFFVSTVMWSVLRSLKKSVNVK

SEQ ID NO: 31868 - protein, 195 aa, Zea mays subsp. mays
  peptide (1)..(195): Ceres Seq. ID no. 12355554
MGSSSRRVTSTGEPASRTAPAGARSSSPGLLRSPRFLRRSRRPEDAVCGGGGIRWRCEGGVHGAGGARSGCSEAGGAARAWLLRCSRRARLRRGAGSGGGLHQGVRIRATGGGVAAEARMARRHRRVRARDAAGDRAAGGDPRWVLAAAPSSPPHHPIRSWEHGACTIHHPLPEETRNIFVSEKFVRDSNYGPPL

SEQ ID NO: 31869 - DNA, 789 bp, Zea mays subsp. mays; identical to SEQ ID NO: 23396
  misc_feature (1)..(789): Ceres Seq. ID no. 12355957

SEQ ID NO: 31870 - protein, 161 aa, Zea mays subsp. mays; identical to SEQ ID NO: 23397
  peptide (1)..(161): Ceres Seq. ID no. 12355958
  misc_feature (3)..(73): Pfam Name: Pfam Description:  Ribosomal protein L24e
  misc_feature (1)..(161): NCBI GI NO: 1710521 NR Description: 60S RIBOSOMAL PROTEIN L24
  misc_feature (4)..(161): NCBI GI NO: 34900364 NR Description: putative 60S ribosomal protein L24
  misc_feature (1)..(160): NCBI GI NO: 6094040 NR Description: 60S ribosomal protein L24
  misc_feature (1)..(156): NCBI GI NO: 10180025 NR Description: 60S ribosomal protein L24 [Prunus avium]
  misc_feature (1)..(161): NCBI GI NO: 18404176 NR Description: 60S ribosomal protein L24; protein id: At2g36620
  misc_feature (1)..(161): NCBI GI NO: 15231730 NR Description: 60S ribosomal protein - like; protein id:At3g53020
  misc_feature (5)..(161): NCBI GI NO: 25295112 NR Description: 60S ribosomal protein L24
  misc_feature (3)..(150): NCBI GI NO: 19075214 NR Description: 60s ribosomal protein L24
  misc_feature (3)..(150): NCBI GI NO: 19115030 NR Description: 60S ribosomal protein L24
  misc_feature (10)..(154): NCBI GI NO: 40741063 NR Description: conserved hypothetical protein

SEQ ID NO: 31871 - protein, 106 aa, Zea mays subsp. mays; identical to SEQ ID NO: 23398
  peptide (1)..(106): Ceres Seq. ID no. 12355959
  misc_feature (1)..(106): NCBI GI NO: 1710521 NR Description: 60S RIBOSOMAL PROTEIN L24
  misc_feature (1)..(106): NCBI GI NO: 34900364 NR Description: putative 60S ribosomal protein L24
  misc_feature (1)..(105): NCBI GI NO: 6094040 NR Description: 60S ribosomal protein L24
  misc_feature (1)..(101): NCBI GI NO: 10180025 NR Description: 60S ribosomal protein L24 [Prunus avium]
  misc_feature (1)..(106): NCBI GI NO: 18404176 NR Description: 60S ribosomal protein L24; protein id: At2g36620
  misc_feature (1)..(106): NCBI GI NO: 15231730 NR Description: 60S ribosomal protein - like; protein id:At3g53020
  misc_feature (1)..(106): NCBI GI NO: 25295112 NR Description: 60S ribosomal protein L24
  misc_feature (1)..(95): NCBI GI NO: 19075214 NR Description: 60s ribosomal protein L24
  misc_feature (1)..(95): NCBI GI NO: 19115030 NR Description: 60S ribosomal protein L24
  misc_feature (1)..(99): NCBI GI NO: 40741063 NR Description: conserved hypothetical protein

SEQ ID NO: 31872 - DNA, 695 bp, Zea mays subsp. mays
  misc_feature (1)..(695): Ceres Seq. ID no. 12342067
aaaaacctcccacgcacattcttggcagctactctactcaatggcgctgtcctcctccggccacccggcgacgacccgcctgctcttctcgcttctgctcgtgggctcggcggcgggcttgccggagcgggcggccatcgacagggtcaaccggcgaggcccttccctcggcctcgtcatgtcctacgtcgacgaggccaccgcgctgcaggcctccggctacttccagccttggcgtgccctccctttcgttgacctctacggacggcggtatcacatcggcagcattcggggcgtgaacgtgatatacgcactgacagggcaacgcaggctgaacgccgccgtcacagtacagacgctcatcgacgtcttcagcgtgtccggcattgttcactacggcacggcagggagctgcaacgactccatctccttcggcgacgtcagtgtccccaggctcgtcgcctacacgggtgcctggacatggaagaagttcagatcaccgagagagtcatcggcggaattgagcttcggcgaatacaacgtcccagacggaggaggaggggagaatctgctcggatccctcaagtacagaaacgaggagctttactcggccggcaagcccatggaagaggtcttctggctgcctgtgcattcggcatggttcagaactgcagaacagctcacggtggaacttg

SEQ ID NO: 31873 - protein, 231 aa, Zea mays subsp. mays
  peptide (1)..(231): Ceres Seq. ID no. 12342068
  misc_feature (56)..(227): Pfam Name: Pfam Description:  Phosphorylase family
  misc_feature (111)..(230): NCBI GI NO: 34897886 NR Description: ESTs AU032452
  misc_feature (56)..(230): NCBI GI NO: 481815 NR Description: vegetative storage protein win4
  misc_feature (27)..(226): NCBI GI NO: 99650 NR Description: major storage protein - Carolina poplar
  misc_feature (56)..(226): NCBI GI NO: 4775662 NR Description: major storage protein [Populus x canadensis]
  misc_feature (40)..(229): NCBI GI NO: 7487318 NR Description: hypothetical protein T22A6
  misc_feature (27)..(226): NCBI GI NO: 421813 NR Description: storage protein, bark - cottonwood
  misc_feature (40)..(227): NCBI GI NO: 21593613 NR Description: unknown [Arabidopsis thaliana]
  misc_feature (40)..(227): NCBI GI NO: 30686500 NR Description: expressed protein [Arabidopsis thaliana]
  misc_feature (56)..(226): NCBI GI NO: 728986 NR Description: BARK STORAGE PROTEIN A PRECURSOR
  misc_feature (56)..(226): NCBI GI NO: 728987 NR Description: BARK STORAGE PROTEIN B PRECURSOR
KTSHAHSWQLLYSMALSSSGHPATTRLLFSLLLVGSAAGLPERAAIDRVNRRGPSLGLVMSYVDEATALQASGYFQPWRALPFVDLYGRRYHIGSIRGVNVIYALTGQRRLNAAVTVQTLIDVFSVSGIVHYGTAGSCNDSISFGDVSVPRLVAYTGAWTWKKFRSPRESSAELSFGEYNVPDGGGGENLLGSLKYRNEELYSAGKPMEEVFWLPVHSAWFRTAEQLTVEL

SEQ ID NO: 31874 - protein, 218 aa, Zea mays subsp. mays
  peptide (1)..(218): Ceres Seq. ID no. 12342069
  misc_feature (43)..(214): Pfam Name: Pfam Description:  Phosphorylase family
  misc_feature (98)..(217): NCBI GI NO: 34897886 NR Description: ESTs AU032452
  misc_feature (43)..(217): NCBI GI NO: 481815 NR Description: vegetative storage protein win4
  misc_feature (14)..(213): NCBI GI NO: 99650 NR Description: major storage protein - Carolina poplar
  misc_feature (43)..(213): NCBI GI NO: 4775662 NR Description: major storage protein [Populus x canadensis]
  misc_feature (27)..(216): NCBI GI NO: 7487318 NR Description: hypothetical protein T22A6
  misc_feature (14)..(213): NCBI GI NO: 421813 NR Description: storage protein, bark - cottonwood
  misc_feature (27)..(214): NCBI GI NO: 21593613 NR Description: unknown [Arabidopsis thaliana]
  misc_feature (27)..(214): NCBI GI NO: 30686500 NR Description: expressed protein [Arabidopsis thaliana]
  misc_feature (43)..(213): NCBI GI NO: 728986 NR Description: BARK STORAGE PROTEIN A PRECURSOR
  misc_feature (43)..(213): NCBI GI NO: 728987 NR Description: BARK STORAGE PROTEIN B PRECURSOR
MALSSSGHPATTRLLFSLLLVGSAAGLPERAAIDRVNRRGPSLGLVMSYVDEATALQASGYFQPWRALPFVDLYGRRYHIGSIRGVNVIYALTGQRRLNAAVTVQTLIDVFSVSGIVHYGTAGSCNDSISFGDVSVPRLVAYTGAWTWKKFRSPRESSAELSFGEYNVPDGGGGENLLGSLKYRNEELYSAGKPMEEVFWLPVHSAWFRTAEQLTVEL

SEQ ID NO: 31875 - protein, 172 aa, Zea mays subsp. mays
  peptide (1)..(172): Ceres Seq. ID no. 12342070
  misc_feature (1)..(168): Pfam Name: Pfam Description:  Phosphorylase family
  misc_feature (52)..(171): NCBI GI NO: 34897886 NR Description: ESTs AU032452
  misc_feature (1)..(171): NCBI GI NO: 481815 NR Description: vegetative storage protein win4
  misc_feature (1)..(167): NCBI GI NO: 99650 NR Description: major storage protein - Carolina poplar
  misc_feature (1)..(167): NCBI GI NO: 4775662 NR Description: major storage protein [Populus x canadensis]
  misc_feature (1)..(170): NCBI GI NO: 7487318 NR Description: hypothetical protein T22A6
  misc_feature (1)..(167): NCBI GI NO: 421813 NR Description: storage protein, bark - cottonwood
  misc_feature (1)..(168): NCBI GI NO: 21593613 NR Description: unknown [Arabidopsis thaliana]
  misc_feature (1)..(168): NCBI GI NO: 30686500 NR Description: expressed protein [Arabidopsis thaliana]
  misc_feature (1)..(167): NCBI GI NO: 728986 NR Description: BARK STORAGE PROTEIN A PRECURSOR
  misc_feature (1)..(167): NCBI GI NO: 728987 NR Description: BARK STORAGE PROTEIN B PRECURSOR
MSYVDEATALQASGYFQPWRALPFVDLYGRRYHIGSIRGVNVIYALTGQRRLNAAVTVQTLIDVFSVSGIVHYGTAGSCNDSISFGDVSVPRLVAYTGAWTWKKFRSPRESSAELSFGEYNVPDGGGGENLLGSLKYRNEELYSAGKPMEEVFWLPVHSAWFRTAEQLTVEL

SEQ ID NO: 31876 - DNA, 916 bp, Zea mays subsp. mays
  misc_feature (1)..(916): Ceres Seq. ID no. 12372196
acctctctgccttcttctcggaggtcggagaagagctctctgcttcattcggccggtccaactccaccgaccgatccaatccaacccactgaccatggggttcccgccggtgtgctgctgcgcccccatccccaagccggtcgtcgccttctgcaacctgctcggcgccatcaaggacgccgtcctgctgacgctcgccgccgtgggcttcccgcacgacgccgcgcgcggctcggcggacgcccaccagcccgaggaggtgaagacccggctccccgccgtggagtacgcccagctcctggccgagcagcagccgtcgcccgccacccacgcggcctgcatcgtttgcctggacacgctggaggcggcggacgaggtgcggcggctgggcaactgcgcgcacgccttccaccgggcctgcatcgaccgttggatcgacctaggccggacgacgtgcccgctgtgccgctccgacctcctgccaagcccctggggccgggccgggctgctcgggctgggccggctcgccagccgtctcacgcgcgttcgcgtttggtgaggaccgtctcggaggccacttttaccttttcggtggccaggccgcggtcgcagcccatcccggtggtgccggaacggcgcggacacgttagcgacggcgaccgggccgccggatggtcttaaatctgctctgccacttgccaaccgctaatcaaccagcgggcttaattagcagcggattggcttggtgtctgacagtcgatattatgacagctaaataagcagttaaatgtttctataggattgagtatacacggcagctaaatgtttcgtatagtagtgctcctaacagccatcttcattgtacatgaatgtcctctatccgatcctttcatatagtataacagttaaattattc

SEQ ID NO: 31877 - protein, 226 aa, Zea mays subsp. mays
  peptide (1)..(226): Ceres Seq. ID no. 12372197
TSLPSSRRSEKSSLLHSAGPTPPTDPIQPTDHGVPAGVLLRPHPQAGRRLLQPARRHQGRRPADARRRGLPARRRARLGGRPPARGGEDPAPRRGVRPAPGRAAAVARHPRGLHRLPGHAGGGGRGAAAGQLRARLPPGLHRPLDRPRPDDVPAVPLRPPAKPLGPGRAARAGPARQPSHARSRLVRTVSEATFTFSVARPRSQPIPVVPERRGHVSDGDRAAGWS

SEQ ID NO: 31878 - protein, 185 aa, Zea mays subsp. mays
  peptide (1)..(185): Ceres Seq. ID no. 12372198
  misc_feature (113)..(155): Pfam Name: RING finger Pfam Description: Zinc finger, C3HC4 type
  misc_feature (80)..(174): NCBI GI NO: 38345870 NR Description: OSJNBa0064M23.12
  misc_feature (32)..(162): NCBI GI NO: 34897812 NR Description: P0514G12.26
  misc_feature (85)..(169): NCBI GI NO: 32488512 NR Description: OSJNBa0011J08.19
  misc_feature (32)..(161): NCBI GI NO: 15222553 NR Description: putative RING zinc finger protein
  misc_feature (78)..(162): NCBI GI NO: 15229284 NR Description: putative protein; protein id: At3g43430
  misc_feature (87)..(161): NCBI GI NO: 15233117 NR Description: RING finger protein; protein id: At3g61460
  misc_feature (91)..(161): NCBI GI NO: 18411282 NR Description: similar to RING finger protein
  misc_feature (66)..(163): NCBI GI NO: 34903102 NR Description: unnamed protein product
  misc_feature (91)..(160): NCBI GI NO: 21554155 NR Description: RING zinc finger protein-like
  misc_feature (32)..(161): NCBI GI NO: 15233350 NR Description: RING-H2 finger protein RHA1b; protein id:At4g11360
PLCLLLGGRRRALCFIRPVQLHRPIQSNPLTMGFPPVCCCAPIPKPVVAFCNLLGAIKDAVLLTLAAVGFPHDAARGSADAHQPEEVKTRLPAVEYAQLLAEQQPSPATHAACIVCLDTLEAADEVRRLGNCAHAFHRACIDRWIDLGRTTCPLCRSDLLPSPWGRAGLLGLGRLASRLTRVRVW

SEQ ID NO: 31879 - protein, 154 aa, Zea mays subsp. mays
  peptide (1)..(154): Ceres Seq. ID no. 12372199
  misc_feature (82)..(124): Pfam Name: RING finger Pfam Description: Zinc finger, C3HC4 type
  misc_feature (49)..(143): NCBI GI NO: 38345870 NR Description: OSJNBa0064M23.12
  misc_feature (1)..(131): NCBI GI NO: 34897812 NR Description: P0514G12.26
  misc_feature (54)..(138): NCBI GI NO: 32488512 NR Description: OSJNBa0011J08.19
  misc_feature (1)..(130): NCBI GI NO: 15222553 NR Description: putative RING zinc finger protein
  misc_feature (47)..(131): NCBI GI NO: 15229284 NR Description: putative protein; protein id: At3g43430
  misc_feature (56)..(130): NCBI GI NO: 15233117 NR Description: RING finger protein; protein id: At3g61460
  misc_feature (60)..(130): NCBI GI NO: 18411282 NR Description: similar to RING finger protein
  misc_feature (35)..(132): NCBI GI NO: 34903102 NR Description: unnamed protein product
  misc_feature (60)..(129): NCBI GI NO: 21554155 NR Description: RING zinc finger protein-like
  misc_feature (1)..(130): NCBI GI NO: 15233350 NR Description: RING-H2 finger protein RHA1b; protein id:At4g11360
MGFPPVCCCAPIPKPVVAFCNLLGAIKDAVLLTLAAVGFPHDAARGSADAHQPEEVKTRLPAVEYAQLLAEQQPSPATHAACIVCLDTLEAADEVRRLGNCAHAFHRACIDRWIDLGRTTCPLCRSDLLPSPWGRAGLLGLGRLASRLTRVRVW

SEQ ID NO: 31880 - DNA, 671 bp, Zea mays subsp. mays
  misc_feature (1)..(671): Ceres Seq. ID no. 13564010
agcttagtgatccttgtgatcaaattttgattgtggcaaacacacatatttattgggacccacaatggatcgatgtaaagttggctcaggcaaaatatcttctttcgagagtatctcagtttgagcaactcatctcaaataaatataattgtaaaccttcagtgatcattgctggtgacttcaattcgacacctggtgacaaggtatacaattaccttttatctgccaacctaggatctacggacgaagctccaatcaagttacgcagcctttatgctgcgaatggaggggagccagagtacacaaactacactcctggttttaccggaacactggactacatattcttgtcggatggtagttcgataaaacctactagcctacttcgtttgccgcgaggggattctgaggatgtgaaaggaggcttgcccaactttcgacatcctagcgatcatctcccaattggtgctgattttctggtagtcaacatctagtgcaggtgttgattgctttttcaacagaaatagtaaatgccgttgaataatttgtgttgttggctcaagtttcagagtttaaatgtaatatctcaaggaacaagcgtttcttttcttgtagagcaattaacaatgcgaattttattcatcaattttaatataataggagtattgtcc

SEQ ID NO: 31881 - protein, 163 aa, Zea mays subsp. mays
  peptide (1)..(163): Ceres Seq. ID no. 13564011
  misc_feature (1)..(158): Pfam Name: Pfam Description:  Endonuclease/Exonuclease/phosphatase family
  misc_feature (1)..(158): NCBI GI NO: 15222367 NR Description: endonuclease/exonuclease/phosphatase family
  misc_feature (1)..(158): NCBI GI NO: 28973671 NR Description: unknown protein [Arabidopsis thaliana]
  misc_feature (4)..(158): NCBI GI NO: 12322536 NR Description: hypothetical protein [Arabidopsis thaliana]
  misc_feature (4)..(158): NCBI GI NO: 15222370 NR Description: endonuclease/exonuclease/phosphatase family
  misc_feature (9)..(157): NCBI GI NO: 26342330 NR Description: unnamed protein product [Mus musculus]
  misc_feature (9)..(157): NCBI GI NO: 21732296 NR Description: hypothetical protein [Homo sapiens]
  misc_feature (9)..(157): NCBI GI NO: 40538842 NR Description: RIKEN cDNA E430028B21 gene [Mus musculus]
  misc_feature (1)..(162): NCBI GI NO: 19074877 NR Description: similarity to CARBON CATABOLITE REPRESSOR PROTEIN 4
  misc_feature (9)..(157): NCBI GI NO: 26353952 NR Description: unnamed protein product [Mus musculus]
  misc_feature (9)..(157): NCBI GI NO: 34877112 NR Description: similar to CG31759-PA [Rattus norvegicus]
LSDPCDQILIVANTHIYWDPQWIDVKLAQAKYLLSRVSQFEQLISNKYNCKPSVIIAGDFNSTPGDKVYNYLLSANLGSTDEAPIKLRSLYAANGGEPEYTNYTPGFTGTLDYIFLSDGSSIKPTSLLRLPRGDSEDVKGGLPNFRHPSDHLPIGADFLVVNI

SEQ ID NO: 31882 - DNA, 901 bp, Zea mays subsp. mays
  misc_feature (1)..(901): Ceres Seq. ID no. 12376262
aaaaccccagccaccaggtaccaatggcggccaccgcgatggaccatgacggcggcgacgacgtggtcacaccaggggagcttctcggaaactcattaaccctcgcggccggacgtggcgcctacgccgacggtcgctctgtgcgcgcgtcggtcaccgggcgccgccgcatcgtgccgcccgcacctggctccgacgaccagagatccacggtggaggtggtggggcacaaggcccatggagctgtgccacagccgggaagcgttgtcatcgcccgagtaacaaaggttatggctagaatggcctctgcagacatcatgtgtgttgactcaaaggctatcagagaaaagttcactggcatgataaggcagcaagatgttcgtgcaactgaaattgacaaggtggatatgtaccaatcatatcgtcctggggacattgttaaagctatggttctttctcttggtgatgcaagggcatattacctttccactgcgaaaaatgaacttggagtcgtttcagcacaaagcatagctggtggtacattggttccaatcagttggactgagatgcaatgtgatttgaccggtcaaattgagcaaaggaaagttgcaaaggtggaatagatgtgctggccctcctgataaatgttggtggcggtatacaaattgtggaccagtgataccaggtccttgggcggactgcccaattctgcgacgtccaacttcattacagctgcattgagcatgggtttttaaaaccctggctgaattaactagacatgaatcgtagccatgggtcctgtaacccaaccttgggatctgaatcatagccatgggttctgtaacccagtaaccttgcccttgtgatttgttactctgagctaatgacattgcagttttcc

SEQ ID NO: 31883 - protein, 206 aa, Zea mays subsp. mays
  peptide (1)..(206): Ceres Seq. ID no. 12376263
  misc_feature (21)..(205): NCBI GI NO: 18421805 NR Description: putative protein; protein id: At5g38890.1
  misc_feature (21)..(153): NCBI GI NO: 9758066 NR Description: gene_id:K15E6
  misc_feature (24)..(206): NCBI GI NO: 7705612 NR Description: exosomal core protein CSL4
  misc_feature (24)..(206): NCBI GI NO: 22267446 NR Description: RIKEN cDNA 2610104C07 [Mus musculus]
  misc_feature (49)..(204): NCBI GI NO: 38104559 NR Description: hypothetical protein MG08628.4
  misc_feature (110)..(204): NCBI GI NO: 6324097 NR Description: Represses the replication of double-strand ed RNAviruses
  misc_feature (52)..(111): NCBI GI NO: 6324097 NR Description: Represses the replication of double-strand ed RNAviruses
  misc_feature (20)..(204): NCBI GI NO: 7491999 NR Description: hypothetical protein SPCC965
  misc_feature (20)..(204): NCBI GI NO: 19076010 NR Description: hypothetical protein [Schizosaccharomyces pombe]
  misc_feature (21)..(205): NCBI GI NO: 24583644 NR Description: CG6249-PA [Drosophila melanogaster]
NPSHQVPMAATAMDHDGGDDVVTPGELLGNSLTLAAGRGAYADGRSVRASVTGRRRIVPPAPGSDDQRSTVEVVGHKAHGAVPQPGSVVIARVTKVMARMASADIMCVDSKAIREKFTGMIRQQDVRATEIDKVDMYQSYRPGDIVKAMVLSLGDARAYYLSTAKNELGVVSAQSIAGGTLVPISWTEMQCDLTGQIEQRKVAKVE

SEQ ID NO: 31884 - protein, 199 aa, Zea mays subsp. mays
  peptide (1)..(199): Ceres Seq. ID no. 12376264
  misc_feature (14)..(198): NCBI GI NO: 18421805 NR Description: putative protein; protein id: At5g38890.1
  misc_feature (14)..(146): NCBI GI NO: 9758066 NR Description: gene_id:K15E6
  misc_feature (17)..(199): NCBI GI NO: 7705612 NR Description: exosomal core protein CSL4
  misc_feature (17)..(199): NCBI GI NO: 22267446 NR Description: RIKEN cDNA 2610104C07 [Mus musculus]
  misc_feature (42)..(197): NCBI GI NO: 38104559 NR Description: hypothetical protein MG08628.4
  misc_feature (103)..(197): NCBI GI NO: 6324097 NR Description: Represses the replication of double-strand ed RNAviruses
  misc_feature (45)..(104): NCBI GI NO: 6324097 NR Description: Represses the replication of double-strand ed RNAviruses
  misc_feature (13)..(197): NCBI GI NO: 7491999 NR Description: hypothetical protein SPCC965
  misc_feature (13)..(197): NCBI GI NO: 19076010 NR Description: hypothetical protein [Schizosaccharomyces pombe]
  misc_feature (14)..(198): NCBI GI NO: 24583644 NR Description: CG6249-PA [Drosophila melanogaster]
MAATAMDHDGGDDVVTPGELLGNSLTLAAGRGAYADGRSVRASVTGRRRIVPPAPGSDDQRSTVEVVGHKAHGAVPQPGSVVIARVTKVMARMASADIMCVDSKAIREKFTGMIRQQDVRATEIDKVDMYQSYRPGDIVKAMVLSLGDARAYYLSTAKNELGVVSAQSIAGGTLVPISWTEMQCDLTGQIEQRKVAKVE

SEQ ID NO: 31885 - protein, 194 aa, Zea mays subsp. mays
  peptide (1)..(194): Ceres Seq. ID no. 12376265
  misc_feature (9)..(193): NCBI GI NO: 18421805 NR Description: putative protein; protein id: At5g38890.1
  misc_feature (9)..(141): NCBI GI NO: 9758066 NR Description: gene_id:K15E6
  misc_feature (12)..(194): NCBI GI NO: 7705612 NR Description: exosomal core protein CSL4
  misc_feature (12)..(194): NCBI GI NO: 22267446 NR Description: RIKEN cDNA 2610104C07 [Mus musculus]
  misc_feature (37)..(192): NCBI GI NO: 38104559 NR Description: hypothetical protein MG08628.4
  misc_feature (98)..(192): NCBI GI NO: 6324097 NR Description: Represses the replication of double-strand ed RNAviruses
  misc_feature (40)..(99): NCBI GI NO: 6324097 NR Description: Represses the replication of double-strand ed RNAviruses
  misc_feature (8)..(192): NCBI GI NO: 7491999 NR Description: hypothetical protein SPCC965
  misc_feature (8)..(192): NCBI GI NO: 19076010 NR Description: hypothetical protein [Schizosaccharomyces pombe]
  misc_feature (9)..(193): NCBI GI NO: 24583644 NR Description: CG6249-PA [Drosophila melanogaster]
MDHDGGDDVVTPGELLGNSLTLAAGRGAYADGRSVRASVTGRRRIVPPAPGSDDQRSTVEVVGHKAHGAVPQPGSVVIARVTKVMARMASADIMCVDSKAIREKFTGMIRQQDVRATEIDKVDMYQSYRPGDIVKAMVLSLGDARAYYLSTAKNELGVVSAQSIAGGTLVPISWTEMQCDLTGQIEQRKVAKVE

SEQ ID NO: 31886 - DNA, 892 bp, Zea mays subsp. mays
  misc_feature (1)..(892): Ceres Seq. ID no. 12361752
accacaccaaaacccgcatccataaacaagaaaaagaaaagaaaacccccgctgccagcgacagaagaagaaggggtcccttctccttggttgcgttgcgcctccctcctgtctgcgtgcgtgcaatcgacgcagaggcgcgggcgctcgcaccaccacgaccacgacccgatggctttcatgcgctcccgctcaaatgcatcttctggcatgggagttgctcctaacattagggagacattcgttgagcttcaaatgaagaaggcattccgatatgttatcttcaaaatcgaagagaagcaaaagcaggtggttgtggagaagacaggggctactactgaaagctatgatgattttttggcctctctcccagagaatgactgccgatatgcgctgtatgattttgattttgttactggggagaatgtgcagaaaagcaagattttcttcattgcctggtccccatcgacatcccgcatacgtgctaagatgctgtactccacgtcgaaggaccgcatcaagtacgagcttgacgggttccactacgaaatccaggcgaccgacccatcggaggtggacatcgaggttctccgggagcgggctcactgaagctggttctccttttgaagggacctgtggagggccgtgaaccttcagccagatgcaaattcaattgtcaacgatgaagctcccgccgtggtgtttgttaataagttactgtaagcatatcatttagtcgctactcgctatgcatgacactagctggtgaagcgctatctaagctctattggtatgaccgtatgaggtttggttgccgtgttgccgagcctgtaaacgaagcaagatttgcagacttgttatattgtggtattgatgatactggattactggc

SEQ ID NO: 31887 - protein, 202 aa, Zea mays subsp. mays
  peptide (1)..(202): Ceres Seq. ID no. 12361753
  misc_feature (75)..(202): Pfam Name: Pfam Description:  Cofilin/tropomyosin-type actin-binding protein
  misc_feature (58)..(202): NCBI GI NO: 34897072 NR Description: putative actin-depolymerizing factor
  misc_feature (66)..(202): NCBI GI NO: 4566614 NR Description: actin depolymerizing factor [Populus x canescens]
  misc_feature (63)..(202): NCBI GI NO: 18402587 NR Description: actin depolymerizing factor 6
  misc_feature (66)..(202): NCBI GI NO: 32363121 NR Description: Actin-depolymerizing factor (ADF)
  misc_feature (63)..(202): NCBI GI NO: 21554405 NR Description: Actin-depolymerizing factor ADF-6
  misc_feature (58)..(202): NCBI GI NO: 24745620 NR Description: actin depolymerizing factor 6 [Solanum tuberosum]
  misc_feature (71)..(202): NCBI GI NO: 25295741 NR Description: actin depolymerizing factor 6
  misc_feature (69)..(201): NCBI GI NO: 7330254 NR Description: actin depolymerizing factor [Elaeis guineensis]
  misc_feature (65)..(202): NCBI GI NO: 17366768 NR Description: Actin-depolymerizing factor 1 (ADF 1)
  misc_feature (65)..(201): NCBI GI NO: 17366765 NR Description: Actin-depolymerizing factor 2 (ADF 2)
TTPKPASINKKKKRKPPLPATEEEGVPSPWLRCASLLSACVQSTQRRGRSHHHDHDPMAFMRSRSNASSGMGVAPNIRETFVELQMKKAFRYVIFKIEEKQKQVVVEKTGATTESYDDFLASLPENDCRYALYDFDFVTGENVQKSKIFFIAWSPSTSRIRAKMLYSTSKDRIKYELDGFHYEIQATDPSEVDIEVLRERAH

SEQ ID NO: 31888 - protein, 145 aa, Zea mays subsp. mays
  peptide (1)..(145): Ceres Seq. ID no. 12361754
  misc_feature (18)..(145): Pfam Name: Pfam Description:  Cofilin/tropomyosin-type actin-binding protein
  misc_feature (1)..(145): NCBI GI NO: 34897072 NR Description: putative actin-depolymerizing factor
  misc_feature (9)..(145): NCBI GI NO: 4566614 NR Description: actin depolymerizing factor [Populus x canescens]
  misc_feature (6)..(145): NCBI GI NO: 18402587 NR Description: actin depolymerizing factor 6
  misc_feature (9)..(145): NCBI GI NO: 32363121 NR Description: Actin-depolymerizing factor (ADF)
  misc_feature (6)..(145): NCBI GI NO: 21554405 NR Description: Actin-depolymerizing factor ADF-6
  misc_feature (1)..(145): NCBI GI NO: 24745620 NR Description: actin depolymerizing factor 6 [Solanum tuberosum]
  misc_feature (14)..(145): NCBI GI NO: 25295741 NR Description: actin depolymerizing factor 6
  misc_feature (12)..(144): NCBI GI NO: 7330254 NR Description: actin depolymerizing factor [Elaeis guineensis]
  misc_feature (8)..(145): NCBI GI NO: 17366768 NR Description: Actin-depolymerizing factor 1 (ADF 1)
  misc_feature (8)..(144): NCBI GI NO: 17366765 NR Description: Actin-depolymerizing factor 2 (ADF 2)
MAFMRSRSNASSGMGVAPNIRETFVELQMKKAFRYVIFKIEEKQKQVVVEKTGATTESYDDFLASLPENDCRYALYDFDFVTGENVQKSKIFFIAWSPSTSRIRAKMLYSTSKDRIKYELDGFHYEIQATDPSEVDIEVLRERAH

SEQ ID NO: 31889 - protein, 142 aa, Zea mays subsp. mays
  peptide (1)..(142): Ceres Seq. ID no. 12361755
  misc_feature (15)..(142): Pfam Name: Pfam Description:  Cofilin/tropomyosin-type actin-binding protein
  misc_feature (1)..(142): NCBI GI NO: 34897072 NR Description: putative actin-depolymerizing factor
  misc_feature (6)..(142): NCBI GI NO: 4566614 NR Description: actin depolymerizing factor [Populus x canescens]
  misc_feature (3)..(142): NCBI GI NO: 18402587 NR Description: actin depolymerizing factor 6
  misc_feature (6)..(142): NCBI GI NO: 32363121 NR Description: Actin-depolymerizing factor (ADF)
  misc_feature (3)..(142): NCBI GI NO: 21554405 NR Description: Actin-depolymerizing factor ADF-6
  misc_feature (1)..(142): NCBI GI NO: 24745620 NR Description: actin depolymerizing factor 6 [Solanum tuberosum]
  misc_feature (11)..(142): NCBI GI NO: 25295741 NR Description: actin depolymerizing factor 6
  misc_feature (9)..(141): NCBI GI NO: 7330254 NR Description: actin depolymerizing factor [Elaeis guineensis]
  misc_feature (5)..(142): NCBI GI NO: 17366768 NR Description: Actin-depolymerizing factor 1 (ADF 1)
  misc_feature (5)..(141): NCBI GI NO: 17366765 NR Description: Actin-depolymerizing factor 2 (ADF 2)
MRSRSNASSGMGVAPNIRETFVELQMKKAFRYVIFKIEEKQKQVVVEKTGATTESYDDFLASLPENDCRYALYDFDFVTGENVQKSKIFFIAWSPSTSRIRAKMLYSTSKDRIKYELDGFHYEIQATDPSEVDIEVLRERAH

SEQ ID NO: 31890 - DNA, 870 bp, Zea mays subsp. mays
  misc_feature (1)..(870): Ceres Seq. ID no. 12400389
aatccatcaatcctcatcgccacccaacccgccaagtccccaagcaagttgagcatccatccatccatggcgggaggcaagtccaccggcaatgccgcgcgcagcaggaagcgcgtcgaggcaaccgtcctcaagcgctccagggacgggagcgccttcaccagatgcgaggcctgcaacaaggacgtccccgtcgtcctcatcgacatgcacagctgcagcctcgaggagaagatcaggatgacgctcgaggcgcaggtcgtcgagaagaccgtcgaggtcgccagtgcggaccgcaagaagtcctccgccaagggaggtggtaacaaggacgccaagcgcaagcgctcgcccaccgccttcttcctcttcatggacgacttcaggaaggagttcaaggccacccatcctgacaacaagagtgtcgccaccgttgcaaaggaaggaggggagaggtggaagtccatgacagacgaggagaagaagccttacattgaaaaggccgcggagctcaaggctgaggccgagaatggcgagggcagtggtgagaacaatgttgccactaagaaagccaagacagatgaccaggaggtggatcagccagcaaagaagctcagaaagtgcaaggctcttcacgaggacgaggatgacgatggtgaccaggaagacgaggatgagaagaacgagttggatgacgacatgtagatggcagaggccactctcccatctctgtaaatggatggcagatgtgagcgtctagttagaaatgtcacttgtttcaagctagagggaagaggaagatagtcagtagtgaatatcccccgttatcgttgctacatgaatgaactattctatgatgcagttctgtcc

SEQ ID NO: 31891 - protein, 234 aa, Zea mays subsp. mays
  peptide (1)..(234): Ceres Seq. ID no. 12400390
  misc_feature (115)..(181): Pfam Name: high mobility group Pfam Description: HMG
  misc_feature (81)..(234): NCBI GI NO: 17017396 NR Description: HMG type nucleosome/chromatin assembly factor D
  misc_feature (26)..(234): NCBI GI NO: 38637289 NR Description: putative HMG type nucleosome/chromatin assemblyfactor D
  misc_feature (23)..(234): NCBI GI NO: 18420676 NR Description: expressed protein; protein id: At5g23420
  misc_feature (23)..(234): NCBI GI NO: 9759080 NR Description: gene_id:K19M13.4~unknown protein
  misc_feature (94)..(226): NCBI GI NO: 3885888 NR Description: high mobility group protein [Oryza sativa]
  misc_feature (92)..(226): NCBI GI NO: 123378 NR Description: DNA-BINDING PROTEIN MNB1B (HMG1-LIKE PROTEIN)
  misc_feature (92)..(226): NCBI GI NO: 7446229 NR Description: high mobility group protein MNB1b - maize
  misc_feature (85)..(226): NCBI GI NO: 729738 NR Description: HMG1/2-LIKE PROTEIN
  misc_feature (99)..(226): NCBI GI NO: 7446227 NR Description: high mobility group protein HMGc2 - maize
  misc_feature (95)..(227): NCBI GI NO: 7446226 NR Description: high mobility group protein HMGc1 - maize
NPSILIATQPAKSPSKLSIHPSMAGGKSTGNAARSRKRVEATVLKRSRDGSAFTRCEACNKDVPVVLIDMHSCSLEEKIRMTLEAQVVEKTVEVASADRKKSSAKGGGNKDAKRKRSPTAFFLFMDDFRKEFKATHPDNKSVATVAKEGGERWKSMTDEEKKPYIEKAAELKAEAENGEGSGENNVATKKAKTDDQEVDQPAKKLRKCKALHEDEDDDGDQEDEDEKNELDDDM

SEQ ID NO: 31892 - protein, 212 aa, Zea mays subsp. mays
  peptide (1)..(212): Ceres Seq. ID no. 12400391
  misc_feature (93)..(159): Pfam Name: high mobility group Pfam Description: HMG
  misc_feature (59)..(212): NCBI GI NO: 17017396 NR Description: HMG type nucleosome/chromatin assembly factor D
  misc_feature (4)..(212): NCBI GI NO: 38637289 NR Description: putative HMG type nucleosome/chromatin assemblyfactor D
  misc_feature (1)..(212): NCBI GI NO: 18420676 NR Description: expressed protein; protein id: At5g23420
  misc_feature (1)..(212): NCBI GI NO: 9759080 NR Description: gene_id:K19M13.4~unknown protein
  misc_feature (72)..(204): NCBI GI NO: 3885888 NR Description: high mobility group protein [Oryza sativa]
  misc_feature (70)..(204): NCBI GI NO: 123378 NR Description: DNA-BINDING PROTEIN MNB1B (HMG1-LIKE PROTEIN)
  misc_feature (70)..(204): NCBI GI NO: 7446229 NR Description: high mobility group protein MNB1b - maize
  misc_feature (63)..(204): NCBI GI NO: 729738 NR Description: HMG1/2-LIKE PROTEIN
  misc_feature (77)..(204): NCBI GI NO: 7446227 NR Description: high mobility group protein HMGc2 - maize
  misc_feature (73)..(205): NCBI GI NO: 7446226 NR Description: high mobility group protein HMGc1 - maize
MAGGKSTGNAARSRKRVEATVLKRSRDGSAFTRCEACNKDVPVVLIDMHSCSLEEKIRMTLEAQVVEKTVEVASADRKKSSAKGGGNKDAKRKRSPTAFFLFMDDFRKEFKATHPDNKSVATVAKEGGERWKSMTDEEKKPYIEKAAELKAEAENGEGSGENNVATKKAKTDDQEVDQPAKKLRKCKALHEDEDDDGDQEDEDEKNELDDDM

SEQ ID NO: 31893 - protein, 165 aa, Zea mays subsp. mays
  peptide (1)..(165): Ceres Seq. ID no. 12400392
  misc_feature (46)..(112): Pfam Name: high mobility group Pfam Description: HMG
  misc_feature (12)..(165): NCBI GI NO: 17017396 NR Description: HMG type nucleosome/chromatin assembly factor D
  misc_feature (1)..(165): NCBI GI NO: 38637289 NR Description: putative HMG type nucleosome/chromatin assemblyfactor D
  misc_feature (1)..(165): NCBI GI NO: 18420676 NR Description: expressed protein; protein id: At5g23420
  misc_feature (1)..(165): NCBI GI NO: 9759080 NR Description: gene_id:K19M13.4~unknown protein
  misc_feature (25)..(157): NCBI GI NO: 3885888 NR Description: high mobility group protein [Oryza sativa]
  misc_feature (23)..(157): NCBI GI NO: 123378 NR Description: DNA-BINDING PROTEIN MNB1B (HMG1-LIKE PROTEIN)
  misc_feature (23)..(157): NCBI GI NO: 7446229 NR Description: high mobility group protein MNB1b - maize
  misc_feature (16)..(157): NCBI GI NO: 729738 NR Description: HMG1/2-LIKE PROTEIN
  misc_feature (30)..(157): NCBI GI NO: 7446227 NR Description: high mobility group protein HMGc2 - maize
  misc_feature (26)..(158): NCBI GI NO: 7446226 NR Description: high mobility group protein HMGc1 - maize
MHSCSLEEKIRMTLEAQVVEKTVEVASADRKKSSAKGGGNKDAKRKRSPTAFFLFMDDFRKEFKATHPDNKSVATVAKEGGERWKSMTDEEKKPYIEKAAELKAEAENGEGSGENNVATKKAKTDDQEVDQPAKKLRKCKALHEDEDDDGDQEDEDEKNELDDDM

SEQ ID NO: 31894 - DNA, 1307 bp, Zea mays subsp. mays
  misc_feature (1)..(1307): Ceres Seq. ID no. 12400773
  misc_feature (56)..(56): n is a, c, t, g, unknown, or other
ctcgccgcccccgtctcctctcctctcctctcctccgcatccacggccgcaggagncagccagccactcgacgatctagtcgtctctctctccccgctctgccgcctcgctgccgcggcttcccgtcggctggaggatgaaggtcacggtcgtgtcccggagcggccgggaggtcgtcaagggcggcatcgacctcaaggactcggccaaggtcgcggacctgcaggaggccatccatgccaggactaagaagtattatccttctaggcagcggctcaccctcccccttcaacctggaaaaggcgggaagccagttgtcctcagtccaaaggccagcctgctagaatactgctagaagggttctgggtcactgacagtggtcttcaaagatttagggccacaggtctactacagcacactgttcttcttcgagtacctgggtcctctcatcactaccccatgttctactatctgcccgtctacaaatacttcgggtacgagggggagcgggccatgcaccctgtccagacctacgccatgtactactggtgcttccactacttcaagcggatcatggagacgttcttcgtgcaccgcttcagccacgcgacgtcgccgctctcgaacgtcttcaggaactgtgcctactactggaccttcggcgcttacattgcttactactgcaaccacccgctgtacaccccagtgagtgacctgcagatgaagattgggtttggttttggggtcgtctgccaggtcgcgaacttctactgccacatcctgctgcggaacctcaggagcccaagcggcagcggcgggtaccagatcccccgcggtttcttgttcaacatcgtgacctgcgccaattacaccaccgagatctaccagtgggtcggcttcaacatcgccacacagaccgtggcaggttacgtcttccttgtcgtggcggcgggcatcatgaccaactgggcgctcggcaagcacagccgtctgaagaagctgtttgacggcaaggatgggaggcccaagtaccctcgccggtgggtgattctccctccgttcctgtgaagaggcggtggtggtggctcactgttggtggtcggcccattgtgattcgatgtctacagacagttgtactgtactaatcgtgcctgtttagcggttgaacttggattccgttgtccgaagtttctaatccgaaagatggatttcattttcttcttcttcttcttagcattatgtcactgtctcacgtcgtcctgtctcaatacagtctaaggttcatgtgatgttatccccatttgtcc

SEQ ID NO: 31895 - protein, 202 aa, Zea mays subsp. mays; identical to SEQ ID NO: 24080
  peptide (1)..(202): Ceres Seq. ID no. 12400774
  misc_feature (50)..(202): Pfam Name: Pfam Description:  3-oxo-5-alpha-steroid 4-dehydrogenase
  misc_feature (1)..(202): NCBI GI NO: 34895848 NR Description: putative glycoprotein
  misc_feature (1)..(202): NCBI GI NO: 15233250 NR Description: synaptic glycoprotein SC2-like protein
  misc_feature (1)..(202): NCBI GI NO: 25004880 NR Description: steroid 5-alpha reductase [Cicer arietinum]
  misc_feature (1)..(202): NCBI GI NO: 39590267 NR Description: Hypothetical protein CBG11196
  misc_feature (1)..(202): NCBI GI NO: 24657023 NR Description: CG10849-PA [Drosophila melanogaster]
  misc_feature (1)..(202): NCBI GI NO: 27819746 NR Description: SD09294p [Drosophila melanogaster]
  misc_feature (1)..(202): NCBI GI NO: 17531783 NR Description: Synaptic glycoprotein SC2 (35.1 kD)
  misc_feature (1)..(183): NCBI GI NO: 13111809 NR Description: Unknown (protein for IMAGE:2901253) [Homo sapiens]
  misc_feature (1)..(183): NCBI GI NO: 24475816 NR Description: glycoprotein, synaptic 2
  misc_feature (1)..(183): NCBI GI NO: 19924091 NR Description: synaptic glycoprotein SC2 [Rattus norvegicus]

SEQ ID NO: 31896 - protein, 184 aa, Zea mays subsp. mays; identical to SEQ ID NO: 24081
  peptide (1)..(184): Ceres Seq. ID no. 12400775
  misc_feature (32)..(184): Pfam Name: Pfam Description:  3-oxo-5-alpha-steroid 4-dehydrogenase
  misc_feature (1)..(184): NCBI GI NO: 34895848 NR Description: putative glycoprotein
  misc_feature (1)..(184): NCBI GI NO: 15233250 NR Description: synaptic glycoprotein SC2-like protein
  misc_feature (1)..(184): NCBI GI NO: 25004880 NR Description: steroid 5-alpha reductase [Cicer arietinum]
  misc_feature (1)..(184): NCBI GI NO: 39590267 NR Description: Hypothetical protein CBG11196
  misc_feature (1)..(184): NCBI GI NO: 24657023 NR Description: CG10849-PA [Drosophila melanogaster]
  misc_feature (1)..(184): NCBI GI NO: 27819746 NR Description: SD09294p [Drosophila melanogaster]
  misc_feature (1)..(184): NCBI GI NO: 17531783 NR Description: Synaptic glycoprotein SC2 (35.1 kD)
  misc_feature (1)..(165): NCBI GI NO: 13111809 NR Description: Unknown (protein for IMAGE:2901253) [Homo sapiens]
  misc_feature (1)..(165): NCBI GI NO: 24475816 NR Description: glycoprotein, synaptic 2
  misc_feature (1)..(165): NCBI GI NO: 19924091 NR Description: synaptic glycoprotein SC2 [Rattus norvegicus]

SEQ ID NO: 31897 - protein, 176 aa, Zea mays subsp. mays
  peptide (1)..(176): Ceres Seq. ID no. 12400776
  misc_feature (24)..(176): Pfam Name: Pfam Description:  3-oxo-5-alpha-steroid 4-dehydrogenase
  misc_feature (1)..(176): NCBI GI NO: 34895848 NR Description: putative glycoprotein
  misc_feature (1)..(176): NCBI GI NO: 15233250 NR Description: synaptic glycoprotein SC2-like protein
  misc_feature (1)..(176): NCBI GI NO: 25004880 NR Description: steroid 5-alpha reductase [Cicer arietinum]
  misc_feature (1)..(176): NCBI GI NO: 39590267 NR Description: Hypothetical protein CBG11196
  misc_feature (1)..(176): NCBI GI NO: 24657023 NR Description: CG10849-PA [Drosophila melanogaster]
  misc_feature (1)..(176): NCBI GI NO: 27819746 NR Description: SD09294p [Drosophila melanogaster]
  misc_feature (1)..(176): NCBI GI NO: 17531783 NR Description: Synaptic glycoprotein SC2 (35.1 kD)
  misc_feature (1)..(157): NCBI GI NO: 13111809 NR Description: Unknown (protein for IMAGE:2901253) [Homo sapiens]
  misc_feature (1)..(157): NCBI GI NO: 19924091 NR Description: synaptic glycoprotein SC2 [Rattus norvegicus]
  misc_feature (1)..(157): NCBI GI NO: 24475816 NR Description: glycoprotein, synaptic 2
MYYWCFHYFKRIMETFFVHRFSHATSPLSNVFRNCAYYWTFGAYIAYYCNHPLYTPVSDLQMKIGFGFGVVCQVANFYCHILLRNLRSPSGSGGYQIPRGFLFNIVTCANYTTEIYQWVGFNIATQTVAGYVFLVVAAGIMTNWALGKHSRLKKLFDGKDGRPKYPRRWVILPPFL

SEQ ID NO: 31898 - DNA, 1046 bp, Zea mays subsp. mays
  misc_feature (1)..(1046): Ceres Seq. ID no. 12355410
attagctgtcgcgtcagttacgttttgcttgccctgttctcgttcggccttgacaacccggaaatcctccagccctctagtccccaacgacgcaggaagcaggatcgagccgaatcctccggaactcgccgccggggccaaccgacctcacactattgatcgaggatgtcgtacgcctacctcttcaagtacatcatcatcggcgacacaggcgtggggaagtcatgcctgctgctgcagttcacggataagcgcttccagcccgtgcacgatctcaccatcggcgttgaatttggcgcccgcatgatcaccatcgacaacaagcccatcaaactccagatttgggacacggctggccaagaatcattcagatctattactaggtcatactacagaggagctgctggagcccttttggtttatgatatcactaggagggagaccttcaatcatctcgcaagttggctagaagatgccaggcaacatgcaaatgctaacatgacagtgatgctgattggaaataaatgtgacctttctcataggcgtgctgtcagctatgaggaaggcgaacagtttgccaaggagcatggtctggtttttatggaggcatctgctaaaactgcacaaaacgtcgaggaggcattcattaagaccgctggtacaatatacaagaaaatccaagatggcatatttgatgtatcaaatgagtccaacgggatcaaagttggctatgctgttcccaactcatctggaggtggtgctggctcgtcctcacaggctggtggctgctgcagttgagcggtggcagcaagtcatacaattgcaagggttctctctgcagtatcttgatgtttgcctatagctggccccggatgatttgttctttcagccatcacgtttcaatccatgaacaaaccatcttcagtgttagttgtcattcaaacttgtgcgatctttctgtaaagccaatcattcacgattgctaacgtatgtgctttctgtaaccaaattgaaatcagttctatggtattctttgttcaaaatgt

SEQ ID NO: 31899 - protein, 210 aa, Zea mays subsp. mays
  peptide (1)..(210): Ceres Seq. ID no. 12355411
  misc_feature (8)..(169): Pfam Name: Pfam Description:  Ras family
  misc_feature (1)..(210): NCBI GI NO: 7438438 NR Description: GTP-binding protein yptm3 - maize
  misc_feature (1)..(210): NCBI GI NO: 4837727 NR Description: small GTP binding protein Rab2
  misc_feature (1)..(210): NCBI GI NO: 1346957 NR Description: RAS-RELATED PROTEIN RAB-2-B
  misc_feature (1)..(210): NCBI GI NO: 1346956 NR Description: RAS-RELATED PROTEIN RAB-2-A
  misc_feature (1)..(210): NCBI GI NO: 38344743 NR Description: OSJNBa0089K21.1
  misc_feature (1)..(200): NCBI GI NO: 38524287 NR Description: RAB-like small G-protein
  misc_feature (1)..(209): NCBI GI NO: 15235981 NR Description: GTP-binding protein
  misc_feature (1)..(210): NCBI GI NO: 1370176 NR Description: RAB2A [Lotus japonicus]
  misc_feature (1)..(210): NCBI GI NO: 7438383 NR Description: GTP-binding protein rab2 - soybean
  misc_feature (1)..(210): NCBI GI NO: 16755592 NR Description: small GTPase Rab2 [Nicotiana tabacum]
MSYAYLFKYIIIGDTGVGKSCLLLQFTDKRFQPVHDLTIGVEFGARMITIDNKPIKLQIWDTAGQESFRSITRSYYRGAAGALLVYDITRRETFNHLASWLEDARQHANANMTVMLIGNKCDLSHRRAVSYEEGEQFAKEHGLVFMEASAKTAQNVEEAFIKTAGTIYKKIQDGIFDVSNESNGIKVGYAVPNSSGGGAGSSSQAGGCCS

SEQ ID NO: 31900 - protein, 164 aa, Zea mays subsp. mays
  peptide (1)..(164): Ceres Seq. ID no. 12355412
  misc_feature (1)..(123): Pfam Name: Pfam Description:  Ras family
  misc_feature (1)..(164): NCBI GI NO: 7438438 NR Description: GTP-binding protein yptm3 - maize
  misc_feature (1)..(164): NCBI GI NO: 4837727 NR Description: small GTP binding protein Rab2
  misc_feature (1)..(164): NCBI GI NO: 1346957 NR Description: RAS-RELATED PROTEIN RAB-2-B
  misc_feature (1)..(164): NCBI GI NO: 1346956 NR Description: RAS-RELATED PROTEIN RAB-2-A
  misc_feature (1)..(164): NCBI GI NO: 38344743 NR Description: OSJNBa0089K21.1
  misc_feature (1)..(154): NCBI GI NO: 38524287 NR Description: RAB-like small G-protein
  misc_feature (1)..(163): NCBI GI NO: 15235981 NR Description: GTP-binding protein
  misc_feature (1)..(164): NCBI GI NO: 1370176 NR Description: RAB2A [Lotus japonicus]
  misc_feature (1)..(164): NCBI GI NO: 7438383 NR Description: GTP-binding protein rab2 - soybean
  misc_feature (1)..(164): NCBI GI NO: 16755592 NR Description: small GTPase Rab2 [Nicotiana tabacum]
MITIDNKPIKLQIWDTAGQESFRSITRSYYRGAAGALLVYDITRRETFNHLASWLEDARQHANANMTVMLIGNKCDLSHRRAVSYEEGEQFAKEHGLVFMEASAKTAQNVEEAFIKTAGTIYKKIQDGIFDVSNESNGIKVGYAVPNSSGGGAGSSSQAGGCCS

SEQ ID NO: 31901 - DNA, 2012 bp, Zea mays subsp. mays
  misc_feature (1)..(2012): Ceres Seq. ID no. 12386456
agcacacactcgcacgcacgagaaggccggagaggcggcgcacccggagaggcaaggcaagcgatccctctccctccctccctcgtatccaggacaacagcccgtgcgatccgatcccgatggcggcccggccggacgcgcgcagcggctactgcgccgcgacgcgcaccttccgtagcaagcgcgcggacgtcccgctccccgccgacgcggacctggacgtcgtcaggttcctcgcgtcccgccgccacgcgggcgtcgtcgcgctcgtcgacgctgccacgggccaccgggtcacgttccaggaactctggcgcgcggtggaaggggcggccaccgcgctcgccgcgccgccgctgtcgctccgcaagggccagatcgcgcttatcctctccccgaactccgtccacttccccgttgccgccctcgcagccatgtccctcggcgccgtcctcaccaccgccaacccgctcaacacgcccgccgagatcgccaagcaggtcgccgacgcgcgccccgtcgtcgccttcaccacccgcgacctcctccccaagctcccgcgcgccggcgccggcgccggcatccgcgtcgtcctcctcgagcccgaccgcctcccctccgaccctagccccgtcgtcgccaccatcggggagatctccgccacgccgcccgaccccacgcgccgccgggaccgcgtcacgcaggacgacccggccacgctgctctactcctcgggcaccacgggccccagcaagggcgtcgtcgccacgcaccggagcctcatctccatggtgcagatcatcatgtcgcgcttccgcctcgaggcctccaacaggaccgagaccttcctctgcacggtgcccatgttccacgtctacggcctcgtcgccttcgccacggggctgctcggctgcggcgccaccatcgtcgtgctctccaagtacgagctccccgagatgctgcgcgccatcaacgaatacggggtcacctacctcccactcgtgccgcccatcctcgtcgccatgctggcgtaccccaaccgcctgccgcttgggggcctgcgcaaggtgctctccggcggagcgccgctcagcaaggagctgatcgaggggtttaaggagaaatacccgcaggtggagatccttcaggggtacgggctgacagagagcacggctatcggcgcgtccacggactctgccgaggagagcagccggtacggcacggctgggctgctgtcgccaagcaccgaggctaagatcgtcgacccagagaccggcgaggcgctgccggtgaaccgcaccggcgagctctggatccgggggccatacgtcatgaaagggtatttcaagaacgcggaggcaacacaatcaacattgacgcctgatggatggctcaagactggggatctctgctacatagatgaggatggttatctcttcgttgtggatcgtctgaaggagttgatcaaatacaaagggtaccaggtgcctccggcagagttggaagctcttttgctaacacatccagaaatcgaagatgtcaccgttataccgtttcccgaccgtgaggtcggccagttcccaatggcctacgtagtgaggaagaaagggagcaatttgtcagagcgcgaggtgatggagttcgttgcgaaacaggtagcgccttacaagaaggttaggaaggtggcgtttgtggcggagattcccaagaacgcgtccggcaagattctgaggaaggatctcatcaagctcgccacatccaaatccaaactatgaaaattgtttttcgtgtttacagtgctggaatacgcttgtcgtccacgagcggcgagccattctctacgctgccccggtattttggttgtagaatgcttgtacaactgaagatcccgtcggctatgtgcttgcttgtgtacagtgctctgttctcgtacaatacaatattgggagggaatactaggcgtctgtacgtaggcttggatggaaataatatccggtaatttcagtgttggt

SEQ ID NO: 31902 - protein, 590 aa, Zea mays subsp. mays
  peptide (1)..(590): Ceres Seq. ID no. 12386457
  misc_feature (99)..(445): Pfam Name: Pfam Description:  AMP-binding enzyme
  misc_feature (45)..(587): NCBI GI NO: 20502991 NR Description: Putative AMP-binding protein
  misc_feature (42)..(590): NCBI GI NO: 18394871 NR Description: expressed protein; protein id: At1g20510.1
  misc_feature (42)..(503): NCBI GI NO: 8778603 NR Description: F5M15.17 [Arabidopsis thaliana]
  misc_feature (495)..(590): NCBI GI NO: 8778603 NR Description: F5M15.17 [Arabidopsis thaliana]
  misc_feature (45)..(587): NCBI GI NO: 15217956 NR Description: hypothetical protein; protein id: At1g20480.1
  misc_feature (45)..(581): NCBI GI NO: 25402913 NR Description: protein F5M15.18 [imported] - Arabidopsis thaliana
  misc_feature (83)..(587): NCBI GI NO: 25402913 NR Description: protein F5M15.18 [imported] - Arabidopsis thaliana
  misc_feature (45)..(445): NCBI GI NO: 15217958 NR Description: hypothetical protein; protein id: At1g20490.1
  misc_feature (463)..(587): NCBI GI NO: 15217958 NR Description: hypothetical protein; protein id: At1g20490.1
  misc_feature (45)..(587): NCBI GI NO: 10177788 NR Description: AMP-binding protein-like [Arabidopsis thaliana]
HTLARTRRPERRRTRRGKASDPSPSLPRIQDNSPCDPIPMAARPDARSGYCAATRTFRSKRADVPLPADADLDVVRFLASRRHAGVVALVDAATGHRVTFQELWRAVEGAATALAAPPLSLRKGQIALILSPNSVHFPVAALAAMSLGAVLTTANPLNTPAEIAKQVADARPVVAFTTRDLLPKLPRAGAGAGIRVVLLEPDRLPSDPSPVVATIGEISATPPDPTRRRDRVTQDDPATLLYSSGTTGPSKGVVATHRSLISMVQIIMSRFRLEASNRTETFLCTVPMFHVYGLVAFATGLLGCGATIVVLSKYELPEMLRAINEYGVTYLPLVPPILVAMLAYPNRLPLGGLRKVLSGGAPLSKELIEGFKEKYPQVEILQGYGLTESTAIGASTDSAEESSRYGTAGLLSPSTEAKIVDPETGEALPVNRTGELWIRGPYVMKGYFKNAEATQSTLTPDGWLKTGDLCYIDEDGYLFVVDRLKELIKYKGYQVPPAELEALLLTHPEIEDVTVIPFPDREVGQFPMAYVVRKKGSNLSEREVMEFVAKQVAPYKKVRKVAFVAEIPKNASGKILRKDLIKLATSKSKL

SEQ ID NO: 31903 - protein, 551 aa, Zea mays subsp. mays
  peptide (1)..(551): Ceres Seq. ID no. 12386458
  misc_feature (60)..(406): Pfam Name: Pfam Description:  AMP-binding enzyme
  misc_feature (6)..(548): NCBI GI NO: 20502991 NR Description: Putative AMP-binding protein
  misc_feature (3)..(551): NCBI GI NO: 18394871 NR Description: expressed protein; protein id: At1g20510.1
  misc_feature (3)..(464): NCBI GI NO: 8778603 NR Description: F5M15.17 [Arabidopsis thaliana]
  misc_feature (456)..(551): NCBI GI NO: 8778603 NR Description: F5M15.17 [Arabidopsis thaliana]
  misc_feature (6)..(548): NCBI GI NO: 15217956 NR Description: hypothetical protein; protein id: At1g20480.1
  misc_feature (6)..(542): NCBI GI NO: 25402913 NR Description: protein F5M15.18 [imported] - Arabidopsis thaliana
  misc_feature (44)..(548): NCBI GI NO: 25402913 NR Description: protein F5M15.18 [imported] - Arabidopsis thaliana
  misc_feature (6)..(406): NCBI GI NO: 15217958 NR Description: hypothetical protein; protein id: At1g20490.1
  misc_feature (424)..(548): NCBI GI NO: 15217958 NR Description: hypothetical protein; protein id: At1g20490.1
  misc_feature (6)..(548): NCBI GI NO: 10177788 NR Description: AMP-binding protein-like [Arabidopsis thaliana]
MAARPDARSGYCAATRTFRSKRADVPLPADADLDVVRFLASRRHAGVVALVDAATGHRVTFQELWRAVEGAATALAAPPLSLRKGQIALILSPNSVHFPVAALAAMSLGAVLTTANPLNTPAEIAKQVADARPVVAFTTRDLLPKLPRAGAGAGIRVVLLEPDRLPSDPSPVVATIGEISATPPDPTRRRDRVTQDDPATLLYSSGTTGPSKGVVATHRSLISMVQIIMSRFRLEASNRTETFLCTVPMFHVYGLVAFATGLLGCGATIVVLSKYELPEMLRAINEYGVTYLPLVPPILVAMLAYPNRLPLGGLRKVLSGGAPLSKELIEGFKEKYPQVEILQGYGLTESTAIGASTDSAEESSRYGTAGLLSPSTEAKIVDPETGEALPVNRTGELWIRGPYVMKGYFKNAEATQSTLTPDGWLKTGDLCYIDEDGYLFVVDRLKELIKYKGYQVPPAELEALLLTHPEIEDVTVIPFPDREVGQFPMAYVVRKKGSNLSEREVMEFVAKQVAPYKKVRKVAFVAEIPKNASGKILRKDLIKLATSKSKL

SEQ ID NO: 31904 - protein, 446 aa, Zea mays subsp. mays
  peptide (1)..(446): Ceres Seq. ID no. 12386459
  misc_feature (1)..(301): Pfam Name: Pfam Description:  AMP-binding enzyme
  misc_feature (1)..(443): NCBI GI NO: 20502991 NR Description: Putative AMP-binding protein
  misc_feature (1)..(446): NCBI GI NO: 18394871 NR Description: expressed protein; protein id: At1g20510.1
  misc_feature (1)..(359): NCBI GI NO: 8778603 NR Description: F5M15.17 [Arabidopsis thaliana]
  misc_feature (351)..(446): NCBI GI NO: 8778603 NR Description: F5M15.17 [Arabidopsis thaliana]
  misc_feature (1)..(443): NCBI GI NO: 15217956 NR Description: hypothetical protein; protein id: At1g20480.1
  misc_feature (1)..(437): NCBI GI NO: 25402913 NR Description: protein F5M15.18 [imported] - Arabidopsis thaliana
  misc_feature (1)..(443): NCBI GI NO: 25402913 NR Description: protein F5M15.18 [imported] - Arabidopsis thaliana
  misc_feature (1)..(301): NCBI GI NO: 15217958 NR Description: hypothetical protein; protein id: At1g20490.1
  misc_feature (319)..(443): NCBI GI NO: 15217958 NR Description: hypothetical protein; protein id: At1g20490.1
  misc_feature (1)..(443): NCBI GI NO: 10177788 NR Description: AMP-binding protein-like [Arabidopsis thaliana]
MSLGAVLTTANPLNTPAEIAKQVADARPVVAFTTRDLLPKLPRAGAGAGIRVVLLEPDRLPSDPSPVVATIGEISATPPDPTRRRDRVTQDDPATLLYSSGTTGPSKGVVATHRSLISMVQIIMSRFRLEASNRTETFLCTVPMFHVYGLVAFATGLLGCGATIVVLSKYELPEMLRAINEYGVTYLPLVPPILVAMLAYPNRLPLGGLRKVLSGGAPLSKELIEGFKEKYPQVEILQGYGLTESTAIGASTDSAEESSRYGTAGLLSPSTEAKIVDPETGEALPVNRTGELWIRGPYVMKGYFKNAEATQSTLTPDGWLKTGDLCYIDEDGYLFVVDRLKELIKYKGYQVPPAELEALLLTHPEIEDVTVIPFPDREVGQFPMAYVVRKKGSNLSEREVMEFVAKQVAPYKKVRKVAFVAEIPKNASGKILRKDLIKLATSKSKL

SEQ ID NO: 31905 - DNA, 1095 bp, Zea mays subsp. mays
  misc_feature (1)..(1095): Ceres Seq. ID no. 12400739
ccaacacgagcggttagaaaccctagtcaaaaccctcgccctcccaaaaactactcacgtctcgccgccccgccgtatcaccctttctcggcggccggcctcttctcttcacggactcgcaggtcatcgagatgtcgtcggcggaggcgaaggccgcggcgaaggcggtcccggagtctgtgctgcgcaagcgcaagcgggaggagcagtgggcagcggacaagaaggagaaggccctcgcagacaggaaggaggcgcttgacagccgcaagatcatatttgctcgcgccaagcagtacgcccaggagtacgacgcccaggagaaggagcttgtgcagctcaagcgtgaggctcggttgaagggtgggttctatgtgagccccagaggccaagcttctgtttgtggtccgcatccgtggtatcaatgccatgcaccccaagacccgcaagatcttgcagctcctgcgtttgaggcagatcttcaatggtgtctttctcaaggttaacaaggcaactattaacatgctacggagggtggagccatatgttgcgtatggatacccgaacctgaagagtgttagggaattgatctacaaaagaggttatgggaagctgaacaagcagaggattccgcttagcaacaacaatgtcatcgaggagggccttgggaagcataatatcatctgcatcgaggaccttgttcatgagatcatgacggttggcccacacttcaaagaggccaacaacttcctctggccattcaagctgaaagcgccccttggtggcctcaagaagaagaggaaccactatgtggagggtggcgacgctggcaaccgtgagaactacatcaacgagctcatcaagaggatgaactaggctctcttgtatcctgtgagaatgcattcgatgtcggcatggatatgcaattttgttccatggctgtcatacgtcacgacttcaactaggaaatgggtcctgtttatgtttgcagttgcctctgtaggttttaatacatcaagacataaaccaacacgtgccccaagtgtcactcgctagggctaccaagattgttgcaaaaaagatagcactttttcc

SEQ ID NO: 31906 - protein, 148 aa, Zea mays subsp. mays
  peptide (1)..(148): Ceres Seq. ID no. 12400740
  misc_feature (1)..(40): Pfam Name: Pfam Description:  Ribosomal protein L30p/L7e
  misc_feature (1)..(148): NCBI GI NO: 38637548 NR Description: putative 60S ribosomal protein L7
  misc_feature (1)..(148): NCBI GI NO: 38346542 NR Description: OSJNBa0035M09.3
  misc_feature (1)..(148): NCBI GI NO: 15231288 NR Description: ribosomal protein, putative; protein id:At3g13580
  misc_feature (1)..(148): NCBI GI NO: 30689617 NR Description: 60S ribosomal protein L7 (RPL7C)
  misc_feature (1)..(148): NCBI GI NO: 30689623 NR Description: 60S ribosomal protein L7 (RPL7C)
  misc_feature (1)..(148): NCBI GI NO: 15226212 NR Description: putative ribosomal protein L7
  misc_feature (1)..(148): NCBI GI NO: 445613 NR Description: ribosomal protein L7
  misc_feature (1)..(148): NCBI GI NO: 27311547 NR Description: Unknown protein [Arabidopsis thaliana]
  misc_feature (1)..(147): NCBI GI NO: 28630259 NR Description: ribosomal protein L7 [Branchiostoma lanceolatum]
  misc_feature (1)..(148): NCBI GI NO: 15293877 NR Description: ribosomal protein L7 [Ictalurus punctatus]
MHPKTRKILQLLRLRQIFNGVFLKVNKATINMLRRVEPYVAYGYPNLKSVRELIYKRGYGKLNKQRIPLSNNNVIEEGLGKHNIICIEDLVHEIMTVGPHFKEANNFLWPFKLKAPLGGLKKKRNHYVEGGDAGNRENYINELIKRMN

SEQ ID NO: 31907 - protein, 124 aa, Zea mays subsp. mays
  peptide (1)..(124): Ceres Seq. ID no. 12400741
  misc_feature (1)..(87): NCBI GI NO: 38637548 NR Description: putative 60S ribosomal protein L7
  misc_feature (6)..(84): NCBI GI NO: 38346542 NR Description: OSJNBa0035M09.3
  misc_feature (1)..(87): NCBI GI NO: 15231288 NR Description: ribosomal protein, putative; protein id:At3g13580
  misc_feature (4)..(87): NCBI GI NO: 30689617 NR Description: 60S ribosomal protein L7 (RPL7C)
  misc_feature (4)..(87): NCBI GI NO: 30689623 NR Description: 60S ribosomal protein L7 (RPL7C)
  misc_feature (13)..(87): NCBI GI NO: 15226212 NR Description: putative ribosomal protein L7
  misc_feature (4)..(87): NCBI GI NO: 27311547 NR Description: Unknown protein [Arabidopsis thaliana]
  misc_feature (13)..(87): NCBI GI NO: 445613 NR Description: ribosomal protein L7
  misc_feature (13)..(87): NCBI GI NO: 28630259 NR Description: ribosomal protein L7 [Branchiostoma lanceolatum]
  misc_feature (1)..(82): NCBI GI NO: 15293877 NR Description: ribosomal protein L7 [Ictalurus punctatus]
MSSAEAKAAAKAVPESVLRKRKREEQWAADKKEKALADRKEALDSRKIIFARAKQYAQEYDAQEKELVQLKREARLKGGFYVSPRGQASVCGPHPWYQCHAPQDPQDLAAPAFEADLQWCLSQG

SEQ ID NO: 31908 - protein, 119 aa, Zea mays subsp. mays
  peptide (1)..(119): Ceres Seq. ID no. 12400742
  misc_feature (72)..(119): NCBI GI NO: 29841077 NR Description: similar to NM_058275 probable 60S ribosomal proteinL7 in Caenorhabditis elegans
  misc_feature (72)..(119): NCBI GI NO: 29841446 NR Description: similar to GenBank Accession Number AF401559ribosomal protein in Caenorhabditis elegans
PTRAVRNPSQNPRPPKNYSRLAAPPYHPFSAAGLFSSRTRRSSRCRRRRRRPRRRRSRSLCCASASGRSSGQRTRRRRPSQTGRRRLTAARSYLLAPSSTPRSTTPRRRSLCSSSVRLG

SEQ ID NO: 31909 - DNA, 465 bp, Zea mays subsp. mays
  misc_feature (1)..(465): Ceres Seq. ID no. 12345496
atgggcaggattatcaactctgacgaggtgcagtctgtggttaagccactcaacaaggaggtgaagcgcagggagaagaggaagaacccgctcacgaacatggctgctgtgctcaagctgaacccctacctcggcactgcccggaagatggccacccttgctgaggctgcccgagtcaaggcccggaaggagaagcttgattccaagaggaccaagcttacctcggaggagactgccaaggtcaaggctgccggcaaggcgtggtacaagaccatgatctcggacagtgactacaccgagtttgagaacttcaccaagtggctcggagtgacgcagtgaagcggcctttgagacctagttaagttttgattagttgtgtcgctgaacttgtattgagacgaaatagtattttatcaatctgtcttatcctgcatcttcacaacaagttacctatctgtggactct

SEQ ID NO: 31910 - protein, 112 aa, Zea mays subsp. mays
  peptide (1)..(112): Ceres Seq. ID no. 12345497
  misc_feature (1)..(112): NCBI GI NO: 34393487 NR Description: putative 60S ribosomal protein L4/L1
  misc_feature (1)..(112): NCBI GI NO: 34897236 NR Description: putative 60S ribosomal protein L1
  misc_feature (1)..(112): NCBI GI NO: 15232723 NR Description: putative 60S ribosomal protein L1
  misc_feature (1)..(112): NCBI GI NO: 21593543 NR Description: 60S ribosomal protein L4-B (L1)
  misc_feature (1)..(112): NCBI GI NO: 17367847 NR Description: 60S ribosomal protein L4 (L1)
  misc_feature (1)..(112): NCBI GI NO: 13605831 NR Description: AT5g02870/F9G14_180 [Arabidopsis thaliana]
  misc_feature (1)..(112): NCBI GI NO: 15242558 NR Description: 60S ribosomal protein - like; protein id:At5g02870
  misc_feature (1)..(112): NCBI GI NO: 26450328 NR Description: putative 60S ribosomal protein
  misc_feature (17)..(112): NCBI GI NO: 25403525 NR Description: probable 60S ribosomal protein
  misc_feature (3)..(112): NCBI GI NO: 6441068 NR Description: 60S ribosomal protein L4 [Chlamydomonas sp. HS-5]
MGRIINSDEVQSVVKPLNKEVKRREKRKNPLTNMAAVLKLNPYLGTARKMATLAEAARVKARKEKLDSKRTKLTSEETAKVKAAGKAWYKTMISDSDYTEFENFTKWLGVTQ

SEQ ID NO: 31911 - protein, 79 aa, Zea mays subsp. mays
  peptide (1)..(79): Ceres Seq. ID no. 12345498
  misc_feature (1)..(79): NCBI GI NO: 34393487 NR Description: putative 60S ribosomal protein L4/L1
  misc_feature (1)..(79): NCBI GI NO: 34897236 NR Description: putative 60S ribosomal protein L1
  misc_feature (1)..(79): NCBI GI NO: 15232723 NR Description: putative 60S ribosomal protein L1
  misc_feature (1)..(79): NCBI GI NO: 21593543 NR Description: 60S ribosomal protein L4-B (L1)
  misc_feature (1)..(79): NCBI GI NO: 17367847 NR Description: 60S ribosomal protein L4 (L1)
  misc_feature (1)..(79): NCBI GI NO: 13605831 NR Description: AT5g02870/F9G14_180 [Arabidopsis thaliana]
  misc_feature (1)..(79): NCBI GI NO: 15242558 NR Description: 60S ribosomal protein - like; protein id:At5g02870
  misc_feature (1)..(79): NCBI GI NO: 26450328 NR Description: putative 60S ribosomal protein
  misc_feature (1)..(79): NCBI GI NO: 25403525 NR Description: probable 60S ribosomal protein
  misc_feature (1)..(79): NCBI GI NO: 6441068 NR Description: 60S ribosomal protein L4 [Chlamydomonas sp. HS-5]
MAAVLKLNPYLGTARKMATLAEAARVKARKEKLDSKRTKLTSEETAKVKAAGKAWYKTMISDSDYTEFENFTKWLGVTQ

SEQ ID NO: 31912 - protein, 63 aa, Zea mays subsp. mays
  peptide (1)..(63): Ceres Seq. ID no. 12345499
  misc_feature (1)..(63): NCBI GI NO: 34393487 NR Description: putative 60S ribosomal protein L4/L1
  misc_feature (1)..(63): NCBI GI NO: 34897236 NR Description: putative 60S ribosomal protein L1
  misc_feature (1)..(63): NCBI GI NO: 15232723 NR Description: putative 60S ribosomal protein L1
  misc_feature (1)..(63): NCBI GI NO: 21593543 NR Description: 60S ribosomal protein L4-B (L1)
  misc_feature (1)..(63): NCBI GI NO: 17367847 NR Description: 60S ribosomal protein L4 (L1)
  misc_feature (1)..(63): NCBI GI NO: 13605831 NR Description: AT5g02870/F9G14_180 [Arabidopsis thaliana]
  misc_feature (1)..(63): NCBI GI NO: 15242558 NR Description: 60S ribosomal protein - like; protein id:At5g02870
  misc_feature (1)..(63): NCBI GI NO: 26450328 NR Description: putative 60S ribosomal protein
  misc_feature (1)..(63): NCBI GI NO: 25403525 NR Description: probable 60S ribosomal protein
  misc_feature (1)..(63): NCBI GI NO: 6441068 NR Description: 60S ribosomal protein L4 [Chlamydomonas sp. HS-5]
MATLAEAARVKARKEKLDSKRTKLTSEETAKVKAAGKAWYKTMISDSDYTEFENFTKWLGVTQ

SEQ ID NO: 31913 - DNA, 763 bp, Zea mays subsp. mays
  misc_feature (1)..(763): Ceres Seq. ID no. 12358030
ctagaacgccgccgccagtcctcactcctcaccatttcccaaaccctacccatacccccgccgccgccgccatgccgcccaagctcgacccgtcgcaggtggtggaggtcttcgtccgggtgacgggcggcgaggtcggcgcggcgtcgtccctggcgcccaagatcggcccgctcggtctctccccgaagaagatcggcgaggacattgccaaggagacggccaaggactggaagggcctgcgcgtcaccgtcaagctcactgtccagaaccgcaggccaaggtctccgtcgtcccctccgccgccgcgctcgtcatcaaggcgctcaaggagcccgagagggacaggaagaaggtcaagaacatcaagcacagcggcaacatcggcctcgacgacgtcgtcgaggatcgccaggaccatgaggaacaggtccatggccaaggagttggccggcaccgtcaaggagatcctcggcacctgcgtcagcgtcgggtgcaccgtcgacggcaaggaccccaaggacctgcagcaggagattgatgacggcgaggtcgagatcccgtccgcttgaagactagacatccgaggggacttccattggtgctgctgaagtgttgttgttctgcatgccgtcgatgtacctttttcaagcaacgtgttccatctatttttttgtctagctatgttagtgatatcttgtgagagacctcaatgttaccaccgtatctttgtctttgttggatggagagttttaagcggttc

SEQ ID NO: 31914 - protein, 189 aa, Zea mays subsp. mays
  peptide (1)..(189): Ceres Seq. ID no. 12358031
  misc_feature (36)..(94): Pfam Name: Pfam Description:  Ribosomal protein L11, N-terminal domain
  misc_feature (24)..(189): NCBI GI NO: 38567975 NR Description: OSJNBa0093F12.16
  misc_feature (24)..(187): NCBI GI NO: 40287508 NR Description: 60S ribosomal protein L12 [Capsicum annuum]
  misc_feature (24)..(187): NCBI GI NO: 15228098 NR Description: 60S ribosomal protein L12; protein id: At2g37190
  misc_feature (24)..(187): NCBI GI NO: 15231814 NR Description: 60S RIBOSOMAL PROTEIN L12 -like
  misc_feature (24)..(187): NCBI GI NO: 6094002 NR Description: 60S RIBOSOMAL PROTEIN L12
  misc_feature (24)..(188): NCBI GI NO: 15239409 NR Description: 60S ribosomal protein L12 - like
  misc_feature (24)..(187): NCBI GI NO: 19075397 NR Description: 60s ribosomal protein l12
  misc_feature (33)..(189): NCBI GI NO: 1710485 NR Description: 60S RIBOSOMAL PROTEIN L12
  misc_feature (24)..(165): NCBI GI NO: 3986695 NR Description: ribosomal protein L12 [Cichorium intybus]
  misc_feature (24)..(189): NCBI GI NO: 27371046 NR Description: Similar to ribosomal protein L12 [Xenopus laevis]
RTPPPVLTPHHFPNPTHTPAAAAMPPKLDPSQVVEVFVRVTGGEVGAASSLAPKIGPLGLSPKKIGEDIAKETAKDWKGLRVTVKLTVQNRRPRSPSSPPPPRSSSRRSRSPRGTGRRSRTSSTAATSASTTSSRIARTMRNRSMAKELAGTVKEILGTCVSVGCTVDGKDPKDLQQEIDDGEVEIPSA

SEQ ID NO: 31915 - protein, 166 aa, Zea mays subsp. mays
  peptide (1)..(166): Ceres Seq. ID no. 12358032
  misc_feature (13)..(71): Pfam Name: Pfam Description:  Ribosomal protein L11, N-terminal domain
  misc_feature (1)..(166): NCBI GI NO: 38567975 NR Description: OSJNBa0093F12.16
  misc_feature (1)..(164): NCBI GI NO: 40287508 NR Description: 60S ribosomal protein L12 [Capsicum annuum]
  misc_feature (1)..(164): NCBI GI NO: 15228098 NR Description: 60S ribosomal protein L12; protein id: At2g37190
  misc_feature (1)..(164): NCBI GI NO: 15231814 NR Description: 60S RIBOSOMAL PROTEIN L12 -like
  misc_feature (1)..(164): NCBI GI NO: 6094002 NR Description: 60S RIBOSOMAL PROTEIN L12
  misc_feature (1)..(165): NCBI GI NO: 15239409 NR Description: 60S ribosomal protein L12 - like
  misc_feature (1)..(164): NCBI GI NO: 19075397 NR Description: 60s ribosomal protein l12
  misc_feature (10)..(166): NCBI GI NO: 1710485 NR Description: 60S RIBOSOMAL PROTEIN L12
  misc_feature (1)..(142): NCBI GI NO: 3986695 NR Description: ribosomal protein L12 [Cichorium intybus]
  misc_feature (1)..(166): NCBI GI NO: 27371046 NR Description: Similar to ribosomal protein L12 [Xenopus laevis]
MPPKLDPSQVVEVFVRVTGGEVGAASSLAPKIGPLGLSPKKIGEDIAKETAKDWKGLRVTVKLTVQNRRPRSPSSPPPPRSSSRRSRSPRGTGRRSRTSSTAATSASTTSSRIARTMRNRSMAKELAGTVKEILGTCVSVGCTVDGKDPKDLQQEIDDGEVEIPSA

SEQ ID NO: 31916 - DNA, 1346 bp, Zea mays subsp. mays; identical to SEQ ID NO: 26686
  misc_feature (1)..(1346): Ceres Seq. ID no. 12379321

SEQ ID NO: 31917 - protein, 222 aa, Zea mays subsp. mays; identical to SEQ ID NO: 26687
  peptide (1)..(222): Ceres Seq. ID no. 12379322
  misc_feature (22)..(203): Pfam Name: Pfam Description:  SNF7
  misc_feature (3)..(222): NCBI GI NO: 15233464 NR Description: putative protein; protein id: At4g29160
  misc_feature (5)..(222): NCBI GI NO: 21594892 NR Description: copia-like retroelement pol polyprotein
  misc_feature (3)..(222): NCBI GI NO: 15224854 NR Description: copia-like retroelement pol polyprotein
  misc_feature (1)..(218): NCBI GI NO: 28277855 NR Description: Unknown (protein for MGC:56112) [Danio rerio]
  misc_feature (1)..(217): NCBI GI NO: 28077049 NR Description: RIKEN cDNA 2010012F05 [Mus musculus]
  misc_feature (1)..(217): NCBI GI NO: 28827795 NR Description: chromosome 20 open reading frame 178
  misc_feature (1)..(212): NCBI GI NO: 28278647 NR Description: Similar to RIKEN cDNA 2010012F05 gene
  misc_feature (1)..(219): NCBI GI NO: 40548422 NR Description: Snf7 homologue associated with Alix 2
  misc_feature (1)..(219): NCBI GI NO: 13182765 NR Description: CDA04 [Homo sapiens]
  misc_feature (25)..(213): NCBI GI NO: 28828571 NR Description: hypothetical protein [Dictyostelium discoideum]

SEQ ID NO: 31918 - protein, 220 aa, Zea mays subsp. mays; identical to SEQ ID NO: 26688
  peptide (1)..(220): Ceres Seq. ID no. 12379323
  misc_feature (20)..(201): Pfam Name: Pfam Description:  SNF7
  misc_feature (1)..(220): NCBI GI NO: 15233464 NR Description: putative protein; protein id: At4g29160
  misc_feature (3)..(220): NCBI GI NO: 21594892 NR Description: copia-like retroelement pol polyprotein
  misc_feature (1)..(220): NCBI GI NO: 15224854 NR Description: copia-like retroelement pol polyprotein
  misc_feature (1)..(216): NCBI GI NO: 28277855 NR Description: Unknown (protein for MGC:56112) [Danio rerio]
  misc_feature (1)..(215): NCBI GI NO: 28077049 NR Description: RIKEN cDNA 2010012F05 [Mus musculus]
  misc_feature (1)..(215): NCBI GI NO: 28827795 NR Description: chromosome 20 open reading frame 178
  misc_feature (1)..(210): NCBI GI NO: 28278647 NR Description: Similar to RIKEN cDNA 2010012F05 gene
  misc_feature (1)..(217): NCBI GI NO: 40548422 NR Description: Snf7 homologue associated with Alix 2
  misc_feature (1)..(217): NCBI GI NO: 13182765 NR Description: CDA04 [Homo sapiens]
  misc_feature (23)..(211): NCBI GI NO: 28828571 NR Description: hypothetical protein [Dictyostelium discoideum]

SEQ ID NO: 31919 - protein, 191 aa, Zea mays subsp. mays; identical to SEQ ID NO: 26689
  peptide (1)..(191): Ceres Seq. ID no. 12379324
  misc_feature (1)..(172): Pfam Name: Pfam Description:  SNF7
  misc_feature (1)..(191): NCBI GI NO: 15233464 NR Description: putative protein; protein id: At4g29160
  misc_feature (1)..(191): NCBI GI NO: 21594892 NR Description: copia-like retroelement pol polyprotein
  misc_feature (1)..(191): NCBI GI NO: 15224854 NR Description: copia-like retroelement pol polyprotein
  misc_feature (1)..(187): NCBI GI NO: 28277855 NR Description: Unknown (protein for MGC:56112) [Danio rerio]
  misc_feature (1)..(186): NCBI GI NO: 28077049 NR Description: RIKEN cDNA 2010012F05 [Mus musculus]
  misc_feature (1)..(186): NCBI GI NO: 28827795 NR Description: chromosome 20 open reading frame 178
  misc_feature (1)..(181): NCBI GI NO: 28278647 NR Description: Similar to RIKEN cDNA 2010012F05 gene
  misc_feature (1)..(188): NCBI GI NO: 40548422 NR Description: Snf7 homologue associated with Alix 2
  misc_feature (1)..(188): NCBI GI NO: 13182765 NR Description: CDA04 [Homo sapiens]
  misc_feature (1)..(182): NCBI GI NO: 28828571 NR Description: hypothetical protein [Dictyostelium discoideum]

SEQ ID NO: 31920 - DNA, 696 bp, Zea mays subsp. mays
  misc_feature (1)..(696): Ceres Seq. ID no. 12400658
gcatccacgctcgattcggccgttttccgcatccacggagccaggcgaccgccgccgcttccctactcacccttggccggcgacgacgagcgccaccacggcaggatgacgacgctgaggaacctcaagatcaagacgtcgacgtgcaagaggatcgtgaaggagctgcgctcgtacgagaaggaggtggagaaggaggcggccaagaccgccgacatgaaggagaagggcgctgatccctacgacctcaaacagcaggagaatgttttggctgagtcaaggatgatggtcccagactgccacaaacgacttgaaactgcactggctgacttgaaagcaacactggctgaactgaaggagtcaaatgagcaaggtgccgagattggagaagctgagagtacaatcgcagaagttgaagcagttgtcaagccagcagaagattaaactaaaaaaactcttggtttgctgaactgttagcgcacatcctattttcgcatattgagcccttgtgagcttattacgagatgtttgaggcgtgaaatcctgtaccattatcatcacttctatcttgaaatttgagtttctgttcccaagttctaagcgttactgtttgttgtctgggagagcgcacatccctggcttctccgggaagttgttagtgtaaattgaaattaagaaaaatggacgaatttgaat

SEQ ID NO: 31921 - protein, 147 aa, Zea mays subsp. mays
  peptide (1)..(147): Ceres Seq. ID no. 12400659
  misc_feature (41)..(134): Pfam Name: Pfam Description:  Tubulin binding cofactor A
  misc_feature (36)..(147): NCBI GI NO: 18402340 NR Description: TCP1-chaperonin cofactor A isolog
  misc_feature (36)..(115): NCBI GI NO: 25408070 NR Description: probable TCP1-chaperonin cofactor A
  misc_feature (39)..(139): NCBI GI NO: 1711660 NR Description: TUBULIN-SPECIFIC CHAPERONE A
  misc_feature (39)..(139): NCBI GI NO: 4759212 NR Description: beta-tubulin cofactor A [Homo sapiens]
  misc_feature (39)..(139): NCBI GI NO: 30585151 NR Description: Homo sapiens tubulin-specific chaperone a
  misc_feature (39)..(139): NCBI GI NO: 28461233 NR Description: tubulin cofactor a [Bos taurus]
  misc_feature (39)..(139): NCBI GI NO: 1711661 NR Description: TUBULIN-SPECIFIC CHAPERONE A
  misc_feature (39)..(139): NCBI GI NO: 6678225 NR Description: tubulin cofactor a
  misc_feature (39)..(139): NCBI GI NO: 21706425 NR Description: Unknown (protein for IMAGE:4209187) [Mus musculus]
  misc_feature (39)..(139): NCBI GI NO: 28278465 NR Description: Unknown (protein for MGC:56262) [Danio rerio]
ASTLDSAVFRIHGARRPPPLPYSPLAGDDERHHGRMTTLRNLKIKTSTCKRIVKELRSYEKEVEKEAAKTADMKEKGADPYDLKQQENVLAESRMMVPDCHKRLETALADLKATLAELKESNEQGAEIGEAESTIAEVEAVVKPAED

SEQ ID NO: 31922 - protein, 112 aa, Zea mays subsp. mays
  peptide (1)..(112): Ceres Seq. ID no. 12400660
  misc_feature (6)..(99): Pfam Name: Pfam Description:  Tubulin binding cofactor A
  misc_feature (1)..(112): NCBI GI NO: 18402340 NR Description: TCP1-chaperonin cofactor A isolog
  misc_feature (1)..(80): NCBI GI NO: 25408070 NR Description: probable TCP1-chaperonin cofactor A
  misc_feature (4)..(104): NCBI GI NO: 1711660 NR Description: TUBULIN-SPECIFIC CHAPERONE A
  misc_feature (4)..(104): NCBI GI NO: 4759212 NR Description: beta-tubulin cofactor A [Homo sapiens]
  misc_feature (4)..(104): NCBI GI NO: 30585151 NR Description: Homo sapiens tubulin-specific chaperone a
  misc_feature (4)..(104): NCBI GI NO: 28461233 NR Description: tubulin cofactor a [Bos taurus]
  misc_feature (4)..(104): NCBI GI NO: 1711661 NR Description: TUBULIN-SPECIFIC CHAPERONE A
  misc_feature (4)..(104): NCBI GI NO: 21706425 NR Description: Unknown (protein for IMAGE:4209187) [Mus musculus]
  misc_feature (4)..(104): NCBI GI NO: 6678225 NR Description: tubulin cofactor a
  misc_feature (4)..(104): NCBI GI NO: 28278465 NR Description: Unknown (protein for MGC:56262) [Danio rerio]
MTTLRNLKIKTSTCKRIVKELRSYEKEVEKEAAKTADMKEKGADPYDLKQQENVLAESRMMVPDCHKRLETALADLKATLAELKESNEQGAEIGEAESTIAEVEAVVKPAED

SEQ ID NO: 31923 - protein, 77 aa, Zea mays subsp. mays
  peptide (1)..(77): Ceres Seq. ID no. 12400661
IHARFGRFPHPRSQATAAASLLTLGRRRRAPPRQDDDAEEPQDQDVDVQEDREGAALVREGGGEGGGQDRRHEGEGR

SEQ ID NO: 31924 - DNA, 717 bp, Zea mays subsp. mays
  misc_feature (1)..(717): Ceres Seq. ID no. 12400650
aaccagcctccaccccatcaaccctacctaggcgccgccgccgccgcaggcggcccccgcatcgtcggcaagatgcagatctttgtgaagactctgacggggaagaccatcactttggaggtggagtcctcggacaccatcgacaatgtgaaggccaagatccaggacaaggagggcatccccccggaccagcagcggctcatcttcgccggcaagcagctcgaggacggtcgcaccctcgccgactacaacatccagaaggagtccaccctccacctggtgctccgcctccgcggcggcgccaagaagcgtaagaagaagacgtacaccaagcccaagaagatcaagcacaagcacaagaaggtgaagctctccgtgctgcagttctataaggtggacgacaccactagcaaggtgacccgcctccgcaaggagtgccccaactcagagtgcggcgcgggcgtcttcatggccaaccacttcgaccgccactactgcggcaagtgcggcctcacctatgtctacaaccagaaggcgtaattgcttgccccgatttgctttatccgcctaccctatcgagcatccagctgttggttactcgaactgtatctcatgtagatctgtctgaggttgaaacttaaatggagcagtagtatctgacatattggtacccctgttactgaattgacgtgatgctgagtttaattttgttttcgg

SEQ ID NO: 31925 - protein, 179 aa, Zea mays subsp. mays
  peptide (1)..(179): Ceres Seq. ID no. 12400651
  misc_feature (25)..(98): Pfam Name: Pfam Description:  Ubiquitin family
  misc_feature (25)..(179): NCBI GI NO: 902525 NR Description: ubiquitin fusion protein
  misc_feature (25)..(179): NCBI GI NO: 82733 NR Description: ubiquitin / ribosomal protein S27a - maize
  misc_feature (25)..(179): NCBI GI NO: 100599 NR Description: ubiquitin / ribosomal protein S27a.2 - barley
  misc_feature (25)..(179): NCBI GI NO: 100598 NR Description: ubiquitin / ribosomal protein S27a.1 - barley
  misc_feature (25)..(179): NCBI GI NO: 34894792 NR Description: ubiquitin / ribosomal protein S27a
  misc_feature (25)..(179): NCBI GI NO: 1044940 NR Description: fusion gene [Zea mays]
  misc_feature (25)..(177): NCBI GI NO: 34581769 NR Description: ubiquitin extension protein [Cucumis sativus]
  misc_feature (25)..(179): NCBI GI NO: 18252349 NR Description: ubiquitin extension protein [Pyrus communis]
  misc_feature (25)..(177): NCBI GI NO: 279636 NR Description: ubiquitin / ribosomal protein S27a - tomato
  misc_feature (25)..(179): NCBI GI NO: 541953 NR Description: ubiquitin/ribosomal protein S27a fusion protein -white lupine
NQPPPHQPYLGAAAAAGGPRIVGKMQIFVKTLTGKTITLEVESSDTIDNVKAKIQDKEGIPPDQQRLIFAGKQLEDGRTLADYNIQKESTLHLVLRLRGGAKKRKKKTYTKPKKIKHKHKKVKLSVLQFYKVDDTTSKVTRLRKECPNSECGAGVFMANHFDRHYCGKCGLTYVYNQKA

SEQ ID NO: 31926 - protein, 155 aa, Zea mays subsp. mays
  peptide (1)..(155): Ceres Seq. ID no. 12400652
  misc_feature (1)..(74): Pfam Name: Pfam Description:  Ubiquitin family
  misc_feature (1)..(155): NCBI GI NO: 902525 NR Description: ubiquitin fusion protein
  misc_feature (1)..(155): NCBI GI NO: 82733 NR Description: ubiquitin / ribosomal protein S27a - maize
  misc_feature (1)..(155): NCBI GI NO: 100599 NR Description: ubiquitin / ribosomal protein S27a.2 - barley
  misc_feature (1)..(155): NCBI GI NO: 100598 NR Description: ubiquitin / ribosomal protein S27a.1 - barley
  misc_feature (1)..(155): NCBI GI NO: 34894792 NR Description: ubiquitin / ribosomal protein S27a
  misc_feature (1)..(155): NCBI GI NO: 1044940 NR Description: fusion gene [Zea mays]
  misc_feature (1)..(153): NCBI GI NO: 34581769 NR Description: ubiquitin extension protein [Cucumis sativus]
  misc_feature (1)..(155): NCBI GI NO: 18252349 NR Description: ubiquitin extension protein [Pyrus communis]
  misc_feature (1)..(153): NCBI GI NO: 279636 NR Description: ubiquitin / ribosomal protein S27a - tomato
  misc_feature (1)..(155): NCBI GI NO: 541953 NR Description: ubiquitin/ribosomal protein S27a fusion protein -white lupine
MQIFVKTLTGKTITLEVESSDTIDNVKAKIQDKEGIPPDQQRLIFAGKQLEDGRTLADYNIQKESTLHLVLRLRGGAKKRKKKTYTKPKKIKHKHKKVKLSVLQFYKVDDTTSKVTRLRKECPNSECGAGVFMANHFDRHYCGKCGLTYVYNQKA

SEQ ID NO: 31927 - protein, 103 aa, Zea mays subsp. mays
  peptide (1)..(103): Ceres Seq. ID no. 12400653
PASTPSTLPRRRRRRRRPPHRRQDADLCEDSDGEDHHFGGGVLGHHRQCEGQDPGQGGHPPGPAAAHLRRQAARGRSHPRRLQHPEGVHPPPGAPPPRRRQEA

SEQ ID NO: 31928 - DNA, 764 bp, Zea mays subsp. mays
  misc_feature (1)..(764): Ceres Seq. ID no. 12341984
taaagttcagcagtgatggcaggcggattctgttaaccactaaagctggacgtgtccatgtgctagattcattccatggcaatagcattgcgtcgtgcaatgtgaagccagtggtaaccaactcaacactggaggcgtcgttcagccctgatggaaaccatatcatatctggctccggtgacggtagtgtttatgcttggaatgttaggagtggaaaggtcgcgcgctggggaagcacagacgacgaaccgccgctggtaaggtgggctccaggatccttgatgttcgtgacaggatcatcagaactgtcatgctgggttccggacctgtctaagctgggatcctttaccattagcaagtaggtgaaaatgataagaggtggactgcccttgcaaaccctgctcgtccctgtatgctctgtcgtgtggctactcatcctttagccaggtggccgtggtaaacttgcaacctgttacaattgaatgactcgtgtagagcatcggcagtggcgatctggcttctgaagccagcggctagacaatgaagatggatccatgctttagttctgtaaaccggagattgtagctgagtattgctgcatctccttgtttctggaaggcatcttggctcgtaaagattctgcaactcagaccagatggctaatatagagagagcaaagaaacaatggatagctgggctgcttgttctgttttcagttggattccttgaactgatgtgtgattccgttgtgcatgcaccgattc

SEQ ID NO: 31929 - protein, 119 aa, Zea mays subsp. mays
  peptide (1)..(119): Ceres Seq. ID no. 12341985
  misc_feature (1)..(119): NCBI GI NO: 28564824 NR Description: OSJNBb0005G07.13
  misc_feature (1)..(119): NCBI GI NO: 18425050 NR Description: WD repeat protein-like; protein id: At5g66240
  misc_feature (1)..(119): NCBI GI NO: 30698206 NR Description: transducin / WD-40 repeat protein family
  misc_feature (1)..(119): NCBI GI NO: 21536827 NR Description: WD repeat protein-like [Arabidopsis thaliana]
  misc_feature (1)..(108): NCBI GI NO: 15241434 NR Description: putative protein; protein id: At5g14530
  misc_feature (1)..(107): NCBI GI NO: 19920938 NR Description: CG17293-PA [Drosophila melanogaster]
  misc_feature (1)..(109): NCBI GI NO: 18676851 NR Description: unnamed protein product [Homo sapiens]
  misc_feature (1)..(109): NCBI GI NO: 28277563 NR Description: Similar to RIKEN cDNA 9430077D24 gene
  misc_feature (1)..(107): NCBI GI NO: 31232763 NR Description: ENSANGP00000013183 [Anopheles gambiae]
  misc_feature (1)..(109): NCBI GI NO: 17512281 NR Description: Unknown (protein for IMAGE:3596090) [Mus musculus]
KFSSDGRRILLTTKAGRVHVLDSFHGNSIASCNVKPVVTNSTLEASFSPDGNHIISGSGDGSVYAWNVRSGKVARWGSTDDEPPLVRWAPGSLMFVTGSSELSCWVPDLSKLGSFTISK

SEQ ID NO: 31930 - DNA, 776 bp, Zea mays subsp. mays
  misc_feature (1)..(776): Ceres Seq. ID no. 12400260
agcaagcaaagattgcgccggtgagggtgttcgggacggcggacttcgtgaacgctgcgagggttatggcttgcctggaggaagttggcgtggagtacgaggtcgtcgaggtcgactacgcggccatggagcacaagggcgcccagcacctcgcaagaaacccgttcggccaaatcccagcgtttcaggacggggacacgatgctctttgaatcccgagcaatcgccaagtacgtgctccgcaaatactccaagtcagctcaagtcgacctgctccgtgagggcaacccggaggaagccgccatggtagacgtgtggacggaggtcgaggcgcacacctacctacccggccatcgcgcccatcttctacgagtacgtggtgtaccccgccgagcatggcaccacgcccaaccaggaggtggtggacgagagtgtggagaggctcaggaaggtcctcgacgtctacgaggcgcacctgtacaagaccaagcagctctatctcgccggggactacttcagcctcgccgatctcaaccacgtcccgtacaccttccacctcatgaggacaccgcacgcgtcgctcttcgaggcgtatcctcacgttaaggcctggtgggagagagttatagcacgcccgtcgctgcagaagctcgccccggatatggtgatcaaagcctgattgcacgtacctttgtatcatcagattcttccttggggtgtatatatgcaaggggtacctttcttgcaaaataaataaagaaataaataaatccgatc

SEQ ID NO: 31931 - protein, 200 aa, Zea mays subsp. mays
  peptide (1)..(200): Ceres Seq. ID no. 12400261
  misc_feature (4)..(115): NCBI GI NO: 18479038 NR Description: glutathione transferase
  misc_feature (4)..(115): NCBI GI NO: 22022400 NR Description: glutathione-S-transferase 19E50
  misc_feature (4)..(115): NCBI GI NO: 23504747 NR Description: glutathione transferase F6 [Triticum aestivum]
  misc_feature (4)..(115): NCBI GI NO: 25287116 NR Description: glutathione transferase (EC 2.5.1.18) GST2a
  misc_feature (4)..(113): NCBI GI NO: 34914764 NR Description: putative glutathione S-transferase
  misc_feature (4)..(115): NCBI GI NO: 25287117 NR Description: glutathione transferase (EC 2.5.1.18) GST2b
  misc_feature (4)..(115): NCBI GI NO: 25287118 NR Description: glutathione transferase (EC 2.5.1.18) GST2c
  misc_feature (4)..(115): NCBI GI NO: 25287121 NR Description: glutathione transferase (EC 2.5.1.18) GST2d
  misc_feature (4)..(115): NCBI GI NO: 34914744 NR Description: putative glutathione transferase
  misc_feature (7)..(115): NCBI GI NO: 1170092 NR Description: GLUTATHIONE S-TRANSFERASE IV
QAKIAPVRVFGTADFVNAARVMACLEEVGVEYEVVEVDYAAMEHKGAQHLARNPFGQIPAFQDGDTMLFESRAIAKYVLRKYSKSAQVDLLREGNPEEAAMVDVWTEVEAHTYLPGHRAHLLRVRGVPRRAWHHAQPGGGGRECGEAQEGPRRLRGAPVQDQAALSRRGLLQPRRSQPRPVHLPPHEDTARVALRGVSSR

SEQ ID NO: 31932 - protein, 179 aa, Zea mays subsp. mays
  peptide (1)..(179): Ceres Seq. ID no. 12400262
  misc_feature (1)..(94): NCBI GI NO: 18479038 NR Description: glutathione transferase
  misc_feature (1)..(94): NCBI GI NO: 22022400 NR Description: glutathione-S-transferase 19E50
  misc_feature (1)..(94): NCBI GI NO: 23504747 NR Description: glutathione transferase F6 [Triticum aestivum]
  misc_feature (1)..(94): NCBI GI NO: 25287116 NR Description: glutathione transferase (EC 2.5.1.18) GST2a
  misc_feature (1)..(92): NCBI GI NO: 34914764 NR Description: putative glutathione S-transferase
  misc_feature (1)..(94): NCBI GI NO: 25287117 NR Description: glutathione transferase (EC 2.5.1.18) GST2b
  misc_feature (1)..(94): NCBI GI NO: 25287118 NR Description: glutathione transferase (EC 2.5.1.18) GST2c
  misc_feature (1)..(94): NCBI GI NO: 25287121 NR Description: glutathione transferase (EC 2.5.1.18) GST2d
  misc_feature (1)..(94): NCBI GI NO: 34914744 NR Description: putative glutathione transferase
  misc_feature (1)..(94): NCBI GI NO: 1170092 NR Description: GLUTATHIONE S-TRANSFERASE IV
MACLEEVGVEYEVVEVDYAAMEHKGAQHLARNPFGQIPAFQDGDTMLFESRAIAKYVLRKYSKSAQVDLLREGNPEEAAMVDVWTEVEAHTYLPGHRAHLLRVRGVPRRAWHHAQPGGGGRECGEAQEGPRRLRGAPVQDQAALSRRGLLQPRRSQPRPVHLPPHEDTARVALRGVSSR

SEQ ID NO: 31933 - protein, 159 aa, Zea mays subsp. mays
  peptide (1)..(159): Ceres Seq. ID no. 12400263
  misc_feature (1)..(74): NCBI GI NO: 18479038 NR Description: glutathione transferase
  misc_feature (1)..(74): NCBI GI NO: 22022400 NR Description: glutathione-S-transferase 19E50
  misc_feature (1)..(74): NCBI GI NO: 23504747 NR Description: glutathione transferase F6 [Triticum aestivum]
  misc_feature (1)..(74): NCBI GI NO: 25287116 NR Description: glutathione transferase (EC 2.5.1.18) GST2a
  misc_feature (1)..(72): NCBI GI NO: 34914764 NR Description: putative glutathione S-transferase
  misc_feature (1)..(74): NCBI GI NO: 25287117 NR Description: glutathione transferase (EC 2.5.1.18) GST2b
  misc_feature (1)..(74): NCBI GI NO: 25287118 NR Description: glutathione transferase (EC 2.5.1.18) GST2c
  misc_feature (1)..(74): NCBI GI NO: 25287121 NR Description: glutathione transferase (EC 2.5.1.18) GST2d
  misc_feature (1)..(74): NCBI GI NO: 34914744 NR Description: putative glutathione transferase
  misc_feature (1)..(74): NCBI GI NO: 1170092 NR Description: GLUTATHIONE S-TRANSFERASE IV
MEHKGAQHLARNPFGQIPAFQDGDTMLFESRAIAKYVLRKYSKSAQVDLLREGNPEEAAMVDVWTEVEAHTYLPGHRAHLLRVRGVPRRAWHHAQPGGGGRECGEAQEGPRRLRGAPVQDQAALSRRGLLQPRRSQPRPVHLPPHEDTARVALRGVSSR

SEQ ID NO: 31934 - DNA, 979 bp, Zea mays subsp. mays
  misc_feature (1)..(979): Ceres Seq. ID no. 12400717
cgattccgcccgcgtccgcggacccagatctggcgcccgcgcccatggcgacgcgcaggcgaatgctcctcaaggtcatcatcctcggcgacagcggggtcggcaagacctcgctgatgaaccagtacgtcaacaacaggttcagcaaccagtacaaggccaccatcggcgcggatttcctcaccaaggaggtccagatcgacgaccgcctcttcacactgcagatatgggatacggcaggacaggagcggtttcaaagtcttggtgtggcattttataggggagctgactgctgtgttcttgtatatgatgtcaacgtatccaagtcatttgaaaagctcaacaactggcgtgaggaattcctaattcaagccagcccatcagacccagagaatttcccatttgttgtgcttggtaacaagatcgatgttgatggtggtaacagccggactgtttctgagaagaaggctaaagcatggtgtgcttcaaagggaaacatcccctactttgagacgtcggctaaagagggcttcaatgtagaggctgcatttgagtgtatagcgaggaatgctgtaaaaaatgagccagaagaagatatgtatcttcctgatacgattgatgttgggggcgctggaaggcaacaacgttcgtcaggttgtgaatgctagaagatatggagcactgcgatttgctcggttggttggtctgattctctagggcttgtttgggtggcctgtgtcatttcatatatgtatttagtttgcaaaactgctatttgtggacactggatagtttggaagtctgcatgcgggtgcttattgtcgactcccgtgtagatgcagagaactcatttgtaactaccgtttcggtgttgtatcgtatctgcgctagatgctagtgttgtagcgcttttgattgttgatggattgcatatatgtactatatttgtacatgaacagaacgtagtgcccattttcat

SEQ ID NO: 31935 - protein, 221 aa, Zea mays subsp. mays
  peptide (1)..(221): Ceres Seq. ID no. 12400718
  misc_feature (24)..(192): Pfam Name: Pfam Description:  Ras family
  misc_feature (15)..(221): NCBI GI NO: 1370188 NR Description: RAB7D [Lotus japonicus]
  misc_feature (15)..(199): NCBI GI NO: 34904236 NR Description: RAS-related GTP-binding protein Rab7 family
  misc_feature (15)..(221): NCBI GI NO: 3914550 NR Description: RAS-RELATED PROTEIN RAB7
  misc_feature (15)..(221): NCBI GI NO: 7388049 NR Description: Ras-related protein Rab7
  misc_feature (15)..(221): NCBI GI NO: 15218194 NR Description: GTP-binding protein, putative
  misc_feature (15)..(221): NCBI GI NO: 15233284 NR Description: GTP-binding protein, putative
  misc_feature (15)..(220): NCBI GI NO: 7438407 NR Description: GTP-binding protein Rab7a - common tobacco
  misc_feature (15)..(219): NCBI GI NO: 3914557 NR Description: RAS-RELATED PROTEIN RAB7
  misc_feature (15)..(221): NCBI GI NO: 34484308 NR Description: putative GTP-binding protein [Cucumis sativus]
  misc_feature (15)..(221): NCBI GI NO: 1370186 NR Description: RAB7C [Lotus japonicus]
IPPASADPDLAPAPMATRRRMLLKVIILGDSGVGKTSLMNQYVNNRFSNQYKATIGADFLTKEVQIDDRLFTLQIWDTAGQERFQSLGVAFYRGADCCVLVYDVNVSKSFEKLNNWREEFLIQASPSDPENFPFVVLGNKIDVDGGNSRTVSEKKAKAWCASKGNIPYFETSAKEGFNVEAAFECIARNAVKNEPEEDMYLPDTIDVGGAGRQQRSSGCEC

SEQ ID NO: 31936 - protein, 207 aa, Zea mays subsp. mays; identical to SEQ ID NO: 27531
  peptide (1)..(207): Ceres Seq. ID no. 12400719
  misc_feature (10)..(178): Pfam Name: Pfam Description:  Ras family
  misc_feature (1)..(207): NCBI GI NO: 1370188 NR Description: RAB7D [Lotus japonicus]
  misc_feature (1)..(185): NCBI GI NO: 34904236 NR Description: RAS-related GTP-binding protein Rab7 family
  misc_feature (1)..(207): NCBI GI NO: 3914550 NR Description: RAS-RELATED PROTEIN RAB7
  misc_feature (1)..(207): NCBI GI NO: 7388049 NR Description: Ras-related protein Rab7
  misc_feature (1)..(207): NCBI GI NO: 15218194 NR Description: GTP-binding protein, putative
  misc_feature (1)..(207): NCBI GI NO: 15233284 NR Description: GTP-binding protein, putative
  misc_feature (1)..(206): NCBI GI NO: 7438407 NR Description: GTP-binding protein Rab7a - common tobacco
  misc_feature (1)..(205): NCBI GI NO: 3914557 NR Description: RAS-RELATED PROTEIN RAB7
  misc_feature (1)..(207): NCBI GI NO: 34484308 NR Description: putative GTP-binding protein [Cucumis sativus]
  misc_feature (1)..(207): NCBI GI NO: 1370186 NR Description: RAB7C [Lotus japonicus]

SEQ ID NO: 31937 - protein, 201 aa, Zea mays subsp. mays; identical to SEQ ID NO: 27532
  peptide (1)..(201): Ceres Seq. ID no. 12400720
  misc_feature (4)..(172): Pfam Name: Pfam Description:  Ras family
  misc_feature (1)..(201): NCBI GI NO: 1370188 NR Description: RAB7D [Lotus japonicus]
  misc_feature (1)..(179): NCBI GI NO: 34904236 NR Description: RAS-related GTP-binding protein Rab7 family
  misc_feature (1)..(201): NCBI GI NO: 3914550 NR Description: RAS-RELATED PROTEIN RAB7
  misc_feature (1)..(201): NCBI GI NO: 7388049 NR Description: Ras-related protein Rab7
  misc_feature (1)..(201): NCBI GI NO: 15218194 NR Description: GTP-binding protein, putative
  misc_feature (1)..(201): NCBI GI NO: 15233284 NR Description: GTP-binding protein, putative
  misc_feature (1)..(200): NCBI GI NO: 7438407 NR Description: GTP-binding protein Rab7a - common tobacco
  misc_feature (1)..(199): NCBI GI NO: 3914557 NR Description: RAS-RELATED PROTEIN RAB7
  misc_feature (1)..(201): NCBI GI NO: 34484308 NR Description: putative GTP-binding protein [Cucumis sativus]
  misc_feature (1)..(201): NCBI GI NO: 1370186 NR Description: RAB7C [Lotus japonicus]

SEQ ID NO: 31938 - DNA, 1280 bp, Zea mays subsp. mays; identical to SEQ ID NO: 23272
  misc_feature (1)..(1280): Ceres Seq. ID no. 12340706

SEQ ID NO: 31939 - protein, 350 aa, Zea mays subsp. mays; identical to SEQ ID NO: 23273
  peptide (1)..(350): Ceres Seq. ID no. 12340707
  misc_feature (146)..(170): Pfam Name: Pfam Description:  Zinc finger, C2H2 type
  misc_feature (48)..(346): NCBI GI NO: 21902026 NR Description: B1097D05.27
  misc_feature (53)..(291): NCBI GI NO: 18399026 NR Description: Expressed protein; protein id: At2g19385
  misc_feature (53)..(291): NCBI GI NO: 21536909 NR Description: unknown [Arabidopsis thaliana]
  misc_feature (53)..(291): NCBI GI NO: 7486241 NR Description: probable RNA-binding protein At2g19380 -Arabidopsis thaliana
  misc_feature (53)..(336): NCBI GI NO: 18399023 NR Description: RRM-containing RNA-binding protein
  misc_feature (53)..(336): NCBI GI NO: 7486241 NR Description: probable RNA-binding protein At2g19380 -Arabidopsis thaliana
  misc_feature (53)..(135): NCBI GI NO: 39581890 NR Description: Hypothetical protein CBG20151
  misc_feature (277)..(343): NCBI GI NO: 39581890 NR Description: Hypothetical protein CBG20151
  misc_feature (214)..(346): NCBI GI NO: 18399026 NR Description: Expressed protein; protein id: At2g19385
  misc_feature (214)..(346): NCBI GI NO: 21536909 NR Description: unknown [Arabidopsis thaliana]

SEQ ID NO: 31940 - protein, 298 aa, Zea mays subsp. mays; identical to SEQ ID NO: 23274
  peptide (1)..(298): Ceres Seq. ID no. 12340708
  misc_feature (94)..(118): Pfam Name: Pfam Description:  Zinc finger, C2H2 type
  misc_feature (1)..(294): NCBI GI NO: 21902026 NR Description: B1097D05.27
  misc_feature (1)..(239): NCBI GI NO: 18399026 NR Description: Expressed protein; protein id: At2g19385
  misc_feature (1)..(239): NCBI GI NO: 21536909 NR Description: unknown [Arabidopsis thaliana]
  misc_feature (1)..(239): NCBI GI NO: 7486241 NR Description: probable RNA-binding protein At2g19380 -Arabidopsis thaliana
  misc_feature (1)..(284): NCBI GI NO: 18399023 NR Description: RRM-containing RNA-binding protein
  misc_feature (1)..(284): NCBI GI NO: 7486241 NR Description: probable RNA-binding protein At2g19380 -Arabidopsis thaliana
  misc_feature (1)..(83): NCBI GI NO: 39581890 NR Description: Hypothetical protein CBG20151
  misc_feature (225)..(291): NCBI GI NO: 39581890 NR Description: Hypothetical protein CBG20151
  misc_feature (162)..(294): NCBI GI NO: 18399026 NR Description: Expressed protein; protein id: At2g19385
  misc_feature (162)..(294): NCBI GI NO: 21536909 NR Description: unknown [Arabidopsis thaliana]

SEQ ID NO: 31941 - DNA, 685 bp, Zea mays subsp. mays
  misc_feature (1)..(685): Ceres Seq. ID no. 13628874
aaacaacagcgaacacatctgcttcgcatttcttcccatcccccttcgcaacccaaaccccaactcgctccgcatcgatggcgcccaaggccgagaagaagcccgcggcgaagaagccggcggaggaggagcccgcggctgagaaggcgcccgccgggaagaagccgaaggcggagaagcgggtccccgctggcaagtccgctgccaaggagggcggcgagggcaagaggggcaggaagaagggcaagaagagcgtggagacctacaagatctacatcttcaaggtgctgaagcaggtgcacccggacattggcatctcctccaaggccatgtcgatcatgaactccttcattaacgatatcttcgagaagctagctgctgaggccgccaagctcgcgcgctataacaagaagccaaccatcacctcccgtgagatacagacttccgtgcgcctcgtccttcccggggagctcgccaagcacgccgtctccgagggcaccaaggccgtcaccaagttcacctcggcctaggctgcgctgccgccgcttgcaggattgtctcctgtgttcacgtgtattgctgtagttaggtgctgctggtttctgtctgttacccatctgtctgtagcaactttgttatctgataggaccgtaatggtgcttatttaacccagctatatgtttct

SEQ ID NO: 31942 - protein, 175 aa, Zea mays subsp. mays
  peptide (1)..(175): Ceres Seq. ID no. 13628875
  misc_feature (51)..(174): Pfam Name: Pfam Description:  Core histone H2A/H2B/H3/H4
  misc_feature (26)..(175): NCBI GI NO: 399854 NR Description: Histone H2B.2
  misc_feature (26)..(175): NCBI GI NO: 3913804 NR Description: Histone H2B.3
  misc_feature (26)..(175): NCBI GI NO: 122022 NR Description: Histone H2B
  misc_feature (26)..(175): NCBI GI NO: 399853 NR Description: Histone H2B.1
  misc_feature (26)..(175): NCBI GI NO: 1708107 NR Description: Histone H2B
  misc_feature (26)..(175): NCBI GI NO: 34895904 NR Description: putative histone H2B
  misc_feature (51)..(175): NCBI GI NO: 39595176 NR Description: Hypothetical protein CBG03777
  misc_feature (27)..(172): NCBI GI NO: 15223150 NR Description: histone H2B family [Arabidopsis thaliana]
  misc_feature (113)..(163): NCBI GI NO: 30923862 NR Description: CG40461-PA [Drosophila melanogaster]
  misc_feature (16)..(80): NCBI GI NO: 571480 NR Description: histone H1
TTANTSASHFFPSPFATQTPTRSASMAPKAEKKPAAKKPAEEEPAAEKAPAGKKPKAEKRVPAGKSAAKEGGEGKRGRKKGKKSVETYKIYIFKVLKQVHPDIGISSKAMSIMNSFINDIFEKLAAEAAKLARYNKKPTITSREIQTSVRLVLPGELAKHAVSEGTKAVTKFTSA

SEQ ID NO: 31943 - protein, 150 aa, Zea mays subsp. mays
  peptide (1)..(150): Ceres Seq. ID no. 13628876
  misc_feature (26)..(149): Pfam Name: Pfam Description:  Core histone H2A/H2B/H3/H4
  misc_feature (1)..(150): NCBI GI NO: 399854 NR Description: Histone H2B.2
  misc_feature (1)..(150): NCBI GI NO: 3913804 NR Description: Histone H2B.3
  misc_feature (1)..(150): NCBI GI NO: 122022 NR Description: Histone H2B
  misc_feature (1)..(150): NCBI GI NO: 399853 NR Description: Histone H2B.1
  misc_feature (1)..(150): NCBI GI NO: 1708107 NR Description: Histone H2B
  misc_feature (1)..(150): NCBI GI NO: 34895904 NR Description: putative histone H2B
  misc_feature (26)..(150): NCBI GI NO: 39595176 NR Description: Hypothetical protein CBG03777
  misc_feature (2)..(147): NCBI GI NO: 15223150 NR Description: histone H2B family [Arabidopsis thaliana]
  misc_feature (88)..(138): NCBI GI NO: 30923862 NR Description: CG40461-PA [Drosophila melanogaster]
  misc_feature (1)..(55): NCBI GI NO: 571480 NR Description: histone H1
MAPKAEKKPAAKKPAEEEPAAEKAPAGKKPKAEKRVPAGKSAAKEGGEGKRGRKKGKKSVETYKIYIFKVLKQVHPDIGISSKAMSIMNSFINDIFEKLAAEAAKLARYNKKPTITSREIQTSVRLVLPGELAKHAVSEGTKAVTKFTSA

SEQ ID NO: 31944 - protein, 96 aa, Zea mays subsp. mays
  peptide (1)..(96): Ceres Seq. ID no. 13628877
  misc_feature (11)..(90): Pfam Name: Pfam Description:  Sperm histone P2
  misc_feature (1)..(96): NCBI GI NO: 34784016 NR Description: Unknown (protein for MGC:63802) [Danio rerio]
  misc_feature (26)..(96): NCBI GI NO: 29250446 NR Description: GLP_39_87477_88058 [Giardia lamblia ATCC 50803]
  misc_feature (14)..(96): NCBI GI NO: 25143299 NR Description: pre-mRNA splicing SR protein related RSR-1 (68
  misc_feature (12)..(96): NCBI GI NO: 11095327 NR Description: unknown [Paracoccus pantotrophus]
  misc_feature (18)..(96): NCBI GI NO: 23274133 NR Description: Similar to serine/arginine repetitive matrix 1
  misc_feature (14)..(96): NCBI GI NO: 25143299 NR Description: pre-mRNA splicing SR protein related RSR-1 (68
  misc_feature (40)..(96): NCBI GI NO: 25143299 NR Description: pre-mRNA splicing SR protein related RSR-1 (68
KQQRTHLLRISSHPPSQPKPQLAPHRWRPRPRRSPRRRSRRRRSPRLRRRPPGRSRRRRSGSPLASPLPRRAARARGAGRRARRAWRPTRSTSSRC

SEQ ID NO: 31945 - DNA, 1710 bp, Zea mays subsp. mays
  misc_feature (1)..(1710): Ceres Seq. ID no. 13491075
gcagaaactctttgcttccgcctggctcgcgatgcttgtttgggtgcgcgggctgcggcgaggtgaggcgacggcggcgccgggcggttgcatggtggccgatggagagtagacggggagggtcgtcggcggcggcggcggaagatgcgggcggggcgatgccgagctttgggccaacgcagcacgccattcgcgcagatgtgaacagcatgcaaccttctcgagttactgactttggggcactggcacagtctgctggattccgaatagaagatcttgctaaccttaatgcaaatgctttgttcaatctgaagccaaattctcatacgattgacaacagtcctctccagtttggaaattacggaaagtctatttcttctcatataaatactacagaagcaacaacagctgcaacaagaattgaccctcagctgtcagcacagcaaacaggagcacaaccaattctggtggcgttaccaactggtaacatggagaattggggagagtcagctatggctgatagccctatgactgacacatctacagatccagacactgatgagaggaaccagatgtttgaacaaggacttgttgctgtccccacagcatctgattctagtgacaaatcaagggacaaactagatcagaagacacttcggcgtcttgcccaaaatcgtgaagctgccaggaaaagccgtttacgaaaaaaggcatacatccaaaaccttgagagtagcagactgaaacttactcagttagagcaagagcttcagcgggctcgtcaacagggtatttttatttcgacatcaggagatcaacctcaatcaacaagtggaaatggagctttggcatttgacatggagtatgcacgctggttggaggagcacaataaacatgtaaatgagttgagggctgcagtcaatgcacatgctggtgataatgatcttcgttgtattgttgatagcattatggtacattacgacgaaattttcaagctcaagggtgtggcagctaaagcagatgtttttcatgtgctgtctgggatgtggaagacccctgctgagagatgtttcatgtggttaggtggcttccggtcatctgagcttcttaagttactggcaggtcacctagagcctcttactgatcagcagcttgttggtatatccaacctgcagcagtcctcccaacaagctgaagatgctctttctcaagggatggaagcattgcaacagtcgcttgcagaaactctagcatctggatccttgggccctgctggaccttctggcaatgttgcaaattacatgggacaaatggcgatggctatgggaaaacttggcactcttgagaactttctacgacaggctgataatctacggctgcaaacacttcaacaaatgcaacgcatcttaactacccgacaatcagcacgagccctactcgcaataagtgactacttctctcggctgcgtgctttgagttctctttggcttgcccgtccaagggaataaattcaattaattcataactaggataatttttttgtactgtttctagtatggccattagtttcttcagaacgctcatgtgtcagtgagatatttggatcatattgtaggccatcatggtttactggacaactttgtaacaattttggagagaaaaaactgagttgtaaatacatctggaataatctaagatcttatgaagggg

SEQ ID NO: 31946 - protein, 501 aa, Zea mays subsp. mays
  peptide (1)..(501): Ceres Seq. ID no. 13491076
  misc_feature (212)..(275): Pfam Name: Pfam Description:  bZIP transcription factor
  misc_feature (34)..(501): NCBI GI NO: 422029 NR Description: transcription factor OBF3.2 - maize
  misc_feature (34)..(501): NCBI GI NO: 34909110 NR Description: putative transcription factor HBP-1b
  misc_feature (35)..(501): NCBI GI NO: 34921538 NR Description: Transcription factor HBP-1b(c1)
  misc_feature (171)..(501): NCBI GI NO: 422028 NR Description: transcription factor OBF3.1 - maize
  misc_feature (171)..(501): NCBI GI NO: 17025924 NR Description: bZIP transcription factor [Oryza sativa]
  misc_feature (53)..(501): NCBI GI NO: 15148926 NR Description: TGA-type basic leucine zipper protein TGA2.2
  misc_feature (47)..(501): NCBI GI NO: 15148924 NR Description: TGA-type basic leucine zipper protein TGA2.1
  misc_feature (53)..(501): NCBI GI NO: 12230709 NR Description: TGACG-sequence specific DNA-binding protein TGA-2
  misc_feature (171)..(501): NCBI GI NO: 17025922 NR Description: bZIP transcription factor [Oryza sativa]
  misc_feature (171)..(501): NCBI GI NO: 122772 NR Description: Transcription factor HBP-1b
RNSLLPPGSRCLFGCAGCGEVRRRRRRAVAWWPMESRRGGSSAAAAEDAGGAMPSFGPTQHAIRADVNSMQPSRVTDFGALAQSAGFRIEDLANLNANALFNLKPNSHTIDNSPLQFGNYGKSISSHINTTEATTAATRIDPQLSAQQTGAQPILVALPTGNMENWGESAMADSPMTDTSTDPDTDERNQMFEQGLVAVPTASDSSDKSRDKLDQKTLRRLAQNREAARKSRLRKKAYIQNLESSRLKLTQLEQELQRARQQGIFISTSGDQPQSTSGNGALAFDMEYARWLEEHNKHVNELRAAVNAHAGDNDLRCIVDSIMVHYDEIFKLKGVAAKADVFHVLSGMWKTPAERCFMWLGGFRSSELLKLLAGHLEPLTDQQLVGISNLQQSSQQAEDALSQGMEALQQSLAETLASGSLGPAGPSGNVANYMGQMAMAMGKLGTLENFLRQADNLRLQTLQQMQRILTTRQSARALLAISDYFSRLRALSSLWLARPRE

SEQ ID NO: 31947 - protein, 468 aa, Zea mays subsp. mays
  peptide (1)..(468): Ceres Seq. ID no. 13491077
  misc_feature (179)..(242): Pfam Name: Pfam Description:  bZIP transcription factor
  misc_feature (1)..(468): NCBI GI NO: 422029 NR Description: transcription factor OBF3.2 - maize
  misc_feature (1)..(468): NCBI GI NO: 34909110 NR Description: putative transcription factor HBP-1b
  misc_feature (2)..(468): NCBI GI NO: 34921538 NR Description: Transcription factor HBP-1b(c1)
  misc_feature (138)..(468): NCBI GI NO: 422028 NR Description: transcription factor OBF3.1 - maize
  misc_feature (138)..(468): NCBI GI NO: 17025924 NR Description: bZIP transcription factor [Oryza sativa]
  misc_feature (20)..(468): NCBI GI NO: 15148926 NR Description: TGA-type basic leucine zipper protein TGA2.2
  misc_feature (14)..(468): NCBI GI NO: 15148924 NR Description: TGA-type basic leucine zipper protein TGA2.1
  misc_feature (20)..(468): NCBI GI NO: 12230709 NR Description: TGACG-sequence specific DNA-binding protein TGA-2
  misc_feature (138)..(468): NCBI GI NO: 17025922 NR Description: bZIP transcription factor [Oryza sativa]
  misc_feature (138)..(468): NCBI GI NO: 122772 NR Description: Transcription factor HBP-1b
MESRRGGSSAAAAEDAGGAMPSFGPTQHAIRADVNSMQPSRVTDFGALAQSAGFRIEDLANLNANALFNLKPNSHTIDNSPLQFGNYGKSISSHINTTEATTAATRIDPQLSAQQTGAQPILVALPTGNMENWGESAMADSPMTDTSTDPDTDERNQMFEQGLVAVPTASDSSDKSRDKLDQKTLRRLAQNREAARKSRLRKKAYIQNLESSRLKLTQLEQELQRARQQGIFISTSGDQPQSTSGNGALAFDMEYARWLEEHNKHVNELRAAVNAHAGDNDLRCIVDSIMVHYDEIFKLKGVAAKADVFHVLSGMWKTPAERCFMWLGGFRSSELLKLLAGHLEPLTDQQLVGISNLQQSSQQAEDALSQGMEALQQSLAETLASGSLGPAGPSGNVANYMGQMAMAMGKLGTLENFLRQADNLRLQTLQQMQRILTTRQSARALLAISDYFSRLRALSSLWLARPRE

SEQ ID NO: 31948 - protein, 449 aa, Zea mays subsp. mays
  peptide (1)..(449): Ceres Seq. ID no. 13491078
  misc_feature (160)..(223): Pfam Name: Pfam Description:  bZIP transcription factor
  misc_feature (1)..(449): NCBI GI NO: 422029 NR Description: transcription factor OBF3.2 - maize
  misc_feature (1)..(449): NCBI GI NO: 34909110 NR Description: putative transcription factor HBP-1b
  misc_feature (1)..(449): NCBI GI NO: 34921538 NR Description: Transcription factor HBP-1b(c1)
  misc_feature (119)..(449): NCBI GI NO: 422028 NR Description: transcription factor OBF3.1 - maize
  misc_feature (119)..(449): NCBI GI NO: 17025924 NR Description: bZIP transcription factor [Oryza sativa]
  misc_feature (1)..(449): NCBI GI NO: 15148926 NR Description: TGA-type basic leucine zipper protein TGA2.2
  misc_feature (1)..(449): NCBI GI NO: 15148924 NR Description: TGA-type basic leucine zipper protein TGA2.1
  misc_feature (1)..(449): NCBI GI NO: 12230709 NR Description: TGACG-sequence specific DNA-binding protein TGA-2
  misc_feature (119)..(449): NCBI GI NO: 17025922 NR Description: bZIP transcription factor [Oryza sativa]
  misc_feature (119)..(449): NCBI GI NO: 122772 NR Description: Transcription factor HBP-1b
MPSFGPTQHAIRADVNSMQPSRVTDFGALAQSAGFRIEDLANLNANALFNLKPNSHTIDNSPLQFGNYGKSISSHINTTEATTAATRIDPQLSAQQTGAQPILVALPTGNMENWGESAMADSPMTDTSTDPDTDERNQMFEQGLVAVPTASDSSDKSRDKLDQKTLRRLAQNREAARKSRLRKKAYIQNLESSRLKLTQLEQELQRARQQGIFISTSGDQPQSTSGNGALAFDMEYARWLEEHNKHVNELRAAVNAHAGDNDLRCIVDSIMVHYDEIFKLKGVAAKADVFHVLSGMWKTPAERCFMWLGGFRSSELLKLLAGHLEPLTDQQLVGISNLQQSSQQAEDALSQGMEALQQSLAETLASGSLGPAGPSGNVANYMGQMAMAMGKLGTLENFLRQADNLRLQTLQQMQRILTTRQSARALLAISDYFSRLRALSSLWLARPRE

SEQ ID NO: 31949 - DNA, 1676 bp, Zea mays subsp. mays
  misc_feature (1)..(1676): Ceres Seq. ID no. 13577775
gctcccatttcaaaacctcttcctcctctcctcgccgcagctcccaccattcccgcagacgccttgtccccttcccagcttcccctcccccaccccgccgcacgtccgcaagccccacgccaccgtcatgtctccgaccaccaccccgccgcccgcgcccgtggcagccccgacctccaagggcgccaagcgcagcctcatgtcctcgctcatggacgccactgcgctgctccgctcctcctctttcaaggaggactcgtacgtcgcggccgcgctcccggcgtccgagctccgcgcgctcgccgacctcaaggcgctgctcgccacccacccggaccccatctccatctggggcgtcccgctgaaccctcgctcccctcccgccgcggcggacgacgccgccccggtcgacgagcgcgccgacgtggtgctcctcaagttcctccgcgcgcgggacttccgcgtccgcgacgcccacgccatggtgctccgctgcgccgcctggcgcgccgagttcggcgccgacgccgtgctggacgaggagctgggcttcaaggacctggagggcatcgtcgcctacatgcacggctgggaccgcgacggccaccccgtctgctacaacgcctacggcgtcttcaaagacagggacatgtacgagcgcgtcttcggcgacggcgaccgcctcgcgcgcttcctccgctggcgcgtccaggtcatggagcgtggcgtgcgcgcgctcaccctgaggcccgggggcgtcaacgccatcatacaggtcaccgacctcaaggacatgccaaagcgggagctcagagccgccagcaaccagatcctctccctcttccaggacaactacccggagatggtagcgcggaaggtgttcattaacgtgccgtggtacttctccgtgctcttctccatgatctcgcccttcctcacggagcgcaccaagagcaagttcgtcatcgcgcgcgagggcaacgtcgccgagacactctacaagttcatccggccggagctggtgcctgtgcagtacggcgggctgagccgcaccggtgacctcgagaacggaccaccgaagccggcgtccgagttcaccatcaagggtggcgagaaggtcttcctggagatcgacggtatcgaggccggtgcaacgataacgtgggatctggtcgtcgggggctgggacctcgagtacggagccgagtacgtgccggcggccgaggacagctacacgctctgcgtggagaagacgaggatggtctcggccaccgccgaggagcccgtgcacaatgccttcacggctagggaagccggcaagatggtgctgtccatagacaattctgggttcccggaagcgcaaggttgccgcctacaggtacttcgtgcgcaagtcgtcggcgtaggcatgctgatgtcttgtggtggtcgtcgcggccggcaccttgccggcaggtagccgcgagggggaggttaacgtggaacaactggtgaagtgtttacttgggcttgtgggatttggtggggagaggtcaagttaggctgtttaattattagtgctataacgacatgcatgtattatgccatatgtagaatataatgtactccgtaagagctgttgcacttttgtcatcaccactgttataaagctaatgatgagttaagttttttgggct

SEQ ID NO: 31950 - protein, 485 aa, Zea mays subsp. mays
  peptide (1)..(485): Ceres Seq. ID no. 13577776
  misc_feature (193)..(353): Pfam Name: Pfam Description:  CRAL/TRIO domain
  misc_feature (63)..(448): NCBI GI NO: 15230555 NR Description: expressed protein [Arabidopsis thaliana]
  misc_feature (51)..(447): NCBI GI NO: 34907288 NR Description: contains ESTsAU093915
  misc_feature (101)..(447): NCBI GI NO: 8894548 NR Description: hypothetical protein [Cicer arietinum]
  misc_feature (48)..(447): NCBI GI NO: 30680992 NR Description: expressed protein [Arabidopsis thaliana]
  misc_feature (48)..(377): NCBI GI NO: 25407487 NR Description: hypothetical protein AT4g09160
  misc_feature (385)..(447): NCBI GI NO: 25407487 NR Description: hypothetical protein AT4g09160
  misc_feature (81)..(447): NCBI GI NO: 15081614 NR Description: At1g72160/T9N14_8 [Arabidopsis thaliana]
  misc_feature (81)..(447): NCBI GI NO: 15218383 NR Description: cytosolic factor -related [Arabidopsis thaliana]
  misc_feature (114)..(449): NCBI GI NO: 18397616 NR Description: expressed protein [Arabidopsis thaliana]
  misc_feature (114)..(449): NCBI GI NO: 14334978 NR Description: unknown protein [Arabidopsis thaliana]
LPFQNLFLLSSPQLPPFPQTPCPLPSFPSPTPPHVRKPHATVMSPTTTPPPAPVAAPTSKGAKRSLMSSLMDATALLRSSSFKEDSYVAAALPASELRALADLKALLATHPDPISIWGVPLNPRSPPAAADDAAPVDERADVVLLKFLRARDFRVRDAHAMVLRCAAWRAEFGADAVLDEELGFKDLEGIVAYMHGWDRDGHPVCYNAYGVFKDRDMYERVFGDGDRLARFLRWRVQVMERGVRALTLRPGGVNAIIQVTDLKDMPKRELRAASNQILSLFQDNYPEMVARKVFINVPWYFSVLFSMISPFLTERTKSKFVIAREGNVAETLYKFIRPELVPVQYGGLSRTGDLENGPPKPASEFTIKGGEKVFLEIDGIEAGATITWDLVVGGWDLEYGAEYVPAAEDSYTLCVEKTRMVSATAEEPVHNAFTAREAGKMVLSIDNSGFPEAQGCRLQVLRAQVVGVGMLMSCGGRRGRHLAGR

SEQ ID NO: 31951 - protein, 443 aa, Zea mays subsp. mays
  peptide (1)..(443): Ceres Seq. ID no. 13577777
  misc_feature (151)..(311): Pfam Name: Pfam Description:  CRAL/TRIO domain
  misc_feature (21)..(406): NCBI GI NO: 15230555 NR Description: expressed protein [Arabidopsis thaliana]
  misc_feature (9)..(405): NCBI GI NO: 34907288 NR Description: contains ESTsAU093915
  misc_feature (59)..(405): NCBI GI NO: 8894548 NR Description: hypothetical protein [Cicer arietinum]
  misc_feature (6)..(405): NCBI GI NO: 30680992 NR Description: expressed protein [Arabidopsis thaliana]
  misc_feature (6)..(335): NCBI GI NO: 25407487 NR Description: hypothetical protein AT4g09160
  misc_feature (343)..(405): NCBI GI NO: 25407487 NR Description: hypothetical protein AT4g09160
  misc_feature (39)..(405): NCBI GI NO: 15081614 NR Description: At1g72160/T9N14_8 [Arabidopsis thaliana]
  misc_feature (39)..(405): NCBI GI NO: 15218383 NR Description: cytosolic factor -related [Arabidopsis thaliana]
  misc_feature (72)..(407): NCBI GI NO: 18397616 NR Description: expressed protein [Arabidopsis thaliana]
  misc_feature (72)..(407): NCBI GI NO: 14334978 NR Description: unknown protein [Arabidopsis thaliana]
MSPTTTPPPAPVAAPTSKGAKRSLMSSLMDATALLRSSSFKEDSYVAAALPASELRALADLKALLATHPDPISIWGVPLNPRSPPAAADDAAPVDERADVVLLKFLRARDFRVRDAHAMVLRCAAWRAEFGADAVLDEELGFKDLEGIVAYMHGWDRDGHPVCYNAYGVFKDRDMYERVFGDGDRLARFLRWRVQVMERGVRALTLRPGGVNAIIQVTDLKDMPKRELRAASNQILSLFQDNYPEMVARKVFINVPWYFSVLFSMISPFLTERTKSKFVIAREGNVAETLYKFIRPELVPVQYGGLSRTGDLENGPPKPASEFTIKGGEKVFLEIDGIEAGATITWDLVVGGWDLEYGAEYVPAAEDSYTLCVEKTRMVSATAEEPVHNAFTAREAGKMVLSIDNSGFPEAQGCRLQVLRAQVVGVGMLMSCGGRRGRHLAGR

SEQ ID NO: 31952 - protein, 419 aa, Zea mays subsp. mays
  peptide (1)..(419): Ceres Seq. ID no. 13577778
  misc_feature (127)..(287): Pfam Name: Pfam Description:  CRAL/TRIO domain
  misc_feature (1)..(382): NCBI GI NO: 15230555 NR Description: expressed protein [Arabidopsis thaliana]
  misc_feature (1)..(381): NCBI GI NO: 34907288 NR Description: contains ESTsAU093915
  misc_feature (35)..(381): NCBI GI NO: 8894548 NR Description: hypothetical protein [Cicer arietinum]
  misc_feature (1)..(381): NCBI GI NO: 30680992 NR Description: expressed protein [Arabidopsis thaliana]
  misc_feature (1)..(311): NCBI GI NO: 25407487 NR Description: hypothetical protein AT4g09160
  misc_feature (319)..(381): NCBI GI NO: 25407487 NR Description: hypothetical protein AT4g09160
  misc_feature (15)..(381): NCBI GI NO: 15081614 NR Description: At1g72160/T9N14_8 [Arabidopsis thaliana]
  misc_feature (15)..(381): NCBI GI NO: 15218383 NR Description: cytosolic factor -related [Arabidopsis thaliana]
  misc_feature (48)..(383): NCBI GI NO: 18397616 NR Description: expressed protein [Arabidopsis thaliana]
  misc_feature (48)..(383): NCBI GI NO: 14334978 NR Description: unknown protein [Arabidopsis thaliana]
MSSLMDATALLRSSSFKEDSYVAAALPASELRALADLKALLATHPDPISIWGVPLNPRSPPAAADDAAPVDERADVVLLKFLRARDFRVRDAHAMVLRCAAWRAEFGADAVLDEELGFKDLEGIVAYMHGWDRDGHPVCYNAYGVFKDRDMYERVFGDGDRLARFLRWRVQVMERGVRALTLRPGGVNAIIQVTDLKDMPKRELRAASNQILSLFQDNYPEMVARKVFINVPWYFSVLFSMISPFLTERTKSKFVIAREGNVAETLYKFIRPELVPVQYGGLSRTGDLENGPPKPASEFTIKGGEKVFLEIDGIEAGATITWDLVVGGWDLEYGAEYVPAAEDSYTLCVEKTRMVSATAEEPVHNAFTAREAGKMVLSIDNSGFPEAQGCRLQVLRAQVVGVGMLMSCGGRRGRHLAGR

SEQ ID NO: 31953 - DNA, 1061 bp, Zea mays subsp. mays
  misc_feature (1)..(1061): Ceres Seq. ID no. 12400713
attccaaacaggacaccgaatgcacgatcgatcccacaagccgcagccgccggaggctggcgagggcgccggcggcgggaacgtggatcgagtgctcttcaagaacctcgtcgagatggtgccgctcgtcgagtcgctcatggaccggagggtcaactcggcctactcgcgacgcacttcggctagtctacacgccggcgccgcccaagaagggcgagcgaattggaaagtgtcaaattgccacagaggcgtatcggccaaaaagcggagagaccctggcgatgtatccaagaagagcacccctgattctaacggcgacaacggcttggttgtgccattgtctctatcgggtgctgaaaataagcccaaggatgatgttgctgggctgcgcgagcagggtcgattacctgcaaaagaaactgctcgagaaggaggaggcgctgaggtccgcggagagcctcgtgactgagatgaacgcggcatatgcaaccatcgatgaactccgacgcctggtgtctgacaaagaagctttgatcagatctaccaattctcagttgcatgatgcaaagattatgcttgcagacaagcaagcatctgtagagaaactggaatgggaggtaaagatgtcaaataaaaaggtcgaagatcttcaaggagatgtgtcaaatatgggattcgagataagctcgttgatggcatttttcgataaaatttcagagaatctttcaggtgactcttatgatgacacagtaccatcatcatatgaattagaggcaattcaatcaacgagtgaaattgacaagatcgaggtcgacaaaatagagcaggagaggattacctatggtgaagctctcgcggcagcgagagagaaccctgacgaggagcacttgaatatagctgccgaggcaaggtcaaggctgcaggtccttgtactatagtggtggcccccttctaattctagtgtatgtatgataatgttgaactgctgatgtaattttaccttgttggcttgagttgaggcgcttgtgaaatcgttccaggggtaatggaacgagcactgc

SEQ ID NO: 31954 - protein, 311 aa, Zea mays subsp. mays
  peptide (1)..(311): Ceres Seq. ID no. 12400714
  misc_feature (131)..(299): Pfam Name: Pfam Description:  Tropomyosin
  misc_feature (132)..(309): NCBI GI NO: 15241531 NR Description: myosin heavy chain-like protein
  misc_feature (34)..(311): NCBI GI NO: 19716176 NR Description: TMV-MP30 binding protein 2C [Nicotiana tabacum]
  misc_feature (132)..(309): NCBI GI NO: 1732515 NR Description: myosin heavy chain-like protein
SKQDTECTIDPTSRSRRRLARAPAAGTWIECSSRTSSRWCRSSSRSWTGGSTRPTRDALRLVYTPAPPKKGERIGKCQIATEAYRPKSGETLAMYPRRAPLILTATTAWLCHCLYRVLKISPRMMLLGCASRVDYLQKKLLEKEEALRSAESLVTEMNAAYATIDELRRLVSDKEALIRSTNSQLHDAKIMLADKQASVEKLEWEVKMSNKKVEDLQGDVSNMGFEISSLMAFFDKISENLSGDSYDDTVPSSYELEAIQSTSEIDKIEVDKIEQERITYGEALAAARENPDEEHLNIAAEARSRLQVLVL

SEQ ID NO: 31955 - protein, 218 aa, Zea mays subsp. mays
  peptide (1)..(218): Ceres Seq. ID no. 12400715
  misc_feature (38)..(206): Pfam Name: Pfam Description:  Tropomyosin
  misc_feature (39)..(216): NCBI GI NO: 15241531 NR Description: myosin heavy chain-like protein
  misc_feature (1)..(218): NCBI GI NO: 19716176 NR Description: TMV-MP30 binding protein 2C [Nicotiana tabacum]
  misc_feature (39)..(216): NCBI GI NO: 1732515 NR Description: myosin heavy chain-like protein
MYPRRAPLILTATTAWLCHCLYRVLKISPRMMLLGCASRVDYLQKKLLEKEEALRSAESLVTEMNAAYATIDELRRLVSDKEALIRSTNSQLHDAKIMLADKQASVEKLEWEVKMSNKKVEDLQGDVSNMGFEISSLMAFFDKISENLSGDSYDDTVPSSYELEAIQSTSEIDKIEVDKIEQERITYGEALAAARENPDEEHLNIAAEARSRLQVLVL

SEQ ID NO: 31956 - protein, 188 aa, Zea mays subsp. mays
  peptide (1)..(188): Ceres Seq. ID no. 12400716
  misc_feature (8)..(176): Pfam Name: Pfam Description:  Tropomyosin
  misc_feature (9)..(186): NCBI GI NO: 15241531 NR Description: myosin heavy chain-like protein
  misc_feature (1)..(188): NCBI GI NO: 19716176 NR Description: TMV-MP30 binding protein 2C [Nicotiana tabacum]
  misc_feature (9)..(186): NCBI GI NO: 1732515 NR Description: myosin heavy chain-like protein
MMLLGCASRVDYLQKKLLEKEEALRSAESLVTEMNAAYATIDELRRLVSDKEALIRSTNSQLHDAKIMLADKQASVEKLEWEVKMSNKKVEDLQGDVSNMGFEISSLMAFFDKISENLSGDSYDDTVPSSYELEAIQSTSEIDKIEVDKIEQERITYGEALAAARENPDEEHLNIAAEARSRLQVLVL

SEQ ID NO: 31957 - DNA, 841 bp, Zea mays subsp. mays
  misc_feature (1)..(841): Ceres Seq. ID no. 13492216
acatgcgctgacgcgcatcccccccggcgtggcgtgcgctttgatctagctcttcttctcgaatccagcccgaggcctttttcttctgcggtttcatccgtacccatcctgcacacgaagcctagaatagccctcccctgctccgccacctcctcggatcccgaccaccccacccccaccccagacaacaggttgatggaggctaagatgggacgcttcttcgagtccgtgagcaatttcttcaccggaggcgaccacatcccctggtgcgaccgcgacctcatcgccggctgtgaaggagagcttgtcaatgctgcaaatgaggaacagaggaatgaaagccttatgaggttgtcatgggcccttgtgcactccaggcagacagacgatgtaaaccgtggaatcagcatgcttcaagcttctttggataattctgccagtcctctgcagactagggaaaagctgtacttgttggctgttggattctacaggattggcgactactcaaaaagcaggcaacttgcagatcgttgtttggagattcaagcggattggcggcaggccatatcgctgaagaaggcaatagaagataaaattgccaaagatggtctgattggaataggaattgcgacaactgcggtcggacttctggttggtggaattgcagctgctgttgccaggaagaagtgaggtcaatatattggatcggcagctcattgaactaggggagctcccgtctctgtaattccaacttttctgttgttaccttggtgatattacagttgaattgccactctttatatgtacgaagtaatcgtatgataatgataacaccattgtg

SEQ ID NO: 31958 - protein, 229 aa, Zea mays subsp. mays
  peptide (1)..(229): Ceres Seq. ID no. 13492217
  misc_feature (66)..(229): NCBI GI NO: 18410639 NR Description: expressed protein [Arabidopsis thaliana]
  misc_feature (66)..(228): NCBI GI NO: 19386833 NR Description: B1147A04.28
  misc_feature (66)..(227): NCBI GI NO: 18416852 NR Description: expressed protein [Arabidopsis thaliana]
  misc_feature (119)..(229): NCBI GI NO: 27664028 NR Description: similar to RIKEN cDNA 2010003O14
  misc_feature (119)..(229): NCBI GI NO: 7705632 NR Description: CGI-135 protein [Homo sapiens]
  misc_feature (119)..(229): NCBI GI NO: 33112470 NR Description: Tetratricopeptide repeat protein 11
  misc_feature (119)..(229): NCBI GI NO: 13384998 NR Description: RIKEN cDNA 2010003O14 [Mus musculus]
  misc_feature (119)..(227): NCBI GI NO: 33391189 NR Description: putative mitochondrial fission protein Tbfis1p
  misc_feature (113)..(224): NCBI GI NO: 6322124 NR Description: Involved in mitochondrial division; Fis1p
  misc_feature (119)..(225): NCBI GI NO: 40889302 NR Description: Chain A
TCADAHPPRRGVRFDLALLLESSPRPFSSAVSSVPILHTKPRIALPCSATSSDPDHPTPTPDNRLMEAKMGRFFESVSNFFTGGDHIPWCDRDLIAGCEGELVNAANEEQRNESLMRLSWALVHSRQTDDVNRGISMLQASLDNSASPLQTREKLYLLAVGFYRIGDYSKSRQLADRCLEIQADWRQAISLKKAIEDKIAKDGLIGIGIATTAVGLLVGGIAAAVARKK

SEQ ID NO: 31959 - protein, 164 aa, Zea mays subsp. mays
  peptide (1)..(164): Ceres Seq. ID no. 13492218
  misc_feature (1)..(164): NCBI GI NO: 18410639 NR Description: expressed protein [Arabidopsis thaliana]
  misc_feature (1)..(163): NCBI GI NO: 19386833 NR Description: B1147A04.28
  misc_feature (1)..(162): NCBI GI NO: 18416852 NR Description: expressed protein [Arabidopsis thaliana]
  misc_feature (54)..(164): NCBI GI NO: 27664028 NR Description: similar to RIKEN cDNA 2010003O14
  misc_feature (54)..(164): NCBI GI NO: 7705632 NR Description: CGI-135 protein [Homo sapiens]
  misc_feature (54)..(164): NCBI GI NO: 33112470 NR Description: Tetratricopeptide repeat protein 11
  misc_feature (54)..(164): NCBI GI NO: 13384998 NR Description: RIKEN cDNA 2010003O14 [Mus musculus]
  misc_feature (54)..(162): NCBI GI NO: 33391189 NR Description: putative mitochondrial fission protein Tbfis1p
  misc_feature (48)..(159): NCBI GI NO: 6322124 NR Description: Involved in mitochondrial division; Fis1p
  misc_feature (54)..(160): NCBI GI NO: 40889302 NR Description: Chain A
MEAKMGRFFESVSNFFTGGDHIPWCDRDLIAGCEGELVNAANEEQRNESLMRLSWALVHSRQTDDVNRGISMLQASLDNSASPLQTREKLYLLAVGFYRIGDYSKSRQLADRCLEIQADWRQAISLKKAIEDKIAKDGLIGIGIATTAVGLLVGGIAAAVARKK

SEQ ID NO: 31960 - protein, 160 aa, Zea mays subsp. mays
  peptide (1)..(160): Ceres Seq. ID no. 13492219
  misc_feature (1)..(160): NCBI GI NO: 18410639 NR Description: expressed protein [Arabidopsis thaliana]
  misc_feature (1)..(159): NCBI GI NO: 19386833 NR Description: B1147A04.28
  misc_feature (1)..(158): NCBI GI NO: 18416852 NR Description: expressed protein [Arabidopsis thaliana]
  misc_feature (50)..(160): NCBI GI NO: 27664028 NR Description: similar to RIKEN cDNA 2010003O14
  misc_feature (50)..(160): NCBI GI NO: 7705632 NR Description: CGI-135 protein [Homo sapiens]
  misc_feature (50)..(160): NCBI GI NO: 33112470 NR Description: Tetratricopeptide repeat protein 11
  misc_feature (50)..(160): NCBI GI NO: 13384998 NR Description: RIKEN cDNA 2010003O14 [Mus musculus]
  misc_feature (50)..(158): NCBI GI NO: 33391189 NR Description: putative mitochondrial fission protein Tbfis1p
  misc_feature (44)..(155): NCBI GI NO: 6322124 NR Description: Involved in mitochondrial division; Fis1p
  misc_feature (50)..(156): NCBI GI NO: 40889302 NR Description: Chain A
MGRFFESVSNFFTGGDHIPWCDRDLIAGCEGELVNAANEEQRNESLMRLSWALVHSRQTDDVNRGISMLQASLDNSASPLQTREKLYLLAVGFYRIGDYSKSRQLADRCLEIQADWRQAISLKKAIEDKIAKDGLIGIGIATTAVGLLVGGIAAAVARKK

SEQ ID NO: 31961 - DNA, 707 bp, Zea mays subsp. mays
  misc_feature (1)..(707): Ceres Seq. ID no. 12441460
taatcgaaaaatcaccaccaccccgcggctgcagctcagcagctccagacctcaccagaggcacctaccacaccgcccgccgccgatcccgtcacccgtctcctccccgctgcggagcgtctccagccctgcccggtgcccgcccagatggcaaacgcggcgtcagggatggccgtggacgacgactgcaagcgccggttcctggagctcaaggccaagaggacgcaccgcttcatcatctacaggatcgacgagaagaagaagatggtggtggtggagcaggtgggcaagcccgtgctcggctacgacgacttcgccgccagcctccccgccaacgagtgcaggtacgccatcttcgactacgacttcgtcaccgaggagaactgccagaagagcaagatcttcttcatcgcctggtctcctgacacggcgcgcgtgaggagcaagatgatctacgccagctccaaggagaggttcaagcgggagctggacggcattcaggtggatctccaggccaccgactccgccgaggttggccttgacgtcatccagggccgtgcaagctgaggatgcccagcgatgaactgcccatgccagaggatgtatgagcatcatcagttcagatgagaacttgactgggcgggctatgtaaaaactgcatccaccgcagtgatgaaatcaatctaatcaatctaccacccccttct

SEQ ID NO: 31962 - protein, 145 aa, Zea mays subsp. mays
  peptide (1)..(145): Ceres Seq. ID no. 12441461
NRKITTTPRLQLSSSRPHQRHLPHRPPPIPSPVSSPLRSVSSPARCPPRWQTRRQGWPWTTTASAGSWSSRPRGRTASSSTGSTRRRRWWWWSRWASPCSATTTSPPASPPTSAGTPSSTTTSSPRRTARRARSSSSPGLLTRRA

SEQ ID NO: 31963 - protein, 140 aa, Zea mays subsp. mays
  peptide (1)..(140): Ceres Seq. ID no. 12441462
IEKSPPPRGCSSAAPDLTRGTYHTARRRSRHPSPPRCGASPALPGARPDGKRGVRDGRGRRLQAPVPGAQGQEDAPLHHLQDRREEEDGGGGAGGQARARLRRLRRQPPRQRVQVRHLRLRLRHRGELPEEQDLLHRLVS

SEQ ID NO: 31964 - protein, 139 aa, Zea mays subsp. mays; identical to SEQ ID NO: 25716
  peptide (1)..(139): Ceres Seq. ID no. 12441463
  misc_feature (12)..(139): Pfam Name: Pfam Description:  Cofilin/tropomyosin-type actin-binding protein
  misc_feature (1)..(139): NCBI GI NO: 17366768 NR Description: Actin-depolymerizing factor 1 (ADF 1)
  misc_feature (1)..(139): NCBI GI NO: 30697300 NR Description: actin depolymerizing factor 4 - like protein
  misc_feature (1)..(139): NCBI GI NO: 4185511 NR Description: actin depolymerizing factor 4
  misc_feature (1)..(139): NCBI GI NO: 15231309 NR Description: actin depolymerizing factor 1
  misc_feature (1)..(139): NCBI GI NO: 38564721 NR Description: putative actin-depolymerizing factor 2
  misc_feature (1)..(138): NCBI GI NO: 17366765 NR Description: Actin-depolymerizing factor 2 (ADF 2)
  misc_feature (8)..(139): NCBI GI NO: 30697303 NR Description: actin depolymerizing factor 4 - like protein
  misc_feature (1)..(139): NCBI GI NO: 18408116 NR Description: actin depolymerizing factor 2
  misc_feature (1)..(138): NCBI GI NO: 231509 NR Description: Actin-depolymerizing factor (ADF)
  misc_feature (1)..(137): NCBI GI NO: 18411410 NR Description: putative actin-depolymerizing factor

SEQ ID NO: 31965 - DNA, 1919 bp, Zea mays subsp. mays
  misc_feature (1)..(1919): Ceres Seq. ID no. 12386452
gcacgagaccattacctagaacatcctaatcgaaaactgcccaccgggctcgtctcctcccctggtttctttttcatcactcgtcaccggctcaccgctagttcctttagagaaggtgtacccccaatattccattaccggcccactgacgagagagagagagagagattttggcgtgactatccagagtccccaatcttacacctaaaaactcttctcagctaccggtgcggcatatcgcccctatcggcggcgaacatttgagttctcgcgacgtgtcctcgaggattctgtggtggaagatcggatcttttgctgcgggttccagttgccaaccagagatgtcggctctcctcgatctactgatggggatctttcgccagcagaccctcggcggcgccgccctggagctcgccgcgctggcggcgccgctctcgctcgccgccctcgtcggccttctcatcgggtgggcatggcgcccgaggtgggcgggggtcgtcgtcgtcgacaacgcccaacagatggcgcagctccccgcggcggcggcgcctccggaccgcgccaccgccaccaccaccgcggtggtatctcgcaacgaggcggccgccgtcgtaccgagaactgtggtggctcatgcggcggccgaggacgagcagcagcagctggcggtcaacaccggtgacttgatgcacctctggcggctcgtcgacgagaaggacggtggcccgtcgtggattcacatgatggaccgcaccttaccaaccatgaggtaccaagcctggcggagagacccaccgagtggtccaccacagtaccgcagcagcacaatcttggaagatgcgtcaccagaggttgtgagagatttcttctgggacgacgagttccggatgaacaacagctgggacgacatgcttcttcagcacgagacgctggaggagtgcaccgagactggaaccatggttgtccggtgggtcaggaagttcccgttcttctgcagcgacagggagtacatcataggccgcaggatatgggcgtctgggaagacattttactgtgtgaccaagggtgttcctcgtccctccgttccaagacaaaacaaacctcgccgtgtggacttgtactactctagctggtgcatccgtccagttgagtcgagaaaaggcgacggtgcaatgagtgcatgcgaggtgctcttgttccaccacgaggacatggggattccatgggagatcgcgaagcttggcgtccggcaggggatgtggggctgcgtcaagaggatagagcctggccttcgggcgtaccaggttgggaggaccgccggagaggctgtttccaagtgtgctgccatggcacaggtcaccaccaggttcagtgccgacgagctcgtcatcgcagggccggggcaacacggaggccagttcttcttcgtccggcgacggcgcagaggttgacaaggcgacgaagcactgggcgaacagcatacccaaggttctcatggtcggtggcgctgtggccctggcctgctgcaccttcgacggtgggttgttgaccaaggccgtcatcttcggcactgccaggaggtttgcaggagggccaggaaggcggtaggtacggtgtaacggtggacggaaagatccagcggcacaacacaaaacaagtgttgctgcactgcagcccgctgcgggttaataggttagaaatatagcatttgttacgaggaaacatagaagtattatgcaagaaaaccgctgttagataagaaatacactgctgtgtattagtagttaataacaagagttcttggtttttgtatgtaaccatattgtggatcggatccattgttcttccccatggacactactactaccagtctaccagatcgatgttgaccttgtggcagttgctgcagtttttttttc

SEQ ID NO: 31966 - protein, 369 aa, Zea mays subsp. mays
  peptide (1)..(369): Ceres Seq. ID no. 12386453
  misc_feature (158)..(239): Pfam Name: Pfam Description:  START domain
  misc_feature (1)..(351): NCBI GI NO: 38344869 NR Description: OSJNBa0020P07.12
  misc_feature (110)..(349): NCBI GI NO: 15217736 NR Description: membrane related protein CP5, putative
  misc_feature (110)..(349): NCBI GI NO: 22135902 NR Description: membrane related protein CP5, putative
  misc_feature (23)..(50): NCBI GI NO: 15217736 NR Description: membrane related protein CP5, putative
  misc_feature (23)..(50): NCBI GI NO: 22135902 NR Description: membrane related protein CP5, putative
  misc_feature (110)..(350): NCBI GI NO: 4741929 NR Description: membrane related protein CP5
  misc_feature (23)..(50): NCBI GI NO: 4741929 NR Description: membrane related protein CP5
  misc_feature (95)..(354): NCBI GI NO: 18423599 NR Description: membrane related protein-like
  misc_feature (33)..(66): NCBI GI NO: 18423599 NR Description: membrane related protein-like
  misc_feature (95)..(354): NCBI GI NO: 21593272 NR Description: membrane related protein-like
MSALLDLLMGIFRQQTLGGAALELAALAAPLSLAALVGLLIGWAWRPRWAGVVVVDNAQQMAQLPAAAAPPDRATATTTAVVSRNEAAAVVPRTVVAHAAAEDEQQQLAVNTGDLMHLWRLVDEKDGGPSWIHMMDRTLPTMRYQAWRRDPPSGPPQYRSSTILEDASPEVVRDFFWDDEFRMNNSWDDMLLQHETLEECTETGTMVVRWVRKFPFFCSDREYIIGRRIWASGKTFYCVTKGVPRPSVPRQNKPRRVDLYYSSWCIRPVESRKGDGAMSACEVLLFHHEDMGIPWEIAKLGVRQGMWGCVKRIEPGLRAYQVGRTAGEAVSKCAAMAQVTTRFSADELVIAGPGQHGGQFFFVRRRRRG

SEQ ID NO: 31967 - protein, 361 aa, Zea mays subsp. mays
  peptide (1)..(361): Ceres Seq. ID no. 12386454
  misc_feature (150)..(231): Pfam Name: Pfam Description:  START domain
  misc_feature (1)..(343): NCBI GI NO: 38344869 NR Description: OSJNBa0020P07.12
  misc_feature (102)..(341): NCBI GI NO: 15217736 NR Description: membrane related protein CP5, putative
  misc_feature (102)..(341): NCBI GI NO: 22135902 NR Description: membrane related protein CP5, putative
  misc_feature (15)..(42): NCBI GI NO: 15217736 NR Description: membrane related protein CP5, putative
  misc_feature (15)..(42): NCBI GI NO: 22135902 NR Description: membrane related protein CP5, putative
  misc_feature (102)..(342): NCBI GI NO: 4741929 NR Description: membrane related protein CP5
  misc_feature (15)..(42): NCBI GI NO: 4741929 NR Description: membrane related protein CP5
  misc_feature (87)..(346): NCBI GI NO: 18423599 NR Description: membrane related protein-like
  misc_feature (25)..(58): NCBI GI NO: 18423599 NR Description: membrane related protein-like
  misc_feature (87)..(346): NCBI GI NO: 21593272 NR Description: membrane related protein-like
MGIFRQQTLGGAALELAALAAPLSLAALVGLLIGWAWRPRWAGVVVVDNAQQMAQLPAAAAPPDRATATTTAVVSRNEAAAVVPRTVVAHAAAEDEQQQLAVNTGDLMHLWRLVDEKDGGPSWIHMMDRTLPTMRYQAWRRDPPSGPPQYRSSTILEDASPEVVRDFFWDDEFRMNNSWDDMLLQHETLEECTETGTMVVRWVRKFPFFCSDREYIIGRRIWASGKTFYCVTKGVPRPSVPRQNKPRRVDLYYSSWCIRPVESRKGDGAMSACEVLLFHHEDMGIPWEIAKLGVRQGMWGCVKRIEPGLRAYQVGRTAGEAVSKCAAMAQVTTRFSADELVIAGPGQHGGQFFFVRRRRRG

SEQ ID NO: 31968 - protein, 309 aa, Zea mays subsp. mays
  peptide (1)..(309): Ceres Seq. ID no. 12386455
  misc_feature (98)..(179): Pfam Name: Pfam Description:  START domain
  misc_feature (1)..(291): NCBI GI NO: 38344869 NR Description: OSJNBa0020P07.12
  misc_feature (50)..(289): NCBI GI NO: 15217736 NR Description: membrane related protein CP5, putative
  misc_feature (50)..(289): NCBI GI NO: 22135902 NR Description: membrane related protein CP5, putative
  misc_feature (50)..(290): NCBI GI NO: 4741929 NR Description: membrane related protein CP5
  misc_feature (35)..(294): NCBI GI NO: 18423599 NR Description: membrane related protein-like
  misc_feature (35)..(294): NCBI GI NO: 21593272 NR Description: membrane related protein-like
  misc_feature (1)..(294): NCBI GI NO: 10178166 NR Description: membrane related protein-like
  misc_feature (40)..(292): NCBI GI NO: 18033654 NR Description: putative nodule membrane protein [Medicago sativa]
  misc_feature (15)..(286): NCBI GI NO: 18414239 NR Description: expressed protein; protein id: At4g14500
  misc_feature (1)..(11): NCBI GI NO: 18414239 NR Description: expressed protein; protein id: At4g14500
MAQLPAAAAPPDRATATTTAVVSRNEAAAVVPRTVVAHAAAEDEQQQLAVNTGDLMHLWRLVDEKDGGPSWIHMMDRTLPTMRYQAWRRDPPSGPPQYRSSTILEDASPEVVRDFFWDDEFRMNNSWDDMLLQHETLEECTETGTMVVRWVRKFPFFCSDREYIIGRRIWASGKTFYCVTKGVPRPSVPRQNKPRRVDLYYSSWCIRPVESRKGDGAMSACEVLLFHHEDMGIPWEIAKLGVRQGMWGCVKRIEPGLRAYQVGRTAGEAVSKCAAMAQVTTRFSADELVIAGPGQHGGQFFFVRRRRRG

SEQ ID NO: 31969 - DNA, 1049 bp, Zea mays subsp. mays
  misc_feature (1)..(1049): Ceres Seq. ID no. 12345528
aaaaacgctccgttgcctttcctttccccacttccccggctcctgcctcccgccgccgacaccaccaaaaaccctagcagctccaccccgccgccgccgccgccgccatggatgaccctcggatgttcccatcaggatccgacgaccgctccgacgccgaacgccggctgtacaacccgtaccaggacctcaacatgccctacagctaccggacgctctacgacctccccacttcgccggagttcctcttccaggaggaggccctggcgcaacgacgctcgtggggtgagaacctcactttctatacgggcgtcgggtacctctccggcgccgttggcggcgccgtcctgggcctccgcgacgccgccaggggcgctgagcccggggagaccgccaagatccgcgccaaccgcgtgctcaacgcctgcggcagctctggccgccgcgtcgggaatacgctgggcgtcattggcctcatgtacgccgggatcgagagcgccatggtcgcggcccgtgaccgcgacgactggatgaacagcgtcgccgctgggcttggcacgggcacgctcttccgcgccgccaacgggccgcgatccgccgccgtcgcaggcgccctcggtgggatcctagccgccgccgccgcggggggcaagcagctagccaagagatacgtgaatgtcatatgatcgtgttttttttgtggtagcaatgatgagcgaacaatgatatcgtctagtgctctagtagggaaggggtttgccttttctgaaaactagctgagggcttgttcggttctaccccaatccatatggattgaggggtcaaaatcacctccaatccatatcaatcccctccaatccatatggattgaaaataaccgaacaagccctgaatgggaaattttgagcttgcattggaattgcaatgcaacatcgtgcttcaagatgctttagttctgctttgtccttatatgttaagggctagatgaaggtatttttatctccttgtttggatgcacatgtattgtcgtcaatccatttcatgttctc

SEQ ID NO: 31970 - protein, 192 aa, Zea mays subsp. mays
  peptide (1)..(192): Ceres Seq. ID no. 12345529
  misc_feature (54)..(185): Pfam Name: Pfam Description:  Tim17/Tim22/Tim23 family
  misc_feature (1)..(192): NCBI GI NO: 37536126 NR Description: putaive mitochondrial inner membrane protein
  misc_feature (1)..(189): NCBI GI NO: 34902184 NR Description: Putative mitochondrial inner membrane protein
  misc_feature (11)..(191): NCBI GI NO: 15218593 NR Description: inner mitochondrial membrane protein
  misc_feature (11)..(191): NCBI GI NO: 18394498 NR Description: inner mitochondrial membrane protein, putative
  misc_feature (11)..(191): NCBI GI NO: 13641346 NR Description: translocase of inner mitochondrial membrane TIM23
  misc_feature (1)..(191): NCBI GI NO: 15229350 NR Description: putative inner mitochondrial membrane protein
  misc_feature (8)..(99): NCBI GI NO: 38344267 NR Description: OSJNBa0005N02.5
  misc_feature (23)..(187): NCBI GI NO: 19075496 NR Description: putative mitochondrial import inner membranetranslocase subunit
  misc_feature (127)..(189): NCBI GI NO: 12039278 NR Description: putative inner mitochondrial membrane protein
  misc_feature (90)..(188): NCBI GI NO: 34394286 NR Description: hypothetical protein
MDDPRMFPSGSDDRSDAERRLYNPYQDLNMPYSYRTLYDLPTSPEFLFQEEALAQRRSWGENLTFYTGVGYLSGAVGGAVLGLRDAARGAEPGETAKIRANRVLNACGSSGRRVGNTLGVIGLMYAGIESAMVAARDRDDWMNSVAAGLGTGTLFRAANGPRSAAVAGALGGILAAAAAGGKQLAKRYVNVI

SEQ ID NO: 31971 - protein, 187 aa, Zea mays subsp. mays
  peptide (1)..(187): Ceres Seq. ID no. 12345530
  misc_feature (49)..(180): Pfam Name: Pfam Description:  Tim17/Tim22/Tim23 family
  misc_feature (1)..(187): NCBI GI NO: 37536126 NR Description: putaive mitochondrial inner membrane protein
  misc_feature (1)..(184): NCBI GI NO: 34902184 NR Description: Putative mitochondrial inner membrane protein
  misc_feature (6)..(186): NCBI GI NO: 15218593 NR Description: inner mitochondrial membrane protein
  misc_feature (6)..(186): NCBI GI NO: 18394498 NR Description: inner mitochondrial membrane protein, putative
  misc_feature (6)..(186): NCBI GI NO: 13641346 NR Description: translocase of inner mitochondrial membrane TIM23
  misc_feature (1)..(186): NCBI GI NO: 15229350 NR Description: putative inner mitochondrial membrane protein
  misc_feature (3)..(94): NCBI GI NO: 38344267 NR Description: OSJNBa0005N02.5
  misc_feature (18)..(182): NCBI GI NO: 19075496 NR Description: putative mitochondrial import inner membranetranslocase subunit
  misc_feature (122)..(184): NCBI GI NO: 12039278 NR Description: putative inner mitochondrial membrane protein
  misc_feature (85)..(183): NCBI GI NO: 34394286 NR Description: hypothetical protein
MFPSGSDDRSDAERRLYNPYQDLNMPYSYRTLYDLPTSPEFLFQEEALAQRRSWGENLTFYTGVGYLSGAVGGAVLGLRDAARGAEPGETAKIRANRVLNACGSSGRRVGNTLGVIGLMYAGIESAMVAARDRDDWMNSVAAGLGTGTLFRAANGPRSAAVAGALGGILAAAAAGGKQLAKRYVNVI

SEQ ID NO: 31972 - protein, 177 aa, Zea mays subsp. mays
  peptide (1)..(177): Ceres Seq. ID no. 12345531
  misc_feature (21)..(121): Pfam Name: Pfam Description:  Mucin-like glycoprotein
  misc_feature (3)..(177): NCBI GI NO: 27375632 NR Description: blr0521 [Bradyrhizobium japonicum]
  misc_feature (9)..(177): NCBI GI NO: 188864 NR Description: mucin
  misc_feature (9)..(177): NCBI GI NO: 186396 NR Description: mucin
KNAPLPFLSPLPRLLPPAADTTKNPSSSTPPPPPPPWMTLGCSHQDPTTAPTPNAGCTTRTRTSTCPTATGRSTTSPLRRSSSSRRRPWRNDARGVRTSLSIRASGTSPAPLAAPSWASATPPGALSPGRPPRSAPTACSTPAAALAAASGIRWASLASCTPGSRAPWSRPVTATTG

SEQ ID NO: 31973 - DNA, 1049 bp, Zea mays subsp. mays; identical to SEQ ID NO: 31969
  misc_feature (1)..(1049): Ceres Seq. ID no. 12345528

SEQ ID NO: 31974 - protein, 192 aa, Zea mays subsp. mays; identical to SEQ ID NO: 31970
  peptide (1)..(192): Ceres Seq. ID no. 12345529
  misc_feature (54)..(185): Pfam Name: Pfam Description:  Tim17/Tim22/Tim23 family
  misc_feature (1)..(192): NCBI GI NO: 37536126 NR Description: putaive mitochondrial inner membrane protein
  misc_feature (1)..(189): NCBI GI NO: 34902184 NR Description: Putative mitochondrial inner membrane protein
  misc_feature (11)..(191): NCBI GI NO: 15218593 NR Description: inner mitochondrial membrane protein
  misc_feature (11)..(191): NCBI GI NO: 18394498 NR Description: inner mitochondrial membrane protein, putative
  misc_feature (11)..(191): NCBI GI NO: 13641346 NR Description: translocase of inner mitochondrial membrane TIM23
  misc_feature (1)..(191): NCBI GI NO: 15229350 NR Description: putative inner mitochondrial membrane protein
  misc_feature (8)..(99): NCBI GI NO: 38344267 NR Description: OSJNBa0005N02.5
  misc_feature (23)..(187): NCBI GI NO: 19075496 NR Description: putative mitochondrial import inner membranetranslocase subunit
  misc_feature (127)..(189): NCBI GI NO: 12039278 NR Description: putative inner mitochondrial membrane protein
  misc_feature (90)..(188): NCBI GI NO: 34394286 NR Description: hypothetical protein

SEQ ID NO: 31975 - protein, 187 aa, Zea mays subsp. mays; identical to SEQ ID NO: 31971
  peptide (1)..(187): Ceres Seq. ID no. 12345530
  misc_feature (49)..(180): Pfam Name: Pfam Description:  Tim17/Tim22/Tim23 family
  misc_feature (1)..(187): NCBI GI NO: 37536126 NR Description: putaive mitochondrial inner membrane protein
  misc_feature (1)..(184): NCBI GI NO: 34902184 NR Description: Putative mitochondrial inner membrane protein
  misc_feature (6)..(186): NCBI GI NO: 15218593 NR Description: inner mitochondrial membrane protein
  misc_feature (6)..(186): NCBI GI NO: 18394498 NR Description: inner mitochondrial membrane protein, putative
  misc_feature (6)..(186): NCBI GI NO: 13641346 NR Description: translocase of inner mitochondrial membrane TIM23
  misc_feature (1)..(186): NCBI GI NO: 15229350 NR Description: putative inner mitochondrial membrane protein
  misc_feature (3)..(94): NCBI GI NO: 38344267 NR Description: OSJNBa0005N02.5
  misc_feature (18)..(182): NCBI GI NO: 19075496 NR Description: putative mitochondrial import inner membranetranslocase subunit
  misc_feature (122)..(184): NCBI GI NO: 12039278 NR Description: putative inner mitochondrial membrane protein
  misc_feature (85)..(183): NCBI GI NO: 34394286 NR Description: hypothetical protein

SEQ ID NO: 31976 - protein, 177 aa, Zea mays subsp. mays; identical to SEQ ID NO: 31972
  peptide (1)..(177): Ceres Seq. ID no. 12345531
  misc_feature (21)..(121): Pfam Name: Pfam Description:  Mucin-like glycoprotein
  misc_feature (3)..(177): NCBI GI NO: 27375632 NR Description: blr0521 [Bradyrhizobium japonicum]
  misc_feature (9)..(177): NCBI GI NO: 188864 NR Description: mucin
  misc_feature (9)..(177): NCBI GI NO: 186396 NR Description: mucin

SEQ ID NO: 31977 - DNA, 724 bp, Zea mays subsp. mays
  misc_feature (1)..(724): Ceres Seq. ID no. 12400535
aacataccgcctgtccacctgcgctcttcccgttccccaactgcaagtctgcaacatcctctctctctctctacctgccccgttcctcaccaaacttgtcgccctcgtcgacttgtgagtctcttccgccggcgtcgacgagagctgcgctaggtgatctcgactgcttcctcgccccccatggcgacggcgctcaaatcgttcctgaacagccccgtcggccccaagaccacccacttctggggccctgtcgccaactggggcttcgtcatcgcgggtttggttgacatgaacaagcctcctgaaatgatatctggcaatatgacagcagccatgtgtgtgtattctggactctttatgaggtttgcatggatggtacagccccgaaattatttgcttctagcatgccatgcttccaatgaaagcgtccagctctatcagttatctcgctgggctaggtctcaggggtacctggataagaaagagccagaggccaaacagtaaagagggtatccaacactggagtcatttgttcaataaagaaaatatgctgtggaaaacattcattctgttgccaatgcagttttttttgtatgtttgcaaaatatgctgaggaaatttcatgatacctagcgcagttacaagcgtctgcttacttttatgtgcatttgtcaagacacatttgttttttacattgctgccttcctactatttggcactattt

SEQ ID NO: 31978 - protein, 107 aa, Zea mays subsp. mays
  peptide (1)..(107): Ceres Seq. ID no. 12400536
  misc_feature (1)..(106): Pfam Name: UPF0041 Pfam Description: Uncharacterised protein family
  misc_feature (1)..(106): NCBI GI NO: 15241266 NR Description: putative protein; protein id: At5g20090
  misc_feature (17)..(90): NCBI GI NO: 4929727 NR Description: CGI-129 protein [Homo sapiens]
  misc_feature (17)..(90): NCBI GI NO: 7706369 NR Description: brain protein 44-like; HSPC040 protein
  misc_feature (17)..(105): NCBI GI NO: 12852262 NR Description: unnamed protein product [Mus musculus]
  misc_feature (17)..(98): NCBI GI NO: 17554512 NR Description: Uncharacterised protein family (UPF0041)
  misc_feature (17)..(98): NCBI GI NO: 39591631 NR Description: Hypothetical protein CBG18071
  misc_feature (17)..(105): NCBI GI NO: 9055178 NR Description: brain protein 44-like
  misc_feature (19)..(105): NCBI GI NO: 20897205 NR Description: RIKEN cDNA 3830411I18 [Mus musculus]
  misc_feature (17)..(95): NCBI GI NO: 20983406 NR Description: similar to Brain protein 44-like protein
  misc_feature (19)..(107): NCBI GI NO: 34860376 NR Description: similar to brain protein 44-like
MATALKSFLNSPVGPKTTHFWGPVANWGFVIAGLVDMNKPPEMISGNMTAAMCVYSGLFMRFAWMVQPRNYLLLACHASNESVQLYQLSRWARSQGYLDKKEPEAKQ

SEQ ID NO: 31979 - protein, 94 aa, Zea mays subsp. mays
  peptide (1)..(94): Ceres Seq. ID no. 12400537
HTACPPALFPFPNCKSATSSLSLYLPRSSPNLSPSSTCESLPPASTRAALGDLDCFLAPHGDGAQIVPEQPRRPQDHPLLGPCRQLGLRHRGFG

SEQ ID NO: 31980 - protein, 71 aa, Zea mays subsp. mays
  peptide (1)..(71): Ceres Seq. ID no. 12400538
  misc_feature (1)..(70): Pfam Name: UPF0041 Pfam Description: Uncharacterised protein family
  misc_feature (1)..(70): NCBI GI NO: 15241266 NR Description: putative protein; protein id: At5g20090
  misc_feature (1)..(54): NCBI GI NO: 4929727 NR Description: CGI-129 protein [Homo sapiens]
  misc_feature (1)..(54): NCBI GI NO: 7706369 NR Description: brain protein 44-like; HSPC040 protein
  misc_feature (1)..(69): NCBI GI NO: 12852262 NR Description: unnamed protein product [Mus musculus]
  misc_feature (1)..(62): NCBI GI NO: 17554512 NR Description: Uncharacterised protein family (UPF0041)
  misc_feature (1)..(62): NCBI GI NO: 39591631 NR Description: Hypothetical protein CBG18071
  misc_feature (1)..(69): NCBI GI NO: 9055178 NR Description: brain protein 44-like
  misc_feature (1)..(69): NCBI GI NO: 20897205 NR Description: RIKEN cDNA 3830411I18 [Mus musculus]
  misc_feature (1)..(59): NCBI GI NO: 20983406 NR Description: similar to Brain protein 44-like protein
  misc_feature (1)..(71): NCBI GI NO: 34860376 NR Description: similar to brain protein 44-like
MNKPPEMISGNMTAAMCVYSGLFMRFAWMVQPRNYLLLACHASNESVQLYQLSRWARSQGYLDKKEPEAKQ

SEQ ID NO: 31981 - DNA, 540 bp, Zea mays subsp. mays
  misc_feature (1)..(540): Ceres Seq. ID no. 12345401
cggggacgttcttaaggttaagccattggcagctttagcaatgattgatgagggagagcttgactggaaaattgtggccatttctttggatgacccgaaagcatctcttgtgaacgacgtggatgatgttgagaagcattttccggggacactgactgccatcagagactggttcagagactacaagatacctgatggaaagcctgccaacaaatttggtctcggcaacaagcccgcaagcaaggaatacgccctgaaggtcattcaagagaccaacgaatcatgggagaaattaaagagaaatattcccgctggagagctctcgttggcctgattttggcccatggaagccaccacattcttttgaactgctttcgtgagcatgtcgttttgtatgctgtgaccatgcttcttcgtttgcattccaaaccttttttacgaactgtttaacaaaaatgatcttgtcggataaataatgattctggtgcgagtttaccagaacggcaaggagtttctcaagtaaatgcagcgtatttttct

SEQ ID NO: 31982 - protein, 110 aa, Zea mays subsp. mays
  peptide (1)..(110): Ceres Seq. ID no. 12345402
  misc_feature (1)..(97): Pfam Name: Pfam Description:  Inorganic pyrophosphatase
  misc_feature (1)..(109): NCBI GI NO: 15242465 NR Description: inorganic pyrophosphatase - like protein
  misc_feature (1)..(109): NCBI GI NO: 21592878 NR Description: inorganic pyrophosphatase-like protein
  misc_feature (1)..(109): NCBI GI NO: 14571671 NR Description: inorganic pyrophosphatase precursor
  misc_feature (1)..(98): NCBI GI NO: 124871 NR Description: INORGANIC PYROPHOSPHATASE
  misc_feature (1)..(98): NCBI GI NO: 124875 NR Description: Inorganic pyrophosphatase
  misc_feature (1)..(98): NCBI GI NO: 1942886 NR Description: Chain A, Acid Anhydride Hydrolase
  misc_feature (1)..(98): NCBI GI NO: 2781300 NR Description: Chain A, Structure Of Inorganic Pyrophosphatase
  misc_feature (1)..(98): NCBI GI NO: 6729690 NR Description: Chain A
  misc_feature (1)..(98): NCBI GI NO: 13787035 NR Description: Chain A, Structure Of Inorganic Pyrophosphatase
  misc_feature (1)..(98): NCBI GI NO: 13787036 NR Description: Chain B, Structure Of Inorganic Pyrophosphatase
GDVLKVKPLAALAMIDEGELDWKIVAISLDDPKASLVNDVDDVEKHFPGTLTAIRDWFRDYKIPDGKPANKFGLGNKPASKEYALKVIQETNESWEKLKRNIPAGELSLA

SEQ ID NO: 31983 - protein, 97 aa, Zea mays subsp. mays
  peptide (1)..(97): Ceres Seq. ID no. 12345403
  misc_feature (1)..(84): Pfam Name: Pfam Description:  Inorganic pyrophosphatase
  misc_feature (1)..(96): NCBI GI NO: 15242465 NR Description: inorganic pyrophosphatase - like protein
  misc_feature (1)..(96): NCBI GI NO: 21592878 NR Description: inorganic pyrophosphatase-like protein
  misc_feature (1)..(96): NCBI GI NO: 14571671 NR Description: inorganic pyrophosphatase precursor
  misc_feature (1)..(85): NCBI GI NO: 124871 NR Description: INORGANIC PYROPHOSPHATASE
  misc_feature (1)..(85): NCBI GI NO: 13787036 NR Description: Chain B, Structure Of Inorganic Pyrophosphatase
  misc_feature (1)..(85): NCBI GI NO: 13787035 NR Description: Chain A, Structure Of Inorganic Pyrophosphatase
  misc_feature (1)..(85): NCBI GI NO: 6729855 NR Description: Chain A
  misc_feature (1)..(85): NCBI GI NO: 6729690 NR Description: Chain A
  misc_feature (1)..(85): NCBI GI NO: 6319483 NR Description: pyrophosphate phosphohydrolase, EC 3
  misc_feature (1)..(85): NCBI GI NO: 3114391 NR Description: Chain A
MIDEGELDWKIVAISLDDPKASLVNDVDDVEKHFPGTLTAIRDWFRDYKIPDGKPANKFGLGNKPASKEYALKVIQETNESWEKLKRNIPAGELSLA

SEQ ID NO: 31984 - protein, 55 aa, Zea mays subsp. mays
  peptide (1)..(55): Ceres Seq. ID no. 12345404
MGEIKEKYSRWRALVGLILAHGSHHILLNCFREHVVLYAVTMLLRLHSKPFLRTV

SEQ ID NO: 31985 - DNA, 1205 bp, Zea mays subsp. mays
  misc_feature (1)..(1205): Ceres Seq. ID no. 12379329
agcagacaagggaggggactgagaactgggaagccgacgctccgctcggcaaagcctgaggcggcgacgacgcttgatcgcagcccgactcacaccgtgaggagttcgagggatggctttcgctagtagaattggaaatgcgctcaggagaactttagcgcccacttgctccccactgcttcagccagtaagatgcatgtcctcttccaagctctttgttggaggactttcttttgccaccgacgaaaccactctgaaggatgcattttctgagtttgggaatgtacttgaagctcggatcatcattgatcgggaatcagggaggtcaaggggttttggttttataacttttacatccactgaagaagcctcagctgcaatgacttccatggatggcaaggaacttcaaggacgaaatataagggtgaaccatgccaatgaacgcgctggtgggatacgcgggggtggtggattcggatctggtggtggttatggtggtggaggtggatatcctactggtgggtatggcggtggtggagatagttctggtggtggttatagttctgggggttatgctgccaatggttacggtgttggatctggcagtggcaactacagcaatgcatcaggtggtggatattcaggcagtgatggttacggcaatggagctgccagtggtggttatgctaacaacttgagcagcggatacaacagcaatggtaggtacaataccattggcagttctgatggaaacactggtgggtacaattcgtatcccaacccgtatggtgcaggcaactacaatactggaggttcgagttccagtggtggaaccttaggagagtttggtggtggaggttttggtggcaacaactttgctggaaatgttaccgggggggtttctggcggtggggcaagctatggaggctaacaagccgcaatacaatggcgacgacgacctgctgggcgaaggtttcttcgacaaggaagtggcagagtaaatgagggagcggcgtactcgcacctctcgcactgtgctgcggatctttttttcccccaaactgcatctgatcggtcgtgctaaatggagcaaataaaactttgcttgagctcattaggatatagaacataatcctttgttctttttttattctgtttcagacaaggcacgtatgttattttatccactcagctagcgtagcttt

SEQ ID NO: 31986 - protein, 272 aa, Zea mays subsp. mays
  peptide (1)..(272): Ceres Seq. ID no. 12379330
  misc_feature (34)..(105): Pfam Name: a.k.a. RRM, RBD, or RNP domain Pfam Description: RNA recognition motif.
  misc_feature (1)..(272): NCBI GI NO: 15239505 NR Description: glycine-rich RNA-binding protein
  misc_feature (1)..(272): NCBI GI NO: 15822705 NR Description: RNA-binding protein precursor [Solanum tuberosum]
  misc_feature (1)..(270): NCBI GI NO: 15221187 NR Description: glycine-rich RNA-binding protein
  misc_feature (1)..(239): NCBI GI NO: 1084415 NR Description: RNA-binding protein - wood tobacco
  misc_feature (1)..(240): NCBI GI NO: 15822703 NR Description: RNA-binding protein precursor [Nicotiana tabacum]
  misc_feature (99)..(272): NCBI GI NO: 33416839 NR Description: Unknown (protein for MGC:66127) [Danio rerio]
  misc_feature (113)..(272): NCBI GI NO: 33416839 NR Description: Unknown (protein for MGC:66127) [Danio rerio]
  misc_feature (33)..(118): NCBI GI NO: 33416839 NR Description: Unknown (protein for MGC:66127) [Danio rerio]
  misc_feature (95)..(272): NCBI GI NO: 1710626 NR Description: Heterogeneous nuclear ribonucleo protein A3 homolog2
  misc_feature (33)..(118): NCBI GI NO: 1710626 NR Description: Heterogeneous nuclear ribonucleo protein A3 homolog2
MAFASRIGNALRRTLAPTCSPLLQPVRCMSSSKLFVGGLSFATDETTLKDAFSEFGNVLEARIIIDRESGRSRGFGFITFTSTEEASAAMTSMDGKELQGRNIRVNHANERAGGIRGGGGFGSGGGYGGGGGYPTGGYGGGGDSSGGGYSSGGYAANGYGVGSGSGNYSNASGGGYSGSDGYGNGAASGGYANNLSSGYNSNGRYNTIGSSDGNTGGYNSYPNPYGAGNYNTGGSSSSGGTLGEFGGGGFGGNNFAGNVTGGVSGGGASYGG

SEQ ID NO: 31987 - protein, 244 aa, Zea mays subsp. mays
  peptide (1)..(244): Ceres Seq. ID no. 12379331
  misc_feature (6)..(77): Pfam Name: a.k.a. RRM, RBD, or RNP domain Pfam Description: RNA recognition motif.
  misc_feature (1)..(244): NCBI GI NO: 15239505 NR Description: glycine-rich RNA-binding protein
  misc_feature (1)..(244): NCBI GI NO: 15822705 NR Description: RNA-binding protein precursor [Solanum tuberosum]
  misc_feature (1)..(242): NCBI GI NO: 15221187 NR Description: glycine-rich RNA-binding protein
  misc_feature (1)..(211): NCBI GI NO: 1084415 NR Description: RNA-binding protein - wood tobacco
  misc_feature (1)..(212): NCBI GI NO: 15822703 NR Description: RNA-binding protein precursor [Nicotiana tabacum]
  misc_feature (71)..(244): NCBI GI NO: 33416839 NR Description: Unknown (protein for MGC:66127) [Danio rerio]
  misc_feature (85)..(244): NCBI GI NO: 33416839 NR Description: Unknown (protein for MGC:66127) [Danio rerio]
  misc_feature (5)..(90): NCBI GI NO: 33416839 NR Description: Unknown (protein for MGC:66127) [Danio rerio]
  misc_feature (67)..(244): NCBI GI NO: 1710626 NR Description: Heterogeneous nuclear ribonucleo protein A3 homolog2
  misc_feature (5)..(90): NCBI GI NO: 1710626 NR Description: Heterogeneous nuclear ribonucleo protein A3 homolog2
MSSSKLFVGGLSFATDETTLKDAFSEFGNVLEARIIIDRESGRSRGFGFITFTSTEEASAAMTSMDGKELQGRNIRVNHANERAGGIRGGGGFGSGGGYGGGGGYPTGGYGGGGDSSGGGYSSGGYAANGYGVGSGSGNYSNASGGGYSGSDGYGNGAASGGYANNLSSGYNSNGRYNTIGSSDGNTGGYNSYPNPYGAGNYNTGGSSSSGGTLGEFGGGGFGGNNFAGNVTGGVSGGGASYGG

SEQ ID NO: 31988 - protein, 183 aa, Zea mays subsp. mays
  peptide (1)..(183): Ceres Seq. ID no. 12379332
  misc_feature (24)..(165): Pfam Name: Pfam Description:  Dehydrin
  misc_feature (1)..(183): NCBI GI NO: 15239505 NR Description: glycine-rich RNA-binding protein
  misc_feature (1)..(183): NCBI GI NO: 15822705 NR Description: RNA-binding protein precursor [Solanum tuberosum]
  misc_feature (1)..(181): NCBI GI NO: 15221187 NR Description: glycine-rich RNA-binding protein
  misc_feature (1)..(150): NCBI GI NO: 1084415 NR Description: RNA-binding protein - wood tobacco
  misc_feature (1)..(151): NCBI GI NO: 15822703 NR Description: RNA-binding protein precursor [Nicotiana tabacum]
  misc_feature (10)..(183): NCBI GI NO: 33416839 NR Description: Unknown (protein for MGC:66127) [Danio rerio]
  misc_feature (24)..(183): NCBI GI NO: 33416839 NR Description: Unknown (protein for MGC:66127) [Danio rerio]
  misc_feature (1)..(29): NCBI GI NO: 33416839 NR Description: Unknown (protein for MGC:66127) [Danio rerio]
  misc_feature (6)..(183): NCBI GI NO: 1710626 NR Description: Heterogeneous nuclear ribonucleo protein A3 homolog2
  misc_feature (1)..(29): NCBI GI NO: 1710626 NR Description: Heterogeneous nuclear ribonucleo protein A3 homolog2
MTSMDGKELQGRNIRVNHANERAGGIRGGGGFGSGGGYGGGGGYPTGGYGGGGDSSGGGYSSGGYAANGYGVGSGSGNYSNASGGGYSGSDGYGNGAASGGYANNLSSGYNSNGRYNTIGSSDGNTGGYNSYPNPYGAGNYNTGGSSSSGGTLGEFGGGGFGGNNFAGNVTGGVSGGGASYGG

SEQ ID NO: 31989 - DNA, 724 bp, Zea mays subsp. mays
  misc_feature (1)..(724): Ceres Seq. ID no. 14308548
cgtggtgtgccacagatcaccgtgtgctttgacatcgacgccaacggcatcctgaacgtgtctgccgaggacaagacaacggggcagaagaacaagatcacaatcaccaacgacaagggccgtctctccaaggaggagatcgagaagatggttcaggacgctgagaagtacaagtctgaggatgaggagcacaagaagaaggtggaggccaagaactcgctggagaactactcctacaacatgcgcaacacgatcaaggacgagaagattgcgtccaagctgccggccgatgacaagaagaagatcgaggacgccatcgacgcggccatcagctggctggacgccaaccagctcgccgaggcggacgagttcgaggacaagatgaaggagctggagagcctctgcaaccccatcatcgccaagatgtaccagggcgcgggtgaagacatgggcggcgctggcggcatggacgaggacgcccctgccggcagcggcggccctggccccaagatcgaggaggtggactaagcggtttgttgtcagtcttgagtgtgctgcagttgctggctggcccagttgctgccgagagttatcgtcagttggtgcggtgtgtccgcttaaactttatttgtggttggttggtacttttgtggtggttatttttttggacctcgtgatagtcggtcggttcaatgttatcgcggctactggcaaaccttaagtg

SEQ ID NO: 31990 - protein, 175 aa, Zea mays subsp. mays
  peptide (1)..(175): Ceres Seq. ID no. 14308549
  misc_feature (1)..(144): Pfam Name: Pfam Description:  Hsp70 protein
  misc_feature (1)..(175): NCBI GI NO: 629844 NR Description: dnaK-type molecular chaperone hsp70
  misc_feature (1)..(175): NCBI GI NO: 629843 NR Description: dnaK-type molecular chaperone hsp70
  misc_feature (1)..(175): NCBI GI NO: 34908140 NR Description: putative HSP70
  misc_feature (1)..(175): NCBI GI NO: 3962377 NR Description: heat shock protein 70 [Arabidopsis thaliana]
  misc_feature (1)..(175): NCBI GI NO: 15230534 NR Description: heat shock protein hsp70 [Arabidopsis thaliana]
  misc_feature (1)..(175): NCBI GI NO: 2827002 NR Description: HSP70 [Triticum aestivum]
  misc_feature (1)..(175): NCBI GI NO: 29124135 NR Description: heat shock protein cognate 70
  misc_feature (1)..(175): NCBI GI NO: 3986110 NR Description: heat shock protein 70 cognate [Salix gilgiana]
  misc_feature (1)..(175): NCBI GI NO: 1076746 NR Description: dnaK-type molecular chaperone hsp70 - rice
  misc_feature (1)..(175): NCBI GI NO: 21664287 NR Description: heat shock protein 70
RGVPQITVCFDIDANGILNVSAEDKTTGQKNKITITNDKGRLSKEEIEKMVQDAEKYKSEDEEHKKKVEAKNSLENYSYNMRNTIKDEKIASKLPADDKKKIEDAIDAAISWLDANQLAEADEFEDKMKELESLCNPIIAKMYQGAGEDMGGAGGMDEDAPAGSGGPGPKIEEVD

SEQ ID NO: 31991 - protein, 126 aa, Zea mays subsp. mays; identical to SEQ ID NO: 24825
  peptide (1)..(126): Ceres Seq. ID no. 14308550
  misc_feature (1)..(95): Pfam Name: Pfam Description:  Hsp70 protein
  misc_feature (1)..(126): NCBI GI NO: 629844 NR Description: dnaK-type molecular chaperone hsp70
  misc_feature (1)..(126): NCBI GI NO: 629843 NR Description: dnaK-type molecular chaperone hsp70
  misc_feature (1)..(126): NCBI GI NO: 34908140 NR Description: putative HSP70
  misc_feature (1)..(126): NCBI GI NO: 3962377 NR Description: heat shock protein 70 [Arabidopsis thaliana]
  misc_feature (1)..(126): NCBI GI NO: 15230534 NR Description: heat shock protein hsp70 [Arabidopsis thaliana]
  misc_feature (1)..(126): NCBI GI NO: 2827002 NR Description: HSP70 [Triticum aestivum]
  misc_feature (1)..(126): NCBI GI NO: 29124135 NR Description: heat shock protein cognate 70
  misc_feature (1)..(126): NCBI GI NO: 3986110 NR Description: heat shock protein 70 cognate [Salix gilgiana]
  misc_feature (1)..(126): NCBI GI NO: 1076746 NR Description: dnaK-type molecular chaperone hsp70 - rice
  misc_feature (1)..(126): NCBI GI NO: 21664287 NR Description: heat shock protein 70

SEQ ID NO: 31992 - protein, 95 aa, Zea mays subsp. mays
  peptide (1)..(95): Ceres Seq. ID no. 14308551
  misc_feature (1)..(64): Pfam Name: Pfam Description:  Hsp70 protein
  misc_feature (1)..(95): NCBI GI NO: 629844 NR Description: dnaK-type molecular chaperone hsp70
  misc_feature (1)..(95): NCBI GI NO: 629843 NR Description: dnaK-type molecular chaperone hsp70
  misc_feature (1)..(95): NCBI GI NO: 34908140 NR Description: putative HSP70
  misc_feature (1)..(95): NCBI GI NO: 3962377 NR Description: heat shock protein 70 [Arabidopsis thaliana]
  misc_feature (1)..(95): NCBI GI NO: 15230534 NR Description: heat shock protein hsp70 [Arabidopsis thaliana]
  misc_feature (1)..(95): NCBI GI NO: 2827002 NR Description: HSP70 [Triticum aestivum]
  misc_feature (1)..(95): NCBI GI NO: 29124135 NR Description: heat shock protein cognate 70
  misc_feature (1)..(95): NCBI GI NO: 3986110 NR Description: heat shock protein 70 cognate [Salix gilgiana]
  misc_feature (1)..(95): NCBI GI NO: 1076746 NR Description: dnaK-type molecular chaperone hsp70 - rice
  misc_feature (1)..(95): NCBI GI NO: 21664287 NR Description: heat shock protein 70
MRNTIKDEKIASKLPADDKKKIEDAIDAAISWLDANQLAEADEFEDKMKELESLCNPIIAKMYQGAGEDMGGAGGMDEDAPAGSGGPGPKIEEVD

SEQ ID NO: 31993 - DNA, 1069 bp, Zea mays subsp. mays; identical to SEQ ID NO: 25591
  misc_feature (1)..(1069): Ceres Seq. ID no. 12403740

SEQ ID NO: 31994 - protein, 244 aa, Zea mays subsp. mays; identical to SEQ ID NO: 25592
  peptide (1)..(244): Ceres Seq. ID no. 12403741
  misc_feature (9)..(98): Pfam Name: Pfam Description:  MtN3/saliva family
  misc_feature (1)..(244): NCBI GI NO: 34912462 NR Description: MtN3-like protein
  misc_feature (1)..(244): NCBI GI NO: 34912454 NR Description: P0681B11.31
  misc_feature (1)..(225): NCBI GI NO: 18405611 NR Description: Expressed protein; protein id: At3g28007
  misc_feature (1)..(225): NCBI GI NO: 21592355 NR Description: contains similarity to nodulin MtN3 protein
  misc_feature (8)..(219): NCBI GI NO: 18413388 NR Description: putative protein; protein id: At4g10850
  misc_feature (1)..(225): NCBI GI NO: 18421965 NR Description: putative protein; protein id: At5g40260
  misc_feature (1)..(194): NCBI GI NO: 10177463 NR Description: contains similarity to MtN3 protein~gene_id:MQB2
  misc_feature (39)..(217): NCBI GI NO: 431154 NR Description: ORF [Lilium longiflorum]
  misc_feature (8)..(243): NCBI GI NO: 15219732 NR Description: hypothetical protein; protein id: At1g66770.1
  misc_feature (39)..(225): NCBI GI NO: 11994120 NR Description: contains similarity to nodulin MtN3protein~gene_id:MMG15

SEQ ID NO: 31995 - protein, 201 aa, Zea mays subsp. mays; identical to SEQ ID NO: 25593
  peptide (1)..(201): Ceres Seq. ID no. 12403742

SEQ ID NO: 31996 - protein, 190 aa, Zea mays subsp. mays; identical to SEQ ID NO: 25594
  peptide (1)..(190): Ceres Seq. ID no. 12403743
  misc_feature (1)..(190): NCBI GI NO: 34912462 NR Description: MtN3-like protein
  misc_feature (1)..(190): NCBI GI NO: 34912454 NR Description: P0681B11.31
  misc_feature (1)..(171): NCBI GI NO: 18405611 NR Description: Expressed protein; protein id: At3g28007
  misc_feature (1)..(171): NCBI GI NO: 21592355 NR Description: contains similarity to nodulin MtN3 protein
  misc_feature (1)..(165): NCBI GI NO: 18413388 NR Description: putative protein; protein id: At4g10850
  misc_feature (1)..(171): NCBI GI NO: 18421965 NR Description: putative protein; protein id: At5g40260
  misc_feature (1)..(140): NCBI GI NO: 10177463 NR Description: contains similarity to MtN3 protein~gene_id:MQB2
  misc_feature (1)..(163): NCBI GI NO: 431154 NR Description: ORF [Lilium longiflorum]
  misc_feature (1)..(189): NCBI GI NO: 15219732 NR Description: hypothetical protein; protein id: At1g66770.1
  misc_feature (1)..(171): NCBI GI NO: 11994120 NR Description: contains similarity to nodulin MtN3protein~gene_id:MMG15

SEQ ID NO: 31997 - DNA, 1181 bp, Zea mays subsp. mays
  misc_feature (1)..(1181): Ceres Seq. ID no. 12364890
  misc_feature (934)..(934): n is a, c, t, g, unknown, or other
  misc_feature (428)..(428): n is a, c, t, g, unknown, or other
  misc_feature (839)..(839): n is a, c, t, g, unknown, or other
  misc_feature (831)..(831): n is a, c, t, g, unknown, or other
  misc_feature (842)..(842): n is a, c, t, g, unknown, or other
  misc_feature (435)..(435): n is a, c, t, g, unknown, or other
  misc_feature (427)..(427): n is a, c, t, g, unknown, or other
  misc_feature (830)..(830): n is a, c, t, g, unknown, or other
  misc_feature (958)..(958): n is a, c, t, g, unknown, or other
  misc_feature (837)..(837): n is a, c, t, g, unknown, or other
  misc_feature (838)..(838): n is a, c, t, g, unknown, or other
  misc_feature (935)..(935): n is a, c, t, g, unknown, or other
  misc_feature (840)..(840): n is a, c, t, g, unknown, or other
  misc_feature (356)..(356): n is a, c, t, g, unknown, or other
attgttcactgggaggaccaactagataattcatcatggctatcatactttacaagcagccaatgccgatccttatggacatatgttacaccaccaagaggcaagagcctctcgctcgctaccaatgcgcacgtcacaccgtggtctccttcgccgccgccgccgcgtcgtcatccacccacttggcgtgccacagcgccgaccgcctccggggcagcatggacccgacacagctggcgagagtggcgcggaacttggcgtccccggggcggagcatggcgggcagtggcagcctgctgaccccgcgcgcggcgcaggcctcgtaacgcggcacgatgcgcgtggccagcgcgtangagaagtactcggggaagtcgtacagctcgtcggcgcggcgggccatggcgcccaggaggtagtccgcctnnagccggntgtttccctccacgccgtacccgaagagcgcggggaagcggcgcgccatggagcgggcggcgcgcgccggcaggcccagcgactcgaggaactcgagccgcggcagcagcttgccctccacggagaaggatagcaggtcggcgcggcggtgcaggtcgggcacgccgagcgcgcgcaggaagtagagcgtgggccgcagccgcgccgccacgggagagacgagcaggcgcgggcgccgccggagcacgcgcgggaggtcggcctcggcgacgcccgcctcctccgtgaggaaccggagcgcggcctcgacggcctccgcggacacggacagcagctccgggcacatccccgccgcgcgccggaggtcggcgggcggcacgcccgcctcgagcagnncctgcnnnngngcccgcggccacgggcggcgacggcagcacgggctccggcgccgcgggcgggagacccggggccgcgaggctggtgggcctggtccgcagcnngacggcgacgacgcgtagcctgntgcggcgcggcgccgccggcctgggcccagattccatgccctcgtgccctagcagggccagggcggtgcgggtggcggccatagtccccgtcgctcgcaggtttctctttttctctgtagtggtgaggcgtaaagaggataagggtgtgagatggatctggtcgaaccaccgcacgggcacgagtagtggtggtctcgagaaatgtctaaaaaggtgtttttt

SEQ ID NO: 31998 - protein, 161 aa, Zea mays subsp. mays
  peptide (1)..(161): Ceres Seq. ID no. 12364891
  misc_feature (92)..(92): Xaa is any aa, unknown or other
  misc_feature (115)..(115): Xaa is any aa, unknown or other
  misc_feature (116)..(116): Xaa is any aa, unknown or other
  misc_feature (118)..(118): Xaa is any aa, unknown or other
MLHHQEARASRSLPMRTSHRGLLRRRRRVVIHPLGVPQRRPPPGQHGPDTAGESGAELGVPGAEHGGQWQPADPARGAGLVTRHDARGQRVXEVLGEVVQLVGAAGHGAQEVVRXXPXVSLHAVPEERGEAARHGAGGARRQAQRLEELEPRQQLALHGEG

SEQ ID NO: 31999 - protein, 147 aa, Zea mays subsp. mays
  peptide (1)..(147): Ceres Seq. ID no. 12364892
  misc_feature (78)..(78): Xaa is any aa, unknown or other
  misc_feature (101)..(101): Xaa is any aa, unknown or other
  misc_feature (102)..(102): Xaa is any aa, unknown or other
  misc_feature (104)..(104): Xaa is any aa, unknown or other
MRTSHRGLLRRRRRVVIHPLGVPQRRPPPGQHGPDTAGESGAELGVPGAEHGGQWQPADPARGAGLVTRHDARGQRVXEVLGEVVQLVGAAGHGAQEVVRXXPXVSLHAVPEERGEAARHGAGGARRQAQRLEELEPRQQLALHGEG

SEQ ID NO: 32000 - protein, 99 aa, Zea mays subsp. mays
  peptide (1)..(99): Ceres Seq. ID no. 12364893
  misc_feature (55)..(99): NCBI GI NO: 29247944 NR Description: GLP_26_54603_52153 [Giardia lamblia ATCC 50803]
  misc_feature (49)..(99): NCBI GI NO: 29829093 NR Description: putative translation initiation factor IF-2
  misc_feature (47)..(99): NCBI GI NO: 29247944 NR Description: GLP_26_54603_52153 [Giardia lamblia ATCC 50803]
  misc_feature (52)..(99): NCBI GI NO: 23106243 NR Description: hypothetical protein [Azotobacter vinelandii]
  misc_feature (43)..(99): NCBI GI NO: 22960029 NR Description: hypothetical protein [Rhodobacter sphaeroides]
  misc_feature (31)..(99): NCBI GI NO: 6690017 NR Description: NTR [Herpesvirus papio]
  misc_feature (49)..(99): NCBI GI NO: 22957039 NR Description: hypothetical protein [Rhodobacter sphaeroides]
  misc_feature (47)..(99): NCBI GI NO: 13559031 NR Description: bA11M20
  misc_feature (56)..(99): NCBI GI NO: 2498095 NR Description: 5E5 ANTIGEN
  misc_feature (31)..(67): NCBI GI NO: 93144 NR Description: hypothetical protein - suid herpesvirus 1
IVHWEDQLDNSSWLSYFTSSQCRSLWTYVTPPRGKSLSLATNAHVTPWSPSPPPPRRHPPTWRATAPTASGAAWTRHSWREWRGTWRPRGGAWRAVAAC

SEQ ID NO: 32001 - DNA, 1441 bp, Zea mays subsp. mays
  misc_feature (1)..(1441): Ceres Seq. ID no. 12383271
atcccctcagtcctcagtccctcacacactcactatacactgctctgctgcagcaagaaggaagaagctagcgcctccctagctctcgttgtcagcaatggccaccaccgccgcgtccagcctcctcaagtcctccttcgcgggctcccggctcccttcggccacgcgcaccaccaccccgtcgtccgtggccgtggccaccccgcgcgccggcggcggccccatccgcgcgtccatctcctcccccaacccgccctacgacctgacgtccttccggttcagccccatcaaggagtccatcgtgtcccgcgagatgacccggcgctacatgacggacatgatcacccacgccgacaccgacgtggtgatcgtgggcgccgggtccgcgggcctgtcctgcgcgtacgagctgtccaaggaccccaccgtgagcgtcgccatcgtggagcagtccgtgtccccgggcggcggcgcgtggctgggcgggcagctgttctcggccatggtggtgcgcaggccggcgcacctgttcctggacgagctgggcgtgggctacgacgaggccgaggactacgtggtggtcaagcacgcggcgctgttcacgtccaccgtgatgagccggctcctggcgcggcccaacgtgaagctgttcaacgccgtggcggtggaggacctgatcgtgcggcgggggcgcgtcggcggcgtggtcaccaactgggcgctcgtgtccatgaaccacgacacgcagtcgtgcatggaccccaacgtgatggaggccaaggtggtggtcagctcctgcggccacgacgggcccttcggcgccaccggcgtcaagaggctccaggacatcggcatgatcagcgccgtgcccgggatgaaggcgctcgacatgaacgccgccgaggacgagatcgtgcgcctcacgcgcgaggtcgtgcccggcatgatcgtcaccgggatggaggtcgccgagatcgacggcgccccgaggatgggcccgacgttcggcgccatgatgatctccggccagaaggcggcgcacctggcgctgaaggcactgggcaggcccaacgccgtggacgggaccatccccgaggtgtcgccggcgctgcgcgaggagttcgtgattgcatccaaggacgacgaggtcgtggacgcctgagcgagcatccacgcgccagcatgcaagcagcgtcttatctgggccggcgccatcacggggtttcttcttttaatctgggactttgttgttgttggacgaatgaattcccttcgatcggttagctttaatctgtctcgttagtgtgtcgtgttcgtgtagcaccatgccacagctacgccatgccgtgtgctctgtcacgtgggggccactcgtggggtctcctgctgctgtcagaacgaataagagaagatggaattgtggtgaaaaaaaaaaaaaaaa

SEQ ID NO: 32002 - protein, 427 aa, Zea mays subsp. mays
  peptide (1)..(427): Ceres Seq. ID no. 12383272
  misc_feature (156)..(380): Pfam Name: Pfam Description:  HlyD family secretion protein
  misc_feature (62)..(407): NCBI GI NO: 23018055 NR Description: hypothetical protein [Thermobifida fusca]
  misc_feature (106)..(404): NCBI GI NO: 22958051 NR Description: hypothetical protein [Rhodobacter sphaeroides]
  misc_feature (134)..(337): NCBI GI NO: 17569267 NR Description: Putative nuclear protein, nematode specific (112
IPSVLSPSHTHYTLLCCSKKEEASASLALVVSNGHHRRVQPPQVLLRGLPAPFGHAHHHPVVRGRGHPARRRRPHPRVHLLPQPALRPDVLPVQPHQGVHRVPRDDPALHDGHDHPRRHRRGDRGRRVRGPVLRVRAVQGPHRERRHRGAVRVPGRRRVAGRAAVLGHGGAQAGAPVPGRAGRGLRRGRGLRGGQARGAVHVHRDEPAPGAAQREAVQRRGGGGPDRAAGARRRRGHQLGARVHEPRHAVVHGPQRDGGQGGGQLLRPRRALRRHRRQEAPGHRHDQRRARDEGARHERRRGRDRAPHARGRARHDRHRDGGRRDRRRPEDGPDVRRHDDLRPEGGAPGAEGTGQAQRRGRDHPRGVAGAARGVRDCIQGRRGRGRLSEHPRASMQAASYLGRRHHGVSSFNLGLCCCWTNEFPSIG

SEQ ID NO: 32003 - protein, 354 aa, Zea mays subsp. mays
  peptide (1)..(354): Ceres Seq. ID no. 12383273
  misc_feature (60)..(303): Pfam Name: Pfam Description:  Thi4 family
  misc_feature (1)..(354): NCBI GI NO: 2501190 NR Description: Thiazole biosynthetic enzyme 1-2
  misc_feature (1)..(354): NCBI GI NO: 2501189 NR Description: Thiazole biosynthetic enzyme 1-1
  misc_feature (1)..(354): NCBI GI NO: 27261025 NR Description: putative thiamine biosynthetic enzyme
  misc_feature (1)..(354): NCBI GI NO: 6094476 NR Description: Thiazole biosynthetic enzyme
  misc_feature (6)..(354): NCBI GI NO: 6552395 NR Description: thiamin biosynthetic enzyme [Glycine max]
  misc_feature (6)..(354): NCBI GI NO: 6552397 NR Description: thiamin biosynthetic enzyme [Glycine max]
  misc_feature (6)..(354): NCBI GI NO: 6552391 NR Description: thiamin biosynthetic enzyme [Glycine max]
  misc_feature (6)..(354): NCBI GI NO: 6552393 NR Description: thiamin biosynthetic enzyme [Glycine max]
  misc_feature (1)..(354): NCBI GI NO: 30013665 NR Description: putative chloroplast thiazole biosynthetic protein
  misc_feature (1)..(354): NCBI GI NO: 2501187 NR Description: Thiazole biosynthetic enzyme
MATTAASSLLKSSFAGSRLPSATRTTTPSSVAVATPRAGGGPIRASISSPNPPYDLTSFRFSPIKESIVSREMTRRYMTDMITHADTDVVIVGAGSAGLSCAYELSKDPTVSVAIVEQSVSPGGGAWLGGQLFSAMVVRRPAHLFLDELGVGYDEAEDYVVVKHAALFTSTVMSRLLARPNVKLFNAVAVEDLIVRRGRVGGVVTNWALVSMNHDTQSCMDPNVMEAKVVVSSCGHDGPFGATGVKRLQDIGMISAVPGMKALDMNAAEDEIVRLTREVVPGMIVTGMEVAEIDGAPRMGPTFGAMMISGQKAAHLALKALGRPNAVDGTIPEVSPALREEFVIASKDDEVVDA

SEQ ID NO: 32004 - protein, 282 aa, Zea mays subsp. mays
  peptide (1)..(282): Ceres Seq. ID no. 12383274
  misc_feature (1)..(231): Pfam Name: Pfam Description:  Thi4 family
  misc_feature (1)..(282): NCBI GI NO: 2501190 NR Description: Thiazole biosynthetic enzyme 1-2
  misc_feature (1)..(282): NCBI GI NO: 2501189 NR Description: Thiazole biosynthetic enzyme 1-1
  misc_feature (1)..(282): NCBI GI NO: 27261025 NR Description: putative thiamine biosynthetic enzyme
  misc_feature (1)..(282): NCBI GI NO: 6094476 NR Description: Thiazole biosynthetic enzyme
  misc_feature (1)..(282): NCBI GI NO: 6552395 NR Description: thiamin biosynthetic enzyme [Glycine max]
  misc_feature (1)..(282): NCBI GI NO: 6552397 NR Description: thiamin biosynthetic enzyme [Glycine max]
  misc_feature (1)..(282): NCBI GI NO: 6552391 NR Description: thiamin biosynthetic enzyme [Glycine max]
  misc_feature (1)..(282): NCBI GI NO: 6552393 NR Description: thiamin biosynthetic enzyme [Glycine max]
  misc_feature (1)..(282): NCBI GI NO: 30013665 NR Description: putative chloroplast thiazole biosynthetic protein
  misc_feature (1)..(282): NCBI GI NO: 2501187 NR Description: Thiazole biosynthetic enzyme
MTRRYMTDMITHADTDVVIVGAGSAGLSCAYELSKDPTVSVAIVEQSVSPGGGAWLGGQLFSAMVVRRPAHLFLDELGVGYDEAEDYVVVKHAALFTSTVMSRLLARPNVKLFNAVAVEDLIVRRGRVGGVVTNWALVSMNHDTQSCMDPNVMEAKVVVSSCGHDGPFGATGVKRLQDIGMISAVPGMKALDMNAAEDEIVRLTREVVPGMIVTGMEVAEIDGAPRMGPTFGAMMISGQKAAHLALKALGRPNAVDGTIPEVSPALREEFVIASKDDEVVDA

SEQ ID NO: 32005 - DNA, 1687 bp, Zea mays subsp. mays
  misc_feature (1)..(1687): Ceres Seq. ID no. 12345075
gctccacgtcacgacgccgcatctaaccctccggcgactcatcgccggcgagccggtccgccacgccatagcctcgtcctgaagcgcacttaatcctacgtctcgttcctctctcgcccccggtaccctccataggcatgggaatggggtctgcgagagggggcgcagggggatggctccccggcgagcggtggcggcgggtcatcttcctcgctctggcggccgtctcgttcctcatctcactcatactcctcttcctatccgcgccgcgtctccgcctcccaagtgtcgtcctgccttacaccaccgcttccgcttctgccgtccgccgcgggcccggcgagccgccctgcctggtgtacctgctgaccggcgcgcgcggcgacgggcgccgcctcctcaggctcctcctcgcggtttaccacccgcgcaaccggtacgtgctccacctctccgccgacgcgccagacgacgagcgcctgagcctcgccaccggggtcgtcgccgcggcgcccgccgtgggagcattcgagaacgtggttattattggcaatcccaccgccgggacgcccgtggggtcctccggactcgcccggcacgctccgcgctgcggccgtgctgctccggctccacgctgactgggactggttcctcaccctcaatgccgccgactaccccctcgtcacacaggatgacctgattcatgtcctttcttctgtcccaagggatcttaacttcattgaccacaccggtgacgttggatcaaaagaacctgagaaagttcaacaaattatagtcgatgctggaatttacttgtcagggaggaccaacttctttcgaggaacacagaaacgagcagctcctgaggcttttaagttctttacaggttctccatgggtcatattaaaccggcaatttatagagtactgcattcttgcttgggagaatctccctaggattcttctcatgtacttcaacaatgtaatacaacctcaggaagggtatttccagacagtcatctgcaactcactggacttccgtaatttcactgtgaacaatgacttgaggttcatggtgcaagatgattccgctcagaaaaagtcccttttcacgagcagggaacattatggtcacatggtggatagtggggcacccttcgcaaggccgtttcaggagaatgatcctctgctggaccagatcgacggcaatatactcaagcgttggagccatggacagttcctggtgcttggtgcacaggaaggaagaggtggttcagtgatccatgttcccagtggggcgatgtgaatgttttgagaccaggtcctcaagcagtgatgttgcaccaatatgtaaatcggaccttagaagaagcaaagtctagcagcaattcatgcaggcggtagcagcattggcgtctagaacctcatgtcccatggttgaaagctttgagctttttccgcttatccactaagggttctccactctgctgaataaatagctgccacatgtctaagctgaaacaagcactcgtcgcacctggaacaaagccatggagggatgttcttttctgatattttcatgatgactatcatagtcacggatcaggagtttcactttggtctgtgattaatctgtgcaatccccatatttggctcatataacacttccaggcgctgataataggctg

SEQ ID NO: 32006 - protein, 175 aa, Zea mays subsp. mays
  peptide (1)..(175): Ceres Seq. ID no. 12345076
  misc_feature (1)..(166): NCBI GI NO: 15219287 NR Description: arginine/serine-rich protein, putative
  misc_feature (1)..(166): NCBI GI NO: 15027957 NR Description: putative arginine/serine-rich protein
  misc_feature (1)..(152): NCBI GI NO: 29247944 NR Description: GLP_26_54603_52153 [Giardia lamblia ATCC 50803]
MAPRRAVAAGHLPRSGGRLVPHLTHTPLPIRAASPPPKCRPALHHRFRFCRPPRARRAALPGVPADRRARRRAPPPQAPPRGLPPAQPVRAPPLRRRARRRAPEPRHRGRRRGARRGSIRERGYYWQSHRRDARGVLRTRPARSALRPCCSGSTLTGTGSSPSMPPTTPSSHRMT

SEQ ID NO: 32007 - protein, 166 aa, Zea mays subsp. mays
  peptide (1)..(166): Ceres Seq. ID no. 12345077
  misc_feature (75)..(152): Pfam Name: Pfam Description:  Core-2/I-Branching enzyme
  misc_feature (25)..(152): NCBI GI NO: 34895394 NR Description: P0445D12.4
  misc_feature (28)..(152): NCBI GI NO: 18409754 NR Description: N-acetylglucosaminyltransferase family
  misc_feature (67)..(137): NCBI GI NO: 15242199 NR Description: N-acetylglucosaminyltransferase family
  misc_feature (57)..(152): NCBI GI NO: 32489778 NR Description: OSJNBb0018A10.9
  misc_feature (70)..(155): NCBI GI NO: 15242532 NR Description: N-acetylglucosaminyltransferase family
  misc_feature (69)..(152): NCBI GI NO: 15218824 NR Description: N-acetylglucosaminyltransferase family
  misc_feature (69)..(152): NCBI GI NO: 15236287 NR Description: N-acetylglucosaminyltransferase family
  misc_feature (70)..(152): NCBI GI NO: 15229570 NR Description: hypothetical protein; protein id: At3g24040.1
  misc_feature (32)..(152): NCBI GI NO: 18404468 NR Description: N-acetylglucosaminyltransferase family
  misc_feature (71)..(152): NCBI GI NO: 7485441 NR Description: probable RING zinc finger protein
MGMGSARGGAGGWLPGERWRRVIFLALAAVSFLISLILLFLSAPRLRLPSVVLPYTTASASAVRRGPGEPPCLVYLLTGARGDGRRLLRLLLAVYHPRNRYVLHLSADAPDDERLSLATGVVAAAPAVGAFENVVIIGNPTAGTPVGSSGLARHAPRCGRAAPAPR

SEQ ID NO: 32008 - protein, 164 aa, Zea mays subsp. mays
  peptide (1)..(164): Ceres Seq. ID no. 12345078
  misc_feature (73)..(150): Pfam Name: Pfam Description:  Core-2/I-Branching enzyme
  misc_feature (23)..(150): NCBI GI NO: 34895394 NR Description: P0445D12.4
  misc_feature (26)..(150): NCBI GI NO: 18409754 NR Description: N-acetylglucosaminyltransferase family
  misc_feature (65)..(135): NCBI GI NO: 15242199 NR Description: N-acetylglucosaminyltransferase family
  misc_feature (55)..(150): NCBI GI NO: 32489778 NR Description: OSJNBb0018A10.9
  misc_feature (68)..(153): NCBI GI NO: 15242532 NR Description: N-acetylglucosaminyltransferase family
  misc_feature (67)..(150): NCBI GI NO: 15218824 NR Description: N-acetylglucosaminyltransferase family
  misc_feature (67)..(150): NCBI GI NO: 15236287 NR Description: N-acetylglucosaminyltransferase family
  misc_feature (68)..(150): NCBI GI NO: 15229570 NR Description: hypothetical protein; protein id: At3g24040.1
  misc_feature (30)..(150): NCBI GI NO: 18404468 NR Description: N-acetylglucosaminyltransferase family
  misc_feature (69)..(150): NCBI GI NO: 7485441 NR Description: probable RING zinc finger protein
MGSARGGAGGWLPGERWRRVIFLALAAVSFLISLILLFLSAPRLRLPSVVLPYTTASASAVRRGPGEPPCLVYLLTGARGDGRRLLRLLLAVYHPRNRYVLHLSADAPDDERLSLATGVVAAAPAVGAFENVVIIGNPTAGTPVGSSGLARHAPRCGRAAPAPR

SEQ ID NO: 32009 - DNA, 774 bp, Zea mays subsp. mays
  misc_feature (1)..(774): Ceres Seq. ID no. 12367092
agtcatcatgactcactaagcactgtccttcctgatcccaccgcggtctccttccgcgacacgcgcacacgccacagcgcattcgcgtacgtcaacggacgtcgaacccatcgcccatgggaggagggcacgaggagcaggagggtggcggcgcaaaggccgggggctactcctccggtctcccgccgtcggagccgccgcaggagtacgggtacggcacgttccagggccctcggcatcctcccgtcgggttcccgcagcctgccccgcctcccgggttcggcggcggcggcggctaccacaaccagcaacagccgtacgcgcacgcggagacgtactacgcccaggggtaccaggccgtgccaggctatggtcctgttgctgaaggaagacctgtgagaatgaggcgtctcccatgttgtggcctcggcttaggctggtgcctgttcattgctgggtttttccttgctgccattccatggtacattggggctttcgttctgatatgcgtgcgggtacatgaccaccgagagaaaccaggatatgttgcttgcacaattgctgccgttgttgctgccgttgccatattcctgggggtaactaagggaacacacgtgtggtgaattgcttccagagaaggcaatggatttatacttgtatagtatctgtgtgtattaaaagtgtggagcgacatcgagatgctcttatgacttatgttcatacatattctactttgtaatgaaattttagatgtagtaatgcaccgtctgcttc

SEQ ID NO: 32010 - protein, 168 aa, Zea mays subsp. mays
  peptide (1)..(168): Ceres Seq. ID no. 12367093
  misc_feature (4)..(168): NCBI GI NO: 18394436 NR Description: expressed protein; protein id: At1g17080
  misc_feature (4)..(168): NCBI GI NO: 21554011 NR Description: unknown [Arabidopsis thaliana]
  misc_feature (4)..(168): NCBI GI NO: 18404524 NR Description: expressed protein; protein id: At1g53560
  misc_feature (30)..(168): NCBI GI NO: 21593837 NR Description: 60S ribosomal protein L18A, putative
  misc_feature (30)..(168): NCBI GI NO: 18397305 NR Description: 60S ribosomal protein L18A, putative
  misc_feature (30)..(149): NCBI GI NO: 25518134 NR Description: probable 60S ribosomal protein L18A - Arabidopsisthaliana
  misc_feature (48)..(168): NCBI GI NO: 18400450 NR Description: Expressed protein; protein id: At3g14595
  misc_feature (48)..(168): NCBI GI NO: 21554784 NR Description: unknown [Arabidopsis thaliana]
MGGGHEEQEGGGAKAGGYSSGLPPSEPPQEYGYGTFQGPRHPPVGFPQPAPPPGFGGGGGYHNQQQPYAHAETYYAQGYQAVPGYGPVAEGRPVRMRRLPCCGLGLGWCLFIAGFFLAAIPWYIGAFVLICVRVHDHREKPGYVACTIAAVVAAVAIFLGVTKGTHVW

SEQ ID NO: 32011 - protein, 132 aa, Zea mays subsp. mays
  peptide (1)..(132): Ceres Seq. ID no. 12367094
SHHDSLSTVLPDPTAVSFRDTRTRHSAFAYVNGRRTHRPWEEGTRSRRVAAQRPGATPPVSRRRSRRRSTGTARSRALGILPSGSRSLPRLPGSAAAAATTTSNSRTRTRRRTTPRGTRPCQAMVLLLKEDL

SEQ ID NO: 32012 - DNA, 1051 bp, Zea mays subsp. mays; identical to SEQ ID NO: 31851
  misc_feature (1)..(1051): Ceres Seq. ID no. 12544505

SEQ ID NO: 32013 - protein, 210 aa, Zea mays subsp. mays; identical to SEQ ID NO: 31852
  peptide (1)..(210): Ceres Seq. ID no. 12544506
  misc_feature (12)..(208): NCBI GI NO: 32489696 NR Description: OSJNBb0004G23.9
  misc_feature (1)..(205): NCBI GI NO: 7406663 NR Description: putative ripening-related protein [Vitis vinifera]
  misc_feature (1)..(210): NCBI GI NO: 112717 NR Description: 21 KD PROTEIN PRECURSOR (1.2 PROTEIN)
  misc_feature (13)..(210): NCBI GI NO: 15241799 NR Description: ripening-related protein - like
  misc_feature (13)..(210): NCBI GI NO: 21618088 NR Description: ripening-related protein-like
  misc_feature (14)..(205): NCBI GI NO: 18407657 NR Description: expressed protein; protein id: At1g62770
  misc_feature (14)..(205): NCBI GI NO: 21618013 NR Description: putative ripening-related protein
  misc_feature (34)..(204): NCBI GI NO: 18394174 NR Description: expressed protein; protein id: At1g14890
  misc_feature (13)..(205): NCBI GI NO: 15234547 NR Description: putative protein; protein id: At4g12390
  misc_feature (24)..(205): NCBI GI NO: 7488727 NR Description: 21K protein precursor - alfalfa

SEQ ID NO: 32014 - protein, 121 aa, Zea mays subsp. mays; identical to SEQ ID NO: 31853
  peptide (1)..(121): Ceres Seq. ID no. 12544507
  misc_feature (75)..(121): NCBI GI NO: 5821145 NR Description: RNA binding protein [Homo sapiens]
  misc_feature (75)..(121): NCBI GI NO: 5821143 NR Description: RNA binding protein [Homo sapiens]
  misc_feature (75)..(121): NCBI GI NO: 6649242 NR Description: splicing coactivator subunit SRm300 [Homo sapiens]
  misc_feature (75)..(121): NCBI GI NO: 19923466 NR Description: splicing coactivator subunit SRm300
  misc_feature (26)..(121): NCBI GI NO: 5821151 NR Description: RNA binding protein [Homo sapiens]
  misc_feature (26)..(121): NCBI GI NO: 6634015 NR Description: KIAA0324 protein [Homo sapiens]
  misc_feature (26)..(121): NCBI GI NO: 7512967 NR Description: hypothetical protein KIAA0324 - human (fragment)
  misc_feature (26)..(121): NCBI GI NO: 6649242 NR Description: splicing coactivator subunit SRm300 [Homo sapiens]
  misc_feature (26)..(121): NCBI GI NO: 19923466 NR Description: splicing coactivator subunit SRm300

SEQ ID NO: 32015 - DNA, 982 bp, Zea mays subsp. mays
  misc_feature (1)..(982): Ceres Seq. ID no. 12594984
aaaggaaactcactcccactttactcctatccactgcggcctggacgcgtgcgagaggcttgaccaagcagcagcagcagcagcagcgatggcgcctctgaagctgtacgggatgccgctgtcccccaacgtggtgcgcgtggccaccgtgctcaacgagaagggcctcgacttcgagatcgtccccgtcgacctcaccaccggcgcccacaagcagcccgacttcctcaccctcaaccctttcggccagatcccggctctcgtcgacggagacgaagtcctcttcgagtcccgcgcgatcaaccggtacatcgccagcaagtacgcgtcagggcacggacctgctccccgcgacggcgtcggcggcgaagctggaggtgtggctggaggtggagtcgcaccacttctacccgaacgcatcgccgctggtgttccagctgctcgtgaggccgctcctgggcggcgcccccgacgcggcggtggtggagaagcacgcggagcagctcgccaaggtgctcgacgtgtacgaggcgcacctggcccgcaacaagtaccctcgccggggacaagttcacgctcgccgacgccaaccacgcgtcctacctgctctacctcagcaagacccccaaggccgggctcgtcgccgcccgcccccacgtcaaggcctggtgggaggccatcgccgcccgccccgcgttccagaagaccgtcgccgccatccccttgcccccgccgccctcctcctcggcttgacctcgccttgcgctgcctgggtcgcggatgcgtcggagccccgagtcgaataaaagaggccgcatcctgtcttgcatttgctgctgcgccatgtgctataacagcctgtgtaataaacactgttgctttcgtgtgtgttcattgccttttggttggttggtccttgcatatcctactagtgctgatctttttgtgaagcttggattggatggacgcgttttcttcgccg

SEQ ID NO: 32016 - protein, 315 aa, Zea mays subsp. mays
  peptide (1)..(315): Ceres Seq. ID no. 12594985
  misc_feature (176)..(248): Pfam Name: Pfam Description:  Extensin-like region
  misc_feature (30)..(110): NCBI GI NO: 25287127 NR Description: glutathione transferase (EC 2.5.1.18) III(b)
  misc_feature (30)..(110): NCBI GI NO: 25287128 NR Description: glutathione transferase (EC 2.5.1.18) III(a)
  misc_feature (31)..(110): NCBI GI NO: 3891593 NR Description: Structure Of Glutathione S-Transferase Iii In ApoForm
  misc_feature (33)..(118): NCBI GI NO: 34907162 NR Description: putative glutathione S-transferase
  misc_feature (33)..(118): NCBI GI NO: 11177843 NR Description: putative glutathione S-transferase OsGSTF4
  misc_feature (30)..(116): NCBI GI NO: 23504745 NR Description: glutathione transferase F5 [Triticum aestivum]
  misc_feature (30)..(110): NCBI GI NO: 1170090 NR Description: GLUTATHIONE S-TRANSFERASE III
  misc_feature (33)..(108): NCBI GI NO: 18150415 NR Description: glutathione S-transferase [Allium cepa]
  misc_feature (30)..(248): NCBI GI NO: 66616 NR Description: glutathione transferase (EC 2
  misc_feature (30)..(107): NCBI GI NO: 5923877 NR Description: glutathione S-transferase [Triticum aestivum]
KETHSHFTPIHCGLDACERLDQAAAAAAAMAPLKLYGMPLSPNVVRVATVLNEKGLDFEIVPVDLTTGAHKQPDFLTLNPFGQIPALVDGDEVLFESRAINRYIASKYASGHGPAPRDGVGGEAGGVAGGGVAPLLPERIAAGVPAAREAAPGRRPRRGGGGEARGAARQGARRVRGAPGPQQVPSPGTSSRSPTPTTRPTCSTSARPPRPGSSPPAPTSRPGGRPSPPAPRSRRPSPPSPCPRRPPPRLDLALRCLGRGCVGAPSRIKEAASCLAFAAAPCAITACVINTVAFVCVHCLLVGWSLHILLVLIFL

SEQ ID NO: 32017 - protein, 286 aa, Zea mays subsp. mays
  peptide (1)..(286): Ceres Seq. ID no. 12594986
  misc_feature (147)..(219): Pfam Name: Pfam Description:  Extensin-like region
  misc_feature (1)..(81): NCBI GI NO: 25287127 NR Description: glutathione transferase (EC 2.5.1.18) III(b)
  misc_feature (1)..(81): NCBI GI NO: 25287128 NR Description: glutathione transferase (EC 2.5.1.18) III(a)
  misc_feature (2)..(81): NCBI GI NO: 3891593 NR Description: Structure Of Glutathione S-Transferase Iii In ApoForm
  misc_feature (4)..(89): NCBI GI NO: 34907162 NR Description: putative glutathione S-transferase
  misc_feature (4)..(89): NCBI GI NO: 11177843 NR Description: putative glutathione S-transferase OsGSTF4
  misc_feature (1)..(87): NCBI GI NO: 23504745 NR Description: glutathione transferase F5 [Triticum aestivum]
  misc_feature (1)..(81): NCBI GI NO: 1170090 NR Description: GLUTATHIONE S-TRANSFERASE III
  misc_feature (4)..(79): NCBI GI NO: 18150415 NR Description: glutathione S-transferase [Allium cepa]
  misc_feature (1)..(219): NCBI GI NO: 66616 NR Description: glutathione transferase (EC 2
  misc_feature (1)..(78): NCBI GI NO: 5923877 NR Description: glutathione S-transferase [Triticum aestivum]
MAPLKLYGMPLSPNVVRVATVLNEKGLDFEIVPVDLTTGAHKQPDFLTLNPFGQIPALVDGDEVLFESRAINRYIASKYASGHGPAPRDGVGGEAGGVAGGGVAPLLPERIAAGVPAAREAAPGRRPRRGGGGEARGAARQGARRVRGAPGPQQVPSPGTSSRSPTPTTRPTCSTSARPPRPGSSPPAPTSRPGGRPSPPAPRSRRPSPPSPCPRRPPPRLDLALRCLGRGCVGAPSRIKEAASCLAFAAAPCAITACVINTVAFVCVHCLLVGWSLHILLVLIFL

SEQ ID NO: 32018 - protein, 278 aa, Zea mays subsp. mays
  peptide (1)..(278): Ceres Seq. ID no. 12594987
  misc_feature (139)..(211): Pfam Name: Pfam Description:  Extensin-like region
  misc_feature (1)..(73): NCBI GI NO: 25287127 NR Description: glutathione transferase (EC 2.5.1.18) III(b)
  misc_feature (1)..(73): NCBI GI NO: 25287128 NR Description: glutathione transferase (EC 2.5.1.18) III(a)
  misc_feature (1)..(73): NCBI GI NO: 3891593 NR Description: Structure Of Glutathione S-Transferase Iii In ApoForm
  misc_feature (1)..(81): NCBI GI NO: 34907162 NR Description: putative glutathione S-transferase
  misc_feature (1)..(81): NCBI GI NO: 11177843 NR Description: putative glutathione S-transferase OsGSTF4
  misc_feature (1)..(79): NCBI GI NO: 23504745 NR Description: glutathione transferase F5 [Triticum aestivum]
  misc_feature (1)..(73): NCBI GI NO: 1170090 NR Description: GLUTATHIONE S-TRANSFERASE III
  misc_feature (1)..(71): NCBI GI NO: 18150415 NR Description: glutathione S-transferase [Allium cepa]
  misc_feature (1)..(211): NCBI GI NO: 66616 NR Description: glutathione transferase (EC 2
  misc_feature (1)..(70): NCBI GI NO: 5923877 NR Description: glutathione S-transferase [Triticum aestivum]
MPLSPNVVRVATVLNEKGLDFEIVPVDLTTGAHKQPDFLTLNPFGQIPALVDGDEVLFESRAINRYIASKYASGHGPAPRDGVGGEAGGVAGGGVAPLLPERIAAGVPAAREAAPGRRPRRGGGGEARGAARQGARRVRGAPGPQQVPSPGTSSRSPTPTTRPTCSTSARPPRPGSSPPAPTSRPGGRPSPPAPRSRRPSPPSPCPRRPPPRLDLALRCLGRGCVGAPSRIKEAASCLAFAAAPCAITACVINTVAFVCVHCLLVGWSLHILLVLIFL

SEQ ID NO: 32019 - DNA, 1175 bp, Zea mays subsp. mays
  misc_feature (1)..(1175): Ceres Seq. ID no. 12350898
cattcccatcccattccccactctactcattcagcagatcccgtcactcgctctccacaagcagagcaccgcagcagaacgaggaaggatgctggccatcttccagaagcaggtggcgcacgcgccgcaggagctcaacagcccccgcgccggcgcgtcgcccagcaagccccggaaccccgacgagatcctgcgcgacttccacgccgcgcacccggccgccgccttctccgcctccttcggcggcggcgccgcgctcgcctgcgtcggcccctcctcctccgccaccgccaccggcaccgccacctaccagcggatgttctgcggcctggaccacatctactgcgtcttcctgggccgcctcgacaacctcagcggcctcatccgccagtacggcctgtgcggccgctccaccaacgaggcgatgctggtcatcgaggcctaccgcacgctgcgcgaccgcgggccctacccggccgaccaggtcgtcaaggacctcgccggcgccttcgccttcgtcgtcttcgacagccgctccggcgccgtcttcgccgccctcggcgccgccgacgccgggggaacgccggtgccgctgtactggggcgtcgcggccgacgggtccgcggtgatcagcgacgaccgggacctggtcaagcgcggctgcggcaagtcctacgcgcccttccccgcgggctgcatgttccacagcgacggagggctcaagagcttcgagcaccccatgaacaggctcaaggccatgccgcgcgtcgacagcgagggcgccatgtgcggcgccaccttcaaggtcgacaccttcaccaagatcaactccatgccccgtgttggcagcgccgccaactgggccgcctgggacgaagccatctagtagatctagccttgccatgtacactgcgctgcctgcaacccgttcgccggtgcccctgcccctgcccgtggtcttttatcatccttccaaccacgagactttgcttctaaaccagaggctccatctgtgtgccgccttgttttactagaaatctttttttttatcctttttcacttttcctgcctagtttttccccttatcctggcattgtacaaataatttctccagtgcttgtagcttgtggacttgggttgtccaacatgtcatgaatacaaactgagtttgctgc

SEQ ID NO: 32020 - protein, 331 aa, Zea mays subsp. mays
  peptide (1)..(331): Ceres Seq. ID no. 12350899
  misc_feature (147)..(216): Pfam Name: Pfam Description:  Spumavirus gag protein
HSHPIPHSTHSADPVTRSPQAEHRSRTRKDAGHLPEAGGARAAGAQQPPRRRVAQQAPEPRRDPARLPRRAPGRRLLRLLRRRRRARLRRPLLLRHRHRHRHLPADVLRPGPHLLRLPGPPRQPQRPHPPVRPVRPLHQRGDAGHRGLPHAARPRALPGRPGRQGPRRRLRLRRLRQPLRRRLRRPRRRRRRGNAGAAVLGRRGRRVRGDQRRPGPGQARLRQVLRALPRGLHVPQRRRAQELRAPHEQAQGHAARRQRGRHVRRHLQGRHLHQDQLHAPCWQRRQLGRLGRSHLVDLALPCTLRCLQPVRRCPCPCPWSFIILPTTRLCF

SEQ ID NO: 32021 - protein, 294 aa, Zea mays subsp. mays
  peptide (1)..(294): Ceres Seq. ID no. 12350900
  misc_feature (30)..(293): NCBI GI NO: 542200 NR Description: hypothetical protein - garden asparagus
  misc_feature (30)..(292): NCBI GI NO: 9857931 NR Description: unknown [Glycine max]
  misc_feature (30)..(288): NCBI GI NO: 18416995 NR Description: putative protein; protein id: At4g27450
  misc_feature (30)..(288): NCBI GI NO: 7486256 NR Description: hypothetical protein F27G19
  misc_feature (30)..(288): NCBI GI NO: 18400774 NR Description: expressed protein; protein id: At3g15450
  misc_feature (27)..(292): NCBI GI NO: 7489016 NR Description: hypothetical protein - tomato
  misc_feature (30)..(161): NCBI GI NO: 38344040 NR Description: OSJNBb0017I01.8
  misc_feature (30)..(288): NCBI GI NO: 20340249 NR Description: aluminum-induced protein-like protein
  misc_feature (30)..(288): NCBI GI NO: 15239993 NR Description: aluminum-induced protein-like
  misc_feature (24)..(288): NCBI GI NO: 30017570 NR Description: unknown protein
IPIPFPTLLIQQIPSLALHKQSTAAERGRMLAIFQKQVAHAPQELNSPRAGASPSKPRNPDEILRDFHAAHPAAAFSASFGGGAALACVGPSSSATATGTATYQRMFCGLDHIYCVFLGRLDNLSGLIRQYGLCGRSTNEAMLVIEAYRTLRDRGPYPADQVVKDLAGAFAFVVFDSRSGAVFAALGAADAGGTPVPLYWGVAADGSAVISDDRDLVKRGCGKSYAPFPAGCMFHSDGGLKSFEHPMNRLKAMPRVDSEGAMCGATFKVDTFTKINSMPRVGSAANWAAWDEAI

SEQ ID NO: 32022 - protein, 265 aa, Zea mays subsp. mays
  peptide (1)..(265): Ceres Seq. ID no. 12350901
  misc_feature (1)..(264): NCBI GI NO: 542200 NR Description: hypothetical protein - garden asparagus
  misc_feature (1)..(263): NCBI GI NO: 9857931 NR Description: unknown [Glycine max]
  misc_feature (1)..(259): NCBI GI NO: 18416995 NR Description: putative protein; protein id: At4g27450
  misc_feature (1)..(259): NCBI GI NO: 7486256 NR Description: hypothetical protein F27G19
  misc_feature (1)..(259): NCBI GI NO: 18400774 NR Description: expressed protein; protein id: At3g15450
  misc_feature (1)..(263): NCBI GI NO: 7489016 NR Description: hypothetical protein - tomato
  misc_feature (1)..(132): NCBI GI NO: 38344040 NR Description: OSJNBb0017I01.8
  misc_feature (1)..(259): NCBI GI NO: 20340249 NR Description: aluminum-induced protein-like protein
  misc_feature (1)..(259): NCBI GI NO: 15239993 NR Description: aluminum-induced protein-like
  misc_feature (1)..(259): NCBI GI NO: 30017570 NR Description: unknown protein
MLAIFQKQVAHAPQELNSPRAGASPSKPRNPDEILRDFHAAHPAAAFSASFGGGAALACVGPSSSATATGTATYQRMFCGLDHIYCVFLGRLDNLSGLIRQYGLCGRSTNEAMLVIEAYRTLRDRGPYPADQVVKDLAGAFAFVVFDSRSGAVFAALGAADAGGTPVPLYWGVAADGSAVISDDRDLVKRGCGKSYAPFPAGCMFHSDGGLKSFEHPMNRLKAMPRVDSEGAMCGATFKVDTFTKINSMPRVGSAANWAAWDEAI

SEQ ID NO: 32023 - DNA, 1370 bp, Zea mays subsp. mays
  misc_feature (1)..(1370): Ceres Seq. ID no. 12368499
aaattcaaaatcaacccccctcgtcgcaaggccacaaccactccactcctccccatccctagctagccactagggtttgccagcctttgcagcgtcgcgctcgcgcctcatcccctcgcccatcgacggtagacgagagcgagcggtctgtgttcgtggagcaggggccggcgccatggagatcaacatcgtggaacaagtacgagaagctggagaaggtcggggagggcacctacggcaaggtgtacaaggcgcaggacaaggcgacggggcagctggtggcgctgaagaagacccgcctcgagatggacgaggagggcatcccgcccacggcgctccgcgagatctccctcctcaacctcctctcccactccatctacatcgtccgcctcctcgccgtcgagcaggccgctaagaacggcaagcccgtcctctacctcgtcttcgagttcctcgacaccgatctcaagaagtacctcgacgtctaccgcagggggcccagcgccaggccgctccccgcgacactcatcaagaatttcctgtatcagttatgcaaaggagttgcacactgccatagccatggtgtccttcaccgggatttaaagccacaaaacctgctggtggacaaggagaagggtatactgaagattgctgatctgggactcggtagggctttcactgtgcccatgaaaagctacacccatgagattgtgaccctttggtacagagctcctgaagttttgcttggagcaacacattactcaactggcgttgatatgtggtctgttggatgcatctttgctgaaatggcccgacggcaggctctctttcctggtgactcggagttgcaacagttgcttcacatcttcaggttgctgggaacacctactgaggaacagtggcctggagtgagtgatttaagggactggcatgagtttccacagtggaagccccagggtttggcacgtgtcgtcccaacactggaacctgaaggagttgaccttctatcgaaaatgcttcagcttgatccttcaaacaggatatcagctttagctgcgatggagcatccctactttaacagccttgacaagtcccagttctagccgttgtactatgtggttcagaaggcgctaccctcgtacagagagatttccaatggtgttatgaatctcaattgccatctaggcaactggttcatgattttaccaatctgttagtgagtgaaaatcgtgcgagggtcatatgtgttccccttgtcttaaaaatctggtgtggtgtagaacaagagttacctgtgggaggcctgtgataatgccctttatgtctcaacatccattttcgtgcattccatgttcttcaatacggactcg

SEQ ID NO: 32024 - protein, 265 aa, Zea mays subsp. mays
  peptide (1)..(265): Ceres Seq. ID no. 12368500
  misc_feature (1)..(257): Pfam Name: Pfam Description:  Protein kinase domain
  misc_feature (1)..(265): NCBI GI NO: 27542763 NR Description: cyclin-dependent kinase-like protein
  misc_feature (1)..(265): NCBI GI NO: 34907628 NR Description: putative cyclin-dependent kinase B1-1
  misc_feature (1)..(265): NCBI GI NO: 9885801 NR Description: cyclin-dependent kinase B1-2 [Nicotiana tabacum]
  misc_feature (1)..(265): NCBI GI NO: 11125683 NR Description: B1-type cyclin dependent kinase
  misc_feature (1)..(265): NCBI GI NO: 9885799 NR Description: cyclin-dependent kinase B1-1 [Nicotiana tabacum]
  misc_feature (1)..(265): NCBI GI NO: 25989353 NR Description: cyclin-dependent kinase [Helianthus tuberosus]
  misc_feature (1)..(265): NCBI GI NO: 7434326 NR Description: probable cdc2-like protein kinase cdc2MsD - alfalfa
  misc_feature (1)..(265): NCBI GI NO: 5921446 NR Description: CELL DIVISION CONTROL PROTEIN 2 HOMOLOG C
  misc_feature (1)..(265): NCBI GI NO: 15232441 NR Description: Cyclin-dependent kinase B1;1; protein id:At3g54180
  misc_feature (1)..(265): NCBI GI NO: 15224912 NR Description: Cyclin-dependent kinase B1;2; protein id:At2g38620
MDEEGIPPTALREISLLNLLSHSIYIVRLLAVEQAAKNGKPVLYLVFEFLDTDLKKYLDVYRRGPSARPLPATLIKNFLYQLCKGVAHCHSHGVLHRDLKPQNLLVDKEKGILKIADLGLGRAFTVPMKSYTHEIVTLWYRAPEVLLGATHYSTGVDMWSVGCIFAEMARRQALFPGDSELQQLLHIFRLLGTPTEEQWPGVSDLRDWHEFPQWKPQGLARVVPTLEPEGVDLLSKMLQLDPSNRISALAAMEHPYFNSLDKSQF

SEQ ID NO: 32025 - protein, 138 aa, Zea mays subsp. mays
  peptide (1)..(138): Ceres Seq. ID no. 12368501
  misc_feature (1)..(130): Pfam Name: Pfam Description:  Protein kinase domain
  misc_feature (1)..(138): NCBI GI NO: 27542763 NR Description: cyclin-dependent kinase-like protein
  misc_feature (1)..(138): NCBI GI NO: 34907628 NR Description: putative cyclin-dependent kinase B1-1
  misc_feature (1)..(138): NCBI GI NO: 9885801 NR Description: cyclin-dependent kinase B1-2 [Nicotiana tabacum]
  misc_feature (1)..(138): NCBI GI NO: 11125683 NR Description: B1-type cyclin dependent kinase
  misc_feature (1)..(138): NCBI GI NO: 9885799 NR Description: cyclin-dependent kinase B1-1 [Nicotiana tabacum]
  misc_feature (1)..(138): NCBI GI NO: 25989353 NR Description: cyclin-dependent kinase [Helianthus tuberosus]
  misc_feature (1)..(138): NCBI GI NO: 7434326 NR Description: probable cdc2-like protein kinase cdc2MsD - alfalfa
  misc_feature (1)..(138): NCBI GI NO: 5921446 NR Description: CELL DIVISION CONTROL PROTEIN 2 HOMOLOG C
  misc_feature (1)..(138): NCBI GI NO: 15232441 NR Description: Cyclin-dependent kinase B1;1; protein id:At3g54180
  misc_feature (1)..(138): NCBI GI NO: 15224912 NR Description: Cyclin-dependent kinase B1;2; protein id:At2g38620
MKSYTHEIVTLWYRAPEVLLGATHYSTGVDMWSVGCIFAEMARRQALFPGDSELQQLLHIFRLLGTPTEEQWPGVSDLRDWHEFPQWKPQGLARVVPTLEPEGVDLLSKMLQLDPSNRISALAAMEHPYFNSLDKSQF

SEQ ID NO: 32026 - DNA, 844 bp, Zea mays subsp. mays
  misc_feature (1)..(844): Ceres Seq. ID no. 12400449
atccgttccaagtatctcccctcttgcgcctcctctcgactcttccgtttagtgcccaccgaaatctttctaccacccacgttccggcatccatggctcgtctgttcgcggcgcgagcccttacgctggcccgcccctcggcggcgccatccgccctccgcttctgcccctcccgcgcgctgtcggacaaggtggacttcatcgagatcgacctctccgaggagtccccttcctcttcatccggaggaggaggcgcgggcgaccccgccacggttcaggcgcagatggggtcgcggcgcctggaggacgccatccatggggtgctcgtgcggcgggcggcgcctgaatggctccccttcgtgccgggggcatcctactgggtcccgccgtttccgcgggcgctcggggtggcggagcttctcagctcggctatgcacatcacgaggggcgccgaggcgatgacggaggaggaggcattgagcttcactaccgtgcgggggtggccatccgcggcgtactttgtggcaggctcctactgaagaggcagctggggacagtgaaggtcttctgatgggttgtagttataacttatagtaatagacagctagggagcccctgcaacaatggatcccctcaagctgtcaagcatcttcggatggtgtgctcacagctggtaaaatgacactggttcaatcttatgtatttgcagaacccggtgcgctagcacctggacatggtgggtgtatggtccacggaacccagccgtggcgcataatgtaatagagtttgtagtttgtactttgtaccatattttccctcttgaataaaggcatgtgttacgctg

SEQ ID NO: 32027 - protein, 178 aa, Zea mays subsp. mays
  peptide (1)..(178): Ceres Seq. ID no. 12400450
  misc_feature (31)..(178): NCBI GI NO: 38175698 NR Description: unknown protein
  misc_feature (31)..(178): NCBI GI NO: 38346553 NR Description: OSJNBa0035M09.14
  misc_feature (31)..(178): NCBI GI NO: 30685027 NR Description: expressed protein [Arabidopsis thaliana]
  misc_feature (37)..(176): NCBI GI NO: 18412160 NR Description: expressed protein; protein id: At1g78890
  misc_feature (37)..(176): NCBI GI NO: 21592720 NR Description: unknown [Arabidopsis thaliana]
  misc_feature (37)..(176): NCBI GI NO: 25364101 NR Description: hypothetical protein F9K20.6
  misc_feature (31)..(176): NCBI GI NO: 18394407 NR Description: expressed protein; protein id: At1g16840
  misc_feature (98)..(174): NCBI GI NO: 14423398 NR Description: Unknown protein [Arabidopsis thaliana]
  misc_feature (98)..(174): NCBI GI NO: 18398961 NR Description: expressed protein; protein id: At2g19180
PFQVSPLLRLLSTLPFSAHRNLSTTHVPASMARLFAARALTLARPSAAPSALRFCPSRALSDKVDFIEIDLSEESPSSSSGGGGAGDPATVQAQMGSRRLEDAIHGVLVRRAAPEWLPFVPGASYWVPPFPRALGVAELLSSAMHITRGAEAMTEEEALSFTTVRGWPSAAYFVAGSY

SEQ ID NO: 32028 - protein, 153 aa, Zea mays subsp. mays
  peptide (1)..(153): Ceres Seq. ID no. 12400451
IRSKYLPSCASSRLFRLVPTEIFLPPTFRHPWLVCSRREPLRWPAPRRRHPPSASAPPARCRTRWTSSRSTSPRSPLPLHPEEEARATPPRFRRRWGRGAWRTPSMGCSCGGRRLNGSPSCRGHPTGSRRFRGRSGWRSFSARLCTSRGAPRR

SEQ ID NO: 32029 - protein, 148 aa, Zea mays subsp. mays
  peptide (1)..(148): Ceres Seq. ID no. 12400452
  misc_feature (1)..(148): NCBI GI NO: 38175698 NR Description: unknown protein
  misc_feature (1)..(148): NCBI GI NO: 38346553 NR Description: OSJNBa0035M09.14
  misc_feature (1)..(148): NCBI GI NO: 30685027 NR Description: expressed protein [Arabidopsis thaliana]
  misc_feature (7)..(146): NCBI GI NO: 18412160 NR Description: expressed protein; protein id: At1g78890
  misc_feature (7)..(146): NCBI GI NO: 25364101 NR Description: hypothetical protein F9K20.6
  misc_feature (7)..(146): NCBI GI NO: 21592720 NR Description: unknown [Arabidopsis thaliana]
  misc_feature (1)..(146): NCBI GI NO: 18394407 NR Description: expressed protein; protein id: At1g16840
  misc_feature (68)..(144): NCBI GI NO: 14423398 NR Description: Unknown protein [Arabidopsis thaliana]
  misc_feature (68)..(144): NCBI GI NO: 18398961 NR Description: expressed protein; protein id: At2g19180
MARLFAARALTLARPSAAPSALRFCPSRALSDKVDFIEIDLSEESPSSSSGGGGAGDPATVQAQMGSRRLEDAIHGVLVRRAAPEWLPFVPGASYWVPPFPRALGVAELLSSAMHITRGAEAMTEEEALSFTTVRGWPSAAYFVAGSY

SEQ ID NO: 32030 - DNA, 866 bp, Zea mays subsp. mays
  misc_feature (1)..(866): Ceres Seq. ID no. 12342039
agttcgactcagctccgccgcgcgtgtcagccgatggaagagctgcgggccgccgtgacggcgcacttggaccaggtagcgggcctcgtgcaggcgctctcctccgagctccgccgcggcataggtcccgccgccgacaacctgcgcgccttcatccgcgccgttgactggacggagccatggctcatgtgcttgatggcattccatgtggttctgctgctcactgctgtagggttcaggaggaatgccaatttccagctattcttgttatttcttgcttattcaggagtgtatctagctgaaaagatgaacagatacctgggagagaactggaagagctttaccagtaggaattattttgatcgttctggagtttttatctctgtcgtctggtctgggccccttattgtcatatcgattgtcagtgtgattagcagcctcattgcattatgtcgattgatggtgaaatggaaaagagcagaacttaggcaccgggctcgacttgctcatgacaagaaggattgagagaagagaaaaaaatccttattatgggagaatcgaatgatttagtgattttgaacttttctaagtttgtatgccgcttgtcaacagggcactcaagaattaagtgttggaaatcctggataagcgaggagtgtctacagctattgttcctgctggtcactgtaggacagtagcagctagacatacttcataaaaaaatagatatggtacctgtctctatcttgttttagattgtagatgtaaacatggatgtaatcttgattgaaactgccaagatttgtagaacaaagcctcactgtttcgtttcccatcacaaatatgaaatatgagacgcggaagtg

SEQ ID NO: 32031 - protein, 174 aa, Zea mays subsp. mays
  peptide (1)..(174): Ceres Seq. ID no. 12342040
  misc_feature (12)..(174): NCBI GI NO: 18399227 NR Description: Expressed protein; protein id: At1g34350
  misc_feature (12)..(174): NCBI GI NO: 21554376 NR Description: unknown [Arabidopsis thaliana]
  misc_feature (14)..(174): NCBI GI NO: 38637052 NR Description: unknown protein
  misc_feature (50)..(173): NCBI GI NO: 31210097 NR Description: ENSANGP00000009975 [Anopheles gambiae]
  misc_feature (51)..(173): NCBI GI NO: 24653051 NR Description: CG30051-PB [Drosophila melanogaster]
  misc_feature (47)..(174): NCBI GI NO: 11359939 NR Description: hypothetical protein DKFZp434C1714
  misc_feature (47)..(174): NCBI GI NO: 16359094 NR Description: Unknown (protein for IMAGE:4686355) [Homo sapiens]
  misc_feature (47)..(174): NCBI GI NO: 40548391 NR Description: hypothetical protein DKFZp434C1714 [Homo sapiens]
  misc_feature (56)..(174): NCBI GI NO: 21595411 NR Description: Hypothetical protein DKFZp434C1714 [Homo sapiens]
  misc_feature (47)..(174): NCBI GI NO: 34864175 NR Description: similar to cDNA sequence BC024093
SSTQLRRACQPMEELRAAVTAHLDQVAGLVQALSSELRRGIGPAADNLRAFIRAVDWTEPWLMCLMAFHVVLLLTAVGFRRNANFQLFLLFLAYSGVYLAEKMNRYLGENWKSFTSRNYFDRSGVFISVVWSGPLIVISIVSVISSLIALCRLMVKWKRAELRHRARLAHDKKD

SEQ ID NO: 32032 - protein, 163 aa, Zea mays subsp. mays
  peptide (1)..(163): Ceres Seq. ID no. 12342041
  misc_feature (1)..(163): NCBI GI NO: 18399227 NR Description: Expressed protein; protein id: At1g34350
  misc_feature (1)..(163): NCBI GI NO: 21554376 NR Description: unknown [Arabidopsis thaliana]
  misc_feature (3)..(163): NCBI GI NO: 38637052 NR Description: unknown protein
  misc_feature (39)..(162): NCBI GI NO: 31210097 NR Description: ENSANGP00000009975 [Anopheles gambiae]
  misc_feature (40)..(162): NCBI GI NO: 24653051 NR Description: CG30051-PB [Drosophila melanogaster]
  misc_feature (36)..(163): NCBI GI NO: 11359939 NR Description: hypothetical protein DKFZp434C1714
  misc_feature (36)..(163): NCBI GI NO: 16359094 NR Description: Unknown (protein for IMAGE:4686355) [Homo sapiens]
  misc_feature (36)..(163): NCBI GI NO: 40548391 NR Description: hypothetical protein DKFZp434C1714 [Homo sapiens]
  misc_feature (45)..(163): NCBI GI NO: 21595411 NR Description: Hypothetical protein DKFZp434C1714 [Homo sapiens]
  misc_feature (36)..(163): NCBI GI NO: 34864175 NR Description: similar to cDNA sequence BC024093
MEELRAAVTAHLDQVAGLVQALSSELRRGIGPAADNLRAFIRAVDWTEPWLMCLMAFHVVLLLTAVGFRRNANFQLFLLFLAYSGVYLAEKMNRYLGENWKSFTSRNYFDRSGVFISVVWSGPLIVISIVSVISSLIALCRLMVKWKRAELRHRARLAHDKKD

SEQ ID NO: 32033 - protein, 112 aa, Zea mays subsp. mays
  peptide (1)..(112): Ceres Seq. ID no. 12342042
  misc_feature (1)..(112): NCBI GI NO: 18399227 NR Description: Expressed protein; protein id: At1g34350
  misc_feature (1)..(112): NCBI GI NO: 21554376 NR Description: unknown [Arabidopsis thaliana]
  misc_feature (1)..(112): NCBI GI NO: 38637052 NR Description: unknown protein
  misc_feature (1)..(111): NCBI GI NO: 31210097 NR Description: ENSANGP00000009975 [Anopheles gambiae]
  misc_feature (1)..(111): NCBI GI NO: 24653051 NR Description: CG30051-PB [Drosophila melanogaster]
  misc_feature (1)..(112): NCBI GI NO: 11359939 NR Description: hypothetical protein DKFZp434C1714
  misc_feature (1)..(112): NCBI GI NO: 16359094 NR Description: Unknown (protein for IMAGE:4686355) [Homo sapiens]
  misc_feature (1)..(112): NCBI GI NO: 40548391 NR Description: hypothetical protein DKFZp434C1714 [Homo sapiens]
  misc_feature (1)..(112): NCBI GI NO: 21595411 NR Description: Hypothetical protein DKFZp434C1714 [Homo sapiens]
  misc_feature (1)..(112): NCBI GI NO: 34864175 NR Description: similar to cDNA sequence BC024093
MCLMAFHVVLLLTAVGFRRNANFQLFLLFLAYSGVYLAEKMNRYLGENWKSFTSRNYFDRSGVFISVVWSGPLIVISIVSVISSLIALCRLMVKWKRAELRHRARLAHDKKD

SEQ ID NO: 32034 - DNA, 921 bp, Zea mays subsp. mays
  misc_feature (1)..(921): Ceres Seq. ID no. 12367023
aagctcgcactcactcacacccgcagcgaaggagggagcttgcacgggccaacgcacacacaacacaagctcgtcgtcgatggcgcggtgggctgcggtgctggcgctggccgcggccacggccatcgccgtggcgtccgtggcgggcggcgacatgaacgcggacaagacggagtgcgcggaccagctggtgggcctggcgccgtgcctgcagtacgtgcaggggcaggcccgcgcgccgccgcccgactgctgcggcggcctgcgccaggtgctggggaagagccccaagtgcctgtgcgtgctcgtcaaggacaaggacgaccccaacctgggcatcaagatcaacgccaccctcgcgctcgcgctccccaacgcctgcggcgccacccgcgccaacgtctcccactgcgctcagctcctgcatattcccccgggctccaaagacgccgccgtcttcagtcccggcagcgacaagggctccactgccgctccagccaaggacaactcgacggcgacgaccaactcccgcgcgctgcaggcgaccaccggacgcggcgtctcctcctcggcggcgaccgccggtgctgcactcgcggtgctgctcgccggctacctcctcctgctcgtgccagagctgtcgcctagctcgttctagaccctctgtcaagttgtgccaccagtaggatttgatgtgttgttgttctttctagtacgtgacgtgacagacaatttgctgctggtgtccttgttgttgtagtagttgcactgtgtgttcctgttatgctatgggtacgagatgttagggcatgggttaagctaagctaaggcgatggggtatcagcagtaccttacctctcatctggctgctgatcctttttgttcttggcactgctgttttatctgaacatttgatcagcc

SEQ ID NO: 32035 - protein, 218 aa, Zea mays subsp. mays
  peptide (1)..(218): Ceres Seq. ID no. 12367024
  misc_feature (59)..(137): Pfam Name: Pfam Description:  Protease inhibitor/seed storage/LTP family
  misc_feature (29)..(213): NCBI GI NO: 34394084 NR Description: lipid transfer protein-like
  misc_feature (33)..(165): NCBI GI NO: 15224863 NR Description: unknown protein; protein id: At2g44300.1
  misc_feature (35)..(195): NCBI GI NO: 15224862 NR Description: unknown protein; protein id: At2g44290.1
  misc_feature (51)..(208): NCBI GI NO: 18405294 NR Description: expressed protein; protein id: At1g55260
  misc_feature (51)..(208): NCBI GI NO: 21537387 NR Description: unknown [Arabidopsis thaliana]
  misc_feature (33)..(174): NCBI GI NO: 15231070 NR Description: putative protein; protein id: At3g58550
  misc_feature (33)..(174): NCBI GI NO: 21555220 NR Description: unknown [Arabidopsis thaliana]
  misc_feature (27)..(203): NCBI GI NO: 25553595 NR Description: OJ1656_E11.26
  misc_feature (26)..(210): NCBI GI NO: 25553588 NR Description: OJ1656_E11.14
  misc_feature (37)..(198): NCBI GI NO: 25553602 NR Description: OJ1656_E11.34
SSHSLTPAAKEGACTGQRTHNTSSSSMARWAAVLALAAATAIAVASVAGGDMNADKTECADQLVGLAPCLQYVQGQARAPPPDCCGGLRQVLGKSPKCLCVLVKDKDDPNLGIKINATLALALPNACGATRANVSHCAQLLHIPPGSKDAAVFSPGSDKGSTAAPAKDNSTATTNSRALQATTGRGVSSSAATAGAALAVLLAGYLLLLVPELSPSSF

SEQ ID NO: 32036 - protein, 215 aa, Zea mays subsp. mays
  peptide (1)..(215): Ceres Seq. ID no. 12367025
KLALTHTRSEGGSLHGPTHTQHKLVVDGAVGCGAGAGRGHGHRRGVRGGRRHERGQDGVRGPAGGPGAVPAVRAGAGPRAAARLLRRPAPGAGEEPQVPVRARQGQGRPQPGHQDQRHPRARAPQRLRRHPRQRLPLRSAPAYSPGLQRRRRLQSRQRQGLHCRSSQGQLDGDDQLPRAAGDHRTRRLLLGGDRRCCTRGAARRLPPPARARAVA

SEQ ID NO: 32037 - protein, 192 aa, Zea mays subsp. mays
  peptide (1)..(192): Ceres Seq. ID no. 12367026
  misc_feature (33)..(111): Pfam Name: Pfam Description:  Protease inhibitor/seed storage/LTP family
  misc_feature (3)..(187): NCBI GI NO: 34394084 NR Description: lipid transfer protein-like
  misc_feature (7)..(139): NCBI GI NO: 15224863 NR Description: unknown protein; protein id: At2g44300.1
  misc_feature (9)..(169): NCBI GI NO: 15224862 NR Description: unknown protein; protein id: At2g44290.1
  misc_feature (25)..(182): NCBI GI NO: 18405294 NR Description: expressed protein; protein id: At1g55260
  misc_feature (25)..(182): NCBI GI NO: 21537387 NR Description: unknown [Arabidopsis thaliana]
  misc_feature (7)..(148): NCBI GI NO: 15231070 NR Description: putative protein; protein id: At3g58550
  misc_feature (7)..(148): NCBI GI NO: 21555220 NR Description: unknown [Arabidopsis thaliana]
  misc_feature (1)..(177): NCBI GI NO: 25553595 NR Description: OJ1656_E11.26
  misc_feature (1)..(184): NCBI GI NO: 25553588 NR Description: OJ1656_E11.14
  misc_feature (11)..(172): NCBI GI NO: 25553602 NR Description: OJ1656_E11.34
MARWAAVLALAAATAIAVASVAGGDMNADKTECADQLVGLAPCLQYVQGQARAPPPDCCGGLRQVLGKSPKCLCVLVKDKDDPNLGIKINATLALALPNACGATRANVSHCAQLLHIPPGSKDAAVFSPGSDKGSTAAPAKDNSTATTNSRALQATTGRGVSSSAATAGAALAVLLAGYLLLLVPELSPSSF

SEQ ID NO: 32038 - DNA, 927 bp, Zea mays subsp. mays
  misc_feature (1)..(927): Ceres Seq. ID no. 12347657
aatttttccacggagccttccggataggatttgtctcccctccactgcgcctctccgtttccgccatggctccggccgccgccttcctgtcggcgtgcgccgctggttccattccccgtgcgcccttcctgatcccgaggcctcttcttctcccaattccgctctcccctgcgcgctgggaccgctcccgcagctgcagcctctttggcgtaggcgccaacactcgccgcgcgccaacccttcgacggaacgcctccacggagacggtggttccctacgtgccgggctctggcaagtacatagcgccggactacctcgtgaagaaggtgtcagccgaggaggtgcaggagctggtgagggggcagaggaaggtgccgctcatcgttgacttctacgcgacctggtgcgggccctgtgttcagatggcgcaggacatcgagatgcttgcagttgagtatgaggacaatgccctgtttgtgaaggtggacacagatgatgaatatgaatttgcaaaagacatgcaggtaagagggcttccgaccctttacttcttcagtccagaccaaaacaaagatgccatacgcaccgaggggctaattcctatggatatgatcagaaacatcattgacaacgagttatgacagctgatagatcactgtattaggaacataggcaatgttttatctttgtagcagaaaattttttgtcatgaggctaagcattaccgctaggtgctagtttgtgtgcttgatgttttcttttgctccaatggtaggtttcatctgtgcaaatccattctgctgtttctgtatcgtgttgtttattctcatcaaactctaggttgtgtcgtgctgttgtcggttaggcctgtgtgaccattttcatccctcgaatgataagatggctttggctcagattggtcctcac

SEQ ID NO: 32039 - protein, 212 aa, Zea mays subsp. mays
  peptide (1)..(212): Ceres Seq. ID no. 12347658
  misc_feature (105)..(212): Pfam Name: Pfam Description:  Thioredoxin
  misc_feature (21)..(212): NCBI GI NO: 34904898 NR Description: similar to thioredoxin
  misc_feature (66)..(212): NCBI GI NO: 8489792 NR Description: putative thioredoxin [Lycopersicon esculentum]
  misc_feature (94)..(212): NCBI GI NO: 15230779 NR Description: thioredoxin, putative; protein id: At3g06730
  misc_feature (94)..(212): NCBI GI NO: 21537179 NR Description: thioredoxin, putative [Arabidopsis thaliana]
  misc_feature (103)..(208): NCBI GI NO: 15594407 NR Description: thioredoxin (trxA) [Borrelia burgdorferi]
  misc_feature (115)..(212): NCBI GI NO: 135760 NR Description: Thioredoxin 1 (TRX-1) (Thioredoxin M)
  misc_feature (121)..(212): NCBI GI NO: 628902 NR Description: thioredoxin - Chloroflexus aurantiacus
  misc_feature (121)..(212): NCBI GI NO: 1093914 NR Description: thioredoxin
  misc_feature (111)..(205): NCBI GI NO: 21673615 NR Description: thioredoxin [Chlorobium tepidum TLS]
  misc_feature (123)..(212): NCBI GI NO: 29346866 NR Description: thioredoxin (TRX)
FFHGAFRIGFVSPPLRLSVSAMAPAAAFLSACAAGSIPRAPFLIPRPLLLPIPLSPARWDRSRSCSLFGVGANTRRAPTLRRNASTETVVPYVPGSGKYIAPDYLVKKVSAEEVQELVRGQRKVPLIVDFYATWCGPCVQMAQDIEMLAVEYEDNALFVKVDTDDEYEFAKDMQVRGLPTLYFFSPDQNKDAIRTEGLIPMDMIRNIIDNEL

SEQ ID NO: 32040 - protein, 191 aa, Zea mays subsp. mays
  peptide (1)..(191): Ceres Seq. ID no. 12347659
  misc_feature (84)..(191): Pfam Name: Pfam Description:  Thioredoxin
  misc_feature (1)..(191): NCBI GI NO: 34904898 NR Description: similar to thioredoxin
  misc_feature (45)..(191): NCBI GI NO: 8489792 NR Description: putative thioredoxin [Lycopersicon esculentum]
  misc_feature (73)..(191): NCBI GI NO: 15230779 NR Description: thioredoxin, putative; protein id: At3g06730
  misc_feature (73)..(191): NCBI GI NO: 21537179 NR Description: thioredoxin, putative [Arabidopsis thaliana]
  misc_feature (82)..(187): NCBI GI NO: 15594407 NR Description: thioredoxin (trxA) [Borrelia burgdorferi]
  misc_feature (94)..(191): NCBI GI NO: 135760 NR Description: Thioredoxin 1 (TRX-1) (Thioredoxin M)
  misc_feature (100)..(191): NCBI GI NO: 628902 NR Description: thioredoxin - Chloroflexus aurantiacus
  misc_feature (100)..(191): NCBI GI NO: 1093914 NR Description: thioredoxin
  misc_feature (90)..(184): NCBI GI NO: 21673615 NR Description: thioredoxin [Chlorobium tepidum TLS]
  misc_feature (102)..(191): NCBI GI NO: 29346866 NR Description: thioredoxin (TRX)
MAPAAAFLSACAAGSIPRAPFLIPRPLLLPIPLSPARWDRSRSCSLFGVGANTRRAPTLRRNASTETVVPYVPGSGKYIAPDYLVKKVSAEEVQELVRGQRKVPLIVDFYATWCGPCVQMAQDIEMLAVEYEDNALFVKVDTDDEYEFAKDMQVRGLPTLYFFSPDQNKDAIRTEGLIPMDMIRNIIDNEL

SEQ ID NO: 32041 - protein, 128 aa, Zea mays subsp. mays
  peptide (1)..(128): Ceres Seq. ID no. 12347660
IFPRSLPDRICLPSTAPLRFRHGSGRRLPVGVRRWFHSPCALPDPEASSSPNSALPCALGPLPQLQPLWRRRQHSPRANPSTERLHGDGGSLRAGLWQVHSAGLPREEGVSRGGAGAGEGAEEGAAHR

SEQ ID NO: 32042 - DNA, 899 bp, Zea mays subsp. mays
  misc_feature (1)..(899): Ceres Seq. ID no. 12351016
aaaaaaatcaaaaacaaaagaagcaaacctcgtcgtcacgccatccctctccacctctcgtcttccagacgcctccaatctgggctcccagcggccagcgtctcggaaaagaggagcagcacggcacggcggcgatggcgaggaacgctccaataatatgctaacccgttctacccagtccaattagcagcctcccaaggagaaggagatccaatcctgcgggcgggcgtcccccgtatcccatccatcgatccgaatctcggaatctgcaggaccctgcggcgcggcttcttcgtggagaagaggttgctgccgaagccaccgccaggtagccatgtcgtcctccgtgctgagggctgcggccgacagggccattcgcaggcaggccctcacgctgacgaacgccgcggcgtccaggatccggcagctactcagcctaaggcaacggccatacctgcggctgggtgtcaaagcgcgaggttgcaacggcctctcctacaccctcaactatgccgatgaaaaggggaagttcgatgagcttgtcgaggagaaaggagttaaagtactgatcgaccccaaggctttgatgcatgttataggcaccaagatggactatgttgatgatccattaaagtccgagtttgtgttcataaacccaaattccaaagggcagtgtggctgcggtgagtctttcatgactacaggcagcaaagggtcgacgtcatgaggcgtttttcagtgtaaatgcttagccaagtgtctgcaggctccagggtacagattttcttgtgtctgttgcgtcgcagttcattcatatataataacacagcagtgggtttgtactggatatgcaactaactcgcatttacttgtaatgtaagttcacctcaaatgttgtt

SEQ ID NO: 32043 - protein, 130 aa, Zea mays subsp. mays
  peptide (1)..(130): Ceres Seq. ID no. 12351017
  misc_feature (19)..(121): Pfam Name: Pfam Description:  HesB-like domain
  misc_feature (2)..(128): NCBI GI NO: 21592728 NR Description: putative HesB-like protein [Arabidopsis thaliana]
  misc_feature (2)..(128): NCBI GI NO: 15227287 NR Description: putative HesB-like protein; protein id:At2g16710
  misc_feature (14)..(123): NCBI GI NO: 15227614 NR Description: hypothetical protein; protein id: At2g36260.1
  misc_feature (61)..(100): NCBI GI NO: 34894088 NR Description: P0005A05.9
  misc_feature (100)..(130): NCBI GI NO: 34894088 NR Description: P0005A05.9
  misc_feature (14)..(123): NCBI GI NO: 21805702 NR Description: hypothetical protein [Arabidopsis thaliana]
  misc_feature (1)..(122): NCBI GI NO: 16798390 NR Description: iron-sulfur cluster assembly protein IscA
  misc_feature (19)..(120): NCBI GI NO: 23013039 NR Description: hypothetical protein
  misc_feature (2)..(120): NCBI GI NO: 25146411 NR Description: Protein Neurospora crassa like
  misc_feature (1)..(121): NCBI GI NO: 11359495 NR Description: hypothetical protein B24M22.180
MSSSVLRAAADRAIRRQALTLTNAAASRIRQLLSLRQRPYLRLGVKARGCNGLSYTLNYADEKGKFDELVEEKGVKVLIDPKALMHVIGTKMDYVDDPLKSEFVFINPNSKGQCGCGESFMTTGSKGSTS

SEQ ID NO: 32044 - DNA, 975 bp, Zea mays subsp. mays
  misc_feature (1)..(975): Ceres Seq. ID no. 12367081
attcccagccaatcgcctctcgcttttaaatcctgcgccctaccgccgcctccactcccaccgctctcaatcctcccgcctcttcctaatccgcctcctcccgctcagtcgccgccgtggaggaaggagcaactcgatcgccagtcatgacccggggagagaaccaggagtcgcagaccgggaacgtctccgccgcatctgcggctgcgccgggaccgaagccggcatcggcgggggccgggaagggcgcggagggccagtcggtggtgcggcggctgcagtcggagctgatggcgctgatgatgggcggcgacccgggcgtgtcggcgttccccgagggggacaacatgctccactgggtgggcaccatcgcgggatccgccgggacggcctacgagggcacctcctaccgcctcgcgctggccttcaccgccgagtacccgtacaagccgcccaaggtgcggttcgacaccccctgcttccaccccaacgtcgacgtgcacggcaacatctgcctggacatcctccaggacaagtggtcctccgcctacgacgtgcgcaccatcctcctctccatccagagcctgctcggagagccgaacaacgactcgccgctcaacacgcaggcggcggcgctttgggcgaaccaggaagagttcaggaagatggtggagaagctctacaaggccgccgcgtagaggacagcacacggcgcagatgccgactcaggttcttcaagcaccgatctcacttggatcgattgacgtggatggttttgttgggttgggttcccagtctggtgctgtagcggtgtagcaggaacgcgtgggtagccttgagcctggcgattctgtaattgtcctttgagttctgaaatgttaagagattcatttttacatgactttttgttttttcatttttacactctggatatggacgggactagttgaatttaggaagatcgtatgatctcgc

SEQ ID NO: 32045 - protein, 268 aa, Zea mays subsp. mays
  peptide (1)..(268): Ceres Seq. ID no. 12367082
FPANRLSLLNPAPYRRLHSHRSQSSRLFLIRLLPLSRRRGGRSNSIASHDPGREPGVADRERLRRICGCAGTEAGIGGGREGRGGPVGGAAAAVGADGADDGRRPGRVGVPRGGQHAPLGGHHRGIRRDGLRGHLLPPRAGLHRRVPVQAAQGAVRHPLLPPQRRRARQHLPGHPPGQVVLRLRRAHHPPLHPEPARRAEQRLAAQHAGGGALGEPGRVQEDGGEALQGRRVEDSTRRRCRLRFFKHRSHLDRLTWMVLLGWVPSLVL

SEQ ID NO: 32046 - protein, 183 aa, Zea mays subsp. mays
  peptide (1)..(183): Ceres Seq. ID no. 12367083
  misc_feature (1)..(183): NCBI GI NO: 34903234 NR Description: unnamed protein product
  misc_feature (12)..(180): NCBI GI NO: 18403097 NR Description: E2, ubiquitin-conjugating enzyme, putative
  misc_feature (12)..(180): NCBI GI NO: 21618179 NR Description: E2, ubiquitin-conjugating enzyme, putative
  misc_feature (11)..(180): NCBI GI NO: 18402475 NR Description: E2, ubiquitin-conjugating enzyme, putative
  misc_feature (25)..(180): NCBI GI NO: 9454557 NR Description: Putative ubiquitin carrier protein
  misc_feature (37)..(180): NCBI GI NO: 25293673 NR Description: hypothetical protein F17J6.3
  misc_feature (13)..(180): NCBI GI NO: 3915189 NR Description: UBIQUITIN-CONJUGATING ENZYME X
  misc_feature (9)..(179): NCBI GI NO: 5902146 NR Description: ubiquitin-conjugating enzyme E2C
  misc_feature (9)..(179): NCBI GI NO: 27704688 NR Description: similar to ubiquitin-conjugating enzyme E2C
  misc_feature (9)..(179): NCBI GI NO: 30583869 NR Description: Homo sapiens ubiquitin-conjugating enzyme E2C
MTRGENQESQTGNVSAASAAAPGPKPASAGAGKGAEGQSVVRRLQSELMALMMGGDPGVSAFPEGDNMLHWVGTIAGSAGTAYEGTSYRLALAFTAEYPYKPPKVRFDTPCFHPNVDVHGNICLDILQDKWSSAYDVRTILLSIQSLLGEPNNDSPLNTQAAALWANQEEFRKMVEKLYKAAA

SEQ ID NO: 32047 - protein, 135 aa, Zea mays subsp. mays
  peptide (1)..(135): Ceres Seq. ID no. 12367084
  misc_feature (1)..(135): NCBI GI NO: 34903234 NR Description: unnamed protein product
  misc_feature (1)..(132): NCBI GI NO: 18403097 NR Description: E2, ubiquitin-conjugating enzyme, putative
  misc_feature (1)..(132): NCBI GI NO: 21618179 NR Description: E2, ubiquitin-conjugating enzyme, putative
  misc_feature (1)..(132): NCBI GI NO: 18402475 NR Description: E2, ubiquitin-conjugating enzyme, putative
  misc_feature (1)..(132): NCBI GI NO: 9454557 NR Description: Putative ubiquitin carrier protein
  misc_feature (1)..(132): NCBI GI NO: 25293673 NR Description: hypothetical protein F17J6.3
  misc_feature (1)..(132): NCBI GI NO: 3915189 NR Description: UBIQUITIN-CONJUGATING ENZYME X
  misc_feature (1)..(131): NCBI GI NO: 5902146 NR Description: ubiquitin-conjugating enzyme E2C
  misc_feature (1)..(131): NCBI GI NO: 27704688 NR Description: similar to ubiquitin-conjugating enzyme E2C
  misc_feature (1)..(131): NCBI GI NO: 30583869 NR Description: Homo sapiens ubiquitin-conjugating enzyme E2C
MALMMGGDPGVSAFPEGDNMLHWVGTIAGSAGTAYEGTSYRLALAFTAEYPYKPPKVRFDTPCFHPNVDVHGNICLDILQDKWSSAYDVRTILLSIQSLLGEPNNDSPLNTQAAALWANQEEFRKMVEKLYKAAA

SEQ ID NO: 32048 - DNA, 587 bp, Zea mays subsp. mays
  misc_feature (1)..(587): Ceres Seq. ID no. 12400564
gactgattcttctccttacctgcttctcccggtgtggatctcggctctcgacgagtttcagaggggttgttcgtaacatctgctaagatccgtggcggctgtttaggtgctggatccgtagcggcggcggcggccatggacaagagcatgctcggcgacctggacggcctccccgaggaggacaagatgcggatggccgccatgatcgaccagctccagatccgcgacagcctgagaatgtacaattcgctggtggagaggtgcttcacggactgcgtggacacgttccggcggaagaacctggacaagcaagaggagtcgtgcgtccgccggtgcgcggagaagttcctgaagcactccatgagggtcggcatgaggttcgccgagcttaaccagggtgtggccacgccggactaagaaacacgctgccgctggctggctgctctcgttgcgcgcccgccgccaggtttctggctttcgctggcacagatttgtagccgacaaaaggatttcagcacttcccctgcctgagatatatgcgttttagagccgaacgctgggtgtcagattgaataaaaactgccttg

SEQ ID NO: 32049 - protein, 93 aa, Zea mays subsp. mays
  peptide (1)..(93): Ceres Seq. ID no. 12400565
  misc_feature (20)..(85): Pfam Name: Pfam Description:  Tim10/DDP family zinc finger
  misc_feature (1)..(93): NCBI GI NO: 12230181 NR Description: Mitochondrial import inner membrane translocase subunit Tim9
  misc_feature (1)..(93): NCBI GI NO: 12230182 NR Description: Mitochondrial import inner membrane translocase subunit Tim9
  misc_feature (1)..(93): NCBI GI NO: 15231455 NR Description: small zinc finger-like protein TIM9
  misc_feature (1)..(93): NCBI GI NO: 21617942 NR Description: mitochondrial import inner membrane translocase subunit Tim9
  misc_feature (1)..(91): NCBI GI NO: 5107210 NR Description: small zinc finger-like protein
  misc_feature (1)..(91): NCBI GI NO: 11358850 NR Description: small zinc finger-like protein
  misc_feature (9)..(86): NCBI GI NO: 12230144 NR Description: Mitochondrial import inner membrane translocase subunit Tim9
  misc_feature (9)..(86): NCBI GI NO: 6320815 NR Description: Translocase in inner membrane of mitochondriainvolved in mitochondrial protein import
  misc_feature (9)..(86): NCBI GI NO: 19075508 NR Description: similar to yeast Tim9p essential component of themitochondrial import machinery
  misc_feature (1)..(84): NCBI GI NO: 23481518 NR Description: mitochondrial import inner membrane translocase subunit tim9
MDKSMLGDLDGLPEEDKMRMAAMIDQLQIRDSLRMYNSLVERCFTDCVDTFRRKNLDKQEESCVRRCAEKFLKHSMRVGMRFAELNQGVATPD

SEQ ID NO: 32050 - protein, 89 aa, Zea mays subsp. mays
  peptide (1)..(89): Ceres Seq. ID no. 12400566
  misc_feature (16)..(81): Pfam Name: Pfam Description:  Tim10/DDP family zinc finger
  misc_feature (1)..(89): NCBI GI NO: 12230181 NR Description: Mitochondrial import inner membrane translocase subunit Tim9
  misc_feature (1)..(89): NCBI GI NO: 12230182 NR Description: Mitochondrial import inner membrane translocase subunit Tim9
  misc_feature (1)..(89): NCBI GI NO: 15231455 NR Description: small zinc finger-like protein TIM9
  misc_feature (1)..(89): NCBI GI NO: 21617942 NR Description: mitochondrial import inner membrane translocase subunit Tim9
  misc_feature (1)..(87): NCBI GI NO: 5107210 NR Description: small zinc finger-like protein
  misc_feature (1)..(87): NCBI GI NO: 11358850 NR Description: small zinc finger-like protein
  misc_feature (5)..(82): NCBI GI NO: 12230144 NR Description: Mitochondrial import inner membrane translocase subunit Tim9
  misc_feature (5)..(82): NCBI GI NO: 6320815 NR Description: Translocase in inner membrane of mitochondriainvolved in mitochondrial protein import
  misc_feature (5)..(82): NCBI GI NO: 19075508 NR Description: similar to yeast Tim9p essential component of themitochondrial import machinery
  misc_feature (1)..(80): NCBI GI NO: 23481518 NR Description: mitochondrial import inner membrane translocase subunit tim9
MLGDLDGLPEEDKMRMAAMIDQLQIRDSLRMYNSLVERCFTDCVDTFRRKNLDKQEESCVRRCAEKFLKHSMRVGMRFAELNQGVATPD

SEQ ID NO: 32051 - protein, 76 aa, Zea mays subsp. mays
  peptide (1)..(76): Ceres Seq. ID no. 12400567
  misc_feature (3)..(68): Pfam Name: Pfam Description:  Tim10/DDP family zinc finger
  misc_feature (1)..(76): NCBI GI NO: 12230181 NR Description: Mitochondrial import inner membrane translocase subunit Tim9
  misc_feature (1)..(76): NCBI GI NO: 12230182 NR Description: Mitochondrial import inner membrane translocase subunit Tim9
  misc_feature (1)..(76): NCBI GI NO: 15231455 NR Description: small zinc finger-like protein TIM9
  misc_feature (1)..(76): NCBI GI NO: 21617942 NR Description: mitochondrial import inner membrane translocase subunit Tim9
  misc_feature (1)..(74): NCBI GI NO: 5107210 NR Description: small zinc finger-like protein
  misc_feature (1)..(74): NCBI GI NO: 11358850 NR Description: small zinc finger-like protein
  misc_feature (1)..(69): NCBI GI NO: 12230144 NR Description: Mitochondrial import inner membrane translocase subunit Tim9
  misc_feature (1)..(69): NCBI GI NO: 6320815 NR Description: Translocase in inner membrane of mitochondriainvolved in mitochondrial protein import
  misc_feature (1)..(69): NCBI GI NO: 19075508 NR Description: similar to yeast Tim9p essential component of themitochondrial import machinery
  misc_feature (1)..(67): NCBI GI NO: 23481518 NR Description: mitochondrial import inner membrane translocase subunit tim9
MRMAAMIDQLQIRDSLRMYNSLVERCFTDCVDTFRRKNLDKQEESCVRRCAEKFLKHSMRVGMRFAELNQGVATPD

SEQ ID NO: 32052 - DNA, 932 bp, Zea mays subsp. mays; identical to SEQ ID NO: 24926
  misc_feature (1)..(932): Ceres Seq. ID no. 12400274

SEQ ID NO: 32053 - protein, 151 aa, Zea mays subsp. mays; identical to SEQ ID NO: 24927
  peptide (1)..(151): Ceres Seq. ID no. 12400275
  misc_feature (5)..(117): NCBI GI NO: 34913982 NR Description: peptide deformylase-like protein
  misc_feature (26)..(117): NCBI GI NO: 17433049 NR Description: Peptide deformylase, mitochondrial precursor
  misc_feature (47)..(117): NCBI GI NO: 17433051 NR Description: Peptide deformylase, mitochondrial precursor
  misc_feature (47)..(117): NCBI GI NO: 18394237 NR Description: expressed protein; protein id: At1g15390
  misc_feature (71)..(117): NCBI GI NO: 37521298 NR Description: polypeptide deformylase [Gloeobacter violaceus]
  misc_feature (71)..(117): NCBI GI NO: 39930960 NR Description: Peptide deformylase 1
  misc_feature (74)..(117): NCBI GI NO: 24645728 NR Description: CG31373-PA [Drosophila melanogaster]
  misc_feature (72)..(124): NCBI GI NO: 11641243 NR Description: peptide deformylase-like protein [Homo sapiens]
  misc_feature (72)..(124): NCBI GI NO: 18043802 NR Description: peptide deformylase-like protein [Homo sapiens]
  misc_feature (72)..(124): NCBI GI NO: 34851655 NR Description: similar to peptide deformylase-like protein

SEQ ID NO: 32054 - protein, 121 aa, Zea mays subsp. mays; identical to SEQ ID NO: 24928
  peptide (1)..(121): Ceres Seq. ID no. 12400276
  misc_feature (20)..(102): NCBI GI NO: 34913982 NR Description: peptide deformylase-like protein
  misc_feature (20)..(119): NCBI GI NO: 17433049 NR Description: Peptide deformylase, mitochondrial precursor
  misc_feature (20)..(119): NCBI GI NO: 17433051 NR Description: Peptide deformylase, mitochondrial precursor
  misc_feature (20)..(119): NCBI GI NO: 18394237 NR Description: expressed protein; protein id: At1g15390
  misc_feature (8)..(108): NCBI GI NO: 37521298 NR Description: polypeptide deformylase [Gloeobacter violaceus]
  misc_feature (8)..(108): NCBI GI NO: 39930960 NR Description: Peptide deformylase 1
  misc_feature (19)..(104): NCBI GI NO: 24645728 NR Description: CG31373-PA [Drosophila melanogaster]
  misc_feature (20)..(101): NCBI GI NO: 11641243 NR Description: peptide deformylase-like protein [Homo sapiens]
  misc_feature (20)..(101): NCBI GI NO: 18043802 NR Description: peptide deformylase-like protein [Homo sapiens]
  misc_feature (1)..(101): NCBI GI NO: 34851655 NR Description: similar to peptide deformylase-like protein

SEQ ID NO: 32055 - protein, 88 aa, Zea mays subsp. mays; identical to SEQ ID NO: 24929
  peptide (1)..(88): Ceres Seq. ID no. 12400277
  misc_feature (1)..(54): NCBI GI NO: 34913982 NR Description: peptide deformylase-like protein
  misc_feature (1)..(54): NCBI GI NO: 17433049 NR Description: Peptide deformylase, mitochondrial precursor
  misc_feature (1)..(54): NCBI GI NO: 17433051 NR Description: Peptide deformylase, mitochondrial precursor
  misc_feature (1)..(54): NCBI GI NO: 18394237 NR Description: expressed protein; protein id: At1g15390
  misc_feature (8)..(54): NCBI GI NO: 37521298 NR Description: polypeptide deformylase [Gloeobacter violaceus]
  misc_feature (8)..(54): NCBI GI NO: 39930960 NR Description: Peptide deformylase 1
  misc_feature (11)..(54): NCBI GI NO: 24645728 NR Description: CG31373-PA [Drosophila melanogaster]
  misc_feature (9)..(61): NCBI GI NO: 11641243 NR Description: peptide deformylase-like protein [Homo sapiens]
  misc_feature (9)..(61): NCBI GI NO: 18043802 NR Description: peptide deformylase-like protein [Homo sapiens]
  misc_feature (9)..(61): NCBI GI NO: 34851655 NR Description: similar to peptide deformylase-like protein

SEQ ID NO: 32056 - DNA, 857 bp, Zea mays subsp. mays
  misc_feature (1)..(857): Ceres Seq. ID no. 12400410
aaactcatcccaaaccagagcgaagaagaatcgccatcacagcaagctacgcgcactgaaatcctccaatccacaggacacagctctacttccacagttcgcagactcgcacgcaccgagcggctagcgatcaacgagaaatgtcgctggtgaggcgcagcagcgtgttcgacccattctctgtggacctcttcgaccccttcgacagcatgttccgctccatcgtgccgccgtcgttgtcgtcgtcggcggcctccgagaccgccgccttcgccagcgcccgcatcgactggaaggagacgcccgaggcgcacgtgttcaaggccgacctccccggcgtgaagaaggaggaggtcaaggtggaggtggaggacggcaacgtgctgctcatcagcgggcagcgcagcagggagaaggaggacaagggcgacaagtggcaccgcgtggagcgcagcagcggccagttcgtgcggcgcttccgcctgccggagaacgccaagacggaggaggtgaggggccgcgctggagaacggcgtgctcacggtcaccgtgcccaaggccgaggtcaagaagcccgaggttaagagcatccagatctccgtctgaagaagacatggacgcgaggtgaatggtcgcgtcgcgttcgcgtcgcggcgtcgggtcttgggtttcagcgacgcgactcgtgtgtgtggtactgtggttgctctgctttggtatgtctggtgtgtacgtgtgctgttcagtgtttcgtggtcatcgtctgtacattgtgctgttcggtgagctccccgactcagtgtgttgtgttctgcgagtgaataaataaaaacaaaccagctgtcgtctcgtgtcgt

SEQ ID NO: 32057 - protein, 147 aa, Zea mays subsp. mays
  peptide (1)..(147): Ceres Seq. ID no. 12400411
  misc_feature (1)..(125): NCBI GI NO: 100883 NR Description: heat shock protein 17.2 - maize
  misc_feature (1)..(125): NCBI GI NO: 123543 NR Description: 16.9 KD CLASS I HEAT SHOCK PROTEIN
  misc_feature (1)..(125): NCBI GI NO: 169799 NR Description: 16.9 kDa heat shock protein
  misc_feature (1)..(125): NCBI GI NO: 7441298 NR Description: heat shock protein 17.0 - pearl millet
  misc_feature (1)..(125): NCBI GI NO: 123545 NR Description: 16
  misc_feature (1)..(125): NCBI GI NO: 15408722 NR Description: putative 16.9 kDa heat shock protein
  misc_feature (1)..(125): NCBI GI NO: 17942916 NR Description: Chain A
  misc_feature (1)..(125): NCBI GI NO: 1536911 NR Description: 17 kDa class I small heat shock protein
  misc_feature (1)..(125): NCBI GI NO: 7441301 NR Description: heat shock protein - rice
  misc_feature (1)..(125): NCBI GI NO: 100789 NR Description: heat shock protein 16.9B - wheat
MSLVRRSSVFDPFSVDLFDPFDSMFRSIVPPSLSSSAASETAAFASARIDWKETPEAHVFKADLPGVKKEEVKVEVEDGNVLLISGQRSREKEDKGDKWHRVERSSGQFVRRFRLPENAKTEEVRGRAGERRAHGHRAQGRGQEARG

SEQ ID NO: 32058 - protein, 124 aa, Zea mays subsp. mays
  peptide (1)..(124): Ceres Seq. ID no. 12400412
  misc_feature (1)..(102): NCBI GI NO: 100883 NR Description: heat shock protein 17.2 - maize
  misc_feature (1)..(102): NCBI GI NO: 123543 NR Description: 16.9 KD CLASS I HEAT SHOCK PROTEIN
  misc_feature (1)..(102): NCBI GI NO: 169799 NR Description: 16.9 kDa heat shock protein
  misc_feature (1)..(102): NCBI GI NO: 7441298 NR Description: heat shock protein 17.0 - pearl millet
  misc_feature (1)..(102): NCBI GI NO: 123545 NR Description: 16
  misc_feature (1)..(102): NCBI GI NO: 15408722 NR Description: putative 16.9 kDa heat shock protein
  misc_feature (1)..(102): NCBI GI NO: 17942916 NR Description: Chain A
  misc_feature (1)..(102): NCBI GI NO: 1536911 NR Description: 17 kDa class I small heat shock protein
  misc_feature (1)..(102): NCBI GI NO: 7441301 NR Description: heat shock protein - rice
  misc_feature (1)..(102): NCBI GI NO: 100789 NR Description: heat shock protein 16.9B - wheat
MFRSIVPPSLSSSAASETAAFASARIDWKETPEAHVFKADLPGVKKEEVKVEVEDGNVLLISGQRSREKEDKGDKWHRVERSSGQFVRRFRLPENAKTEEVRGRAGERRAHGHRAQGRGQEARG

SEQ ID NO: 32059 - DNA, 861 bp, Zea mays subsp. mays
  misc_feature (1)..(861): Ceres Seq. ID no. 12342053
aacgaagagagggaaaacaagtgtggaagagggaaaactggaaaaggcacagcaaaccgagaaaatggcggctcggcgtgggcgagagtgggacggggacgagcagggcgcggcgctgccaacgccggcgcccctcggcgcgccggtcgtctgccttctcagctccgccggagacctagccgccggcgccttcgtaggctccctcgtcggatacggaaaaggtttgatcacaaaccaaggcacgaaggcttgtcttagcattgctggatcttctgcaaagacatttgctgctcttgctggtgtccaaagtttcatcatgtgcttgctaagaagactgcgtgggaaagatgacatgatcaatgcgggtatggcaggttgttgcacaggcattgctttgagctttccaggtgcgccccaggcaatgttccacagctgtgtcaccttcgcagcattctcatgcataatggacggtctcagcaagcagcaggcagcaatggcactcacacttgatgtgaaatctccaactgtcaagtatgaggagggccgggtcatcccaccattcactcttccgccgcttctggatgcattggatcctctaggttcattctgccagacccttatcaagcctaagcattaggagtgcgctgaggcttgttaccccaaaaaggcagtttcgatctatagtttggcactgtatgctctataaccgttctgaatttgtctccagtcatgctgttcaagtttggtaactgtagtggcgctataggacatatgcccattttttgtcaatggtacattttttatgaaacttgctgaagagattataaccataagattgttcattggtgaagatttgatagt

SEQ ID NO: 32060 - protein, 211 aa, Zea mays subsp. mays
  peptide (1)..(211): Ceres Seq. ID no. 12342054
  misc_feature (45)..(162): Pfam Name: Pfam Description:  Tim17/Tim22/Tim23 family
  misc_feature (22)..(210): NCBI GI NO: 37533490 NR Description: unknown protein
  misc_feature (22)..(211): NCBI GI NO: 24414272 NR Description: Unknown protein
  misc_feature (31)..(210): NCBI GI NO: 15240525 NR Description: putative protein; protein id: At5g55510.1
  misc_feature (31)..(210): NCBI GI NO: 18416798 NR Description: putative protein; protein id: At4g26670
  misc_feature (31)..(210): NCBI GI NO: 9758183 NR Description: contains similarity to unknownprotein~gene_id:MTE17
  misc_feature (31)..(210): NCBI GI NO: 7485327 NR Description: hypothetical protein F10M23
  misc_feature (90)..(156): NCBI GI NO: 18398755 NR Description: expressed protein; protein id: At3g10110
TKRGKTSVEEGKLEKAQQTEKMAARRGREWDGDEQGAALPTPAPLGAPVVCLLSSAGDLAAGAFVGSLVGYGKGLITNQGTKACLSIAGSSAKTFAALAGVQSFIMCLLRRLRGKDDMINAGMAGCCTGIALSFPGAPQAMFHSCVTFAAFSCIMDGLSKQQAAMALTLDVKSPTVKYEEGRVIPPFTLPPLLDALDPLGSFCQTLIKPKH

SEQ ID NO: 32061 - protein, 190 aa, Zea mays subsp. mays
  peptide (1)..(190): Ceres Seq. ID no. 12342055
  misc_feature (24)..(141): Pfam Name: Pfam Description:  Tim17/Tim22/Tim23 family
  misc_feature (1)..(189): NCBI GI NO: 37533490 NR Description: unknown protein
  misc_feature (1)..(190): NCBI GI NO: 24414272 NR Description: Unknown protein
  misc_feature (10)..(189): NCBI GI NO: 15240525 NR Description: putative protein; protein id: At5g55510.1
  misc_feature (10)..(189): NCBI GI NO: 18416798 NR Description: putative protein; protein id: At4g26670
  misc_feature (10)..(189): NCBI GI NO: 9758183 NR Description: contains similarity to unknownprotein~gene_id:MTE17
  misc_feature (10)..(189): NCBI GI NO: 7485327 NR Description: hypothetical protein F10M23
  misc_feature (69)..(135): NCBI GI NO: 18398755 NR Description: expressed protein; protein id: At3g10110
MAARRGREWDGDEQGAALPTPAPLGAPVVCLLSSAGDLAAGAFVGSLVGYGKGLITNQGTKACLSIAGSSAKTFAALAGVQSFIMCLLRRLRGKDDMINAGMAGCCTGIALSFPGAPQAMFHSCVTFAAFSCIMDGLSKQQAAMALTLDVKSPTVKYEEGRVIPPFTLPPLLDALDPLGSFCQTLIKPKH

SEQ ID NO: 32062 - protein, 106 aa, Zea mays subsp. mays
  peptide (1)..(106): Ceres Seq. ID no. 12342056
  misc_feature (1)..(57): Pfam Name: Pfam Description:  Tim17/Tim22/Tim23 family
  misc_feature (1)..(105): NCBI GI NO: 37533490 NR Description: unknown protein
  misc_feature (1)..(106): NCBI GI NO: 24414272 NR Description: Unknown protein
  misc_feature (1)..(105): NCBI GI NO: 15240525 NR Description: putative protein; protein id: At5g55510.1
  misc_feature (1)..(105): NCBI GI NO: 18416798 NR Description: putative protein; protein id: At4g26670
  misc_feature (1)..(105): NCBI GI NO: 9758183 NR Description: contains similarity to unknownprotein~gene_id:MTE17
  misc_feature (1)..(105): NCBI GI NO: 7485327 NR Description: hypothetical protein F10M23
  misc_feature (1)..(51): NCBI GI NO: 18398755 NR Description: expressed protein; protein id: At3g10110
MCLLRRLRGKDDMINAGMAGCCTGIALSFPGAPQAMFHSCVTFAAFSCIMDGLSKQQAAMALTLDVKSPTVKYEEGRVIPPFTLPPLLDALDPLGSFCQTLIKPKH

SEQ ID NO: 32063 - DNA, 552 bp, Zea mays subsp. mays
  misc_feature (1)..(552): Ceres Seq. ID no. 12361769
aagtttcaggcagagatggagcggatgggccgtgccggcacaccgcgcttcgcttggtccctcagcaacgtcccagacctgggccagcgccgcgctcaccgacacctccacctgcctcgactccctcgcccagcagtcccgcggtggcaaggacagcgacgacgccgtcagggtgaagaggagggtggtggccgtcgcgcaggccaccagcaacgcgctcgggctcgtcaacaggctccagccggcgccgcaccggcggcgtctcctgtgactcttgtagcagcagctagccacggaaatctttgatggttcctcgttctcatccatgtcgacatcatccgtcccctgcatctccttctccaattgccatgtatgcgtgtatgtatgggtatggtatgcgtgtatgtatggactacggatcgatcagctttctcgattgcgtggttgtcgttgtctatctgtagtaactctgcagctgggatcactcaattcccgctagtggttgttcaggattatgctcaagtttatgcgtagtaaatagcaaaatctttg

SEQ ID NO: 32064 - protein, 101 aa, Zea mays subsp. mays
  peptide (1)..(101): Ceres Seq. ID no. 12361770
  misc_feature (4)..(24): NCBI GI NO: 32489696 NR Description: OSJNBb0004G23.9
KFQAEMERMGRAGTPRFAWSLSNVPDLGQRRAHRHLHLPRLPRPAVPRWQGQRRRRQGEEEGGGRRAGHQQRARARQQAPAGAAPAASPVTLVAAASHGNL

SEQ ID NO: 32065 - protein, 96 aa, Zea mays subsp. mays
  peptide (1)..(96): Ceres Seq. ID no. 12361771
  misc_feature (1)..(19): NCBI GI NO: 32489696 NR Description: OSJNBb0004G23.9
MERMGRAGTPRFAWSLSNVPDLGQRRAHRHLHLPRLPRPAVPRWQGQRRRRQGEEEGGGRRAGHQQRARARQQAPAGAAPAASPVTLVAAASHGNL

SEQ ID NO: 32066 - protein, 93 aa, Zea mays subsp. mays
  peptide (1)..(93): Ceres Seq. ID no. 12361772
  misc_feature (1)..(16): NCBI GI NO: 32489696 NR Description: OSJNBb0004G23.9
MGRAGTPRFAWSLSNVPDLGQRRAHRHLHLPRLPRPAVPRWQGQRRRRQGEEEGGGRRAGHQQRARARQQAPAGAAPAASPVTLVAAASHGNL

SEQ ID NO: 32067 - protein, 89 aa, Zea mays subsp. mays
  peptide (1)..(89): Ceres Seq. ID no. 12361773
  misc_feature (25)..(84): NCBI GI NO: 32489696 NR Description: OSJNBb0004G23.9
  misc_feature (25)..(78): NCBI GI NO: 18407657 NR Description: expressed protein; protein id: At1g62770
  misc_feature (25)..(78): NCBI GI NO: 21618013 NR Description: putative ripening-related protein
  misc_feature (25)..(85): NCBI GI NO: 112717 NR Description: 21 KD PROTEIN PRECURSOR (1.2 PROTEIN)
  misc_feature (25)..(85): NCBI GI NO: 15234547 NR Description: putative protein; protein id: At4g12390
SFRQRWSGWAVPAHRASLGPSATSQTWASAALTDTSTCLDSLAQQSRGGKDSDDAVRVKRRVVAVAQATSNALGLVNRLQPAPHRRRLL

SEQ ID NO: 32068 - DNA, 726 bp, Zea mays subsp. mays
  misc_feature (1)..(726): Ceres Seq. ID no. 12343292
acactttcaaggatttgctaaccaaacatgaagatgccgtctctgaatttctgagctcacattatgagcagttttttggactctacacaaaacttttatcttcaactaattatgtgacacgaagacaatcagtgaagtttctttcagagtttctgttggaggccccaaatgctcaaataatgaagcgttacattttggaagttcattacttaaacattatgatgggcctgctaaaggattcaagcaaaaatatcaggatatgtgccttccacatttttaaggtatttgttgccaatccaaacaagcctcgtgagattattcaggttttggttgagaatcacagagaagtgttgaagctactccacaatctccccacaagcaaaggtgaagatgaacagcttgatgaggagagagatttaattatcaaagaaatcgagaagcttgtgcggttgtcagtataaaccctcaggaaattcgaacgtatccttgaatacatactgtgcaatatgctgccttgtatagagcttgtttttcatgtatggaaaaaaaagtttggccacaaattgcatttttcgcgagaacacttagcatttctgtcagaaaattattgtcgtgtagcagaatttgcaacaggaataatctgcattatggtgtggtgttgataccattaaggattggtgaaagtgcctgccatttgaaatgggtacgcttgtcatgtttgtttcg

SEQ ID NO: 32069 - protein, 152 aa, Zea mays subsp. mays
  peptide (1)..(152): Ceres Seq. ID no. 12343293
  misc_feature (1)..(148): Pfam Name: Pfam Description:  Mo25 protein family
  misc_feature (1)..(152): NCBI GI NO: 33146499 NR Description: unknown protein
  misc_feature (1)..(152): NCBI GI NO: 34898912 NR Description: hypothetical protein
  misc_feature (1)..(147): NCBI GI NO: 18419772 NR Description: putative protein; protein id: At5g18940
  misc_feature (1)..(147): NCBI GI NO: 1794137 NR Description: DMO25 [Drosophila melanogaster]
  misc_feature (1)..(147): NCBI GI NO: 17647657 NR Description: Mo25 CG4083-PA
  misc_feature (1)..(149): NCBI GI NO: 31982582 NR Description: MO25 protein; calcium binding protein, 39 kDa
  misc_feature (1)..(149): NCBI GI NO: 7706481 NR Description: MO25 protein [Homo sapiens]
  misc_feature (1)..(149): NCBI GI NO: 22137752 NR Description: Similar to calcium binding protein, 39 kDa
  misc_feature (1)..(149): NCBI GI NO: 18044843 NR Description: MO25 protein [Mus musculus]
  misc_feature (1)..(149): NCBI GI NO: 34877516 NR Description: similar to MO25 protein [Rattus norvegicus]
TFKDLLTKHEDAVSEFLSSHYEQFFGLYTKLLSSTNYVTRRQSVKFLSEFLLEAPNAQIMKRYILEVHYLNIMMGLLKDSSKNIRICAFHIFKVFVANPNKPREIIQVLVENHREVLKLLHNLPTSKGEDEQLDEERDLIIKEIEKLVRLSV

SEQ ID NO: 32070 - protein, 93 aa, Zea mays subsp. mays
  peptide (1)..(93): Ceres Seq. ID no. 12343294
  misc_feature (1)..(89): Pfam Name: Pfam Description:  Mo25 protein family
  misc_feature (1)..(93): NCBI GI NO: 33146499 NR Description: unknown protein
  misc_feature (1)..(93): NCBI GI NO: 34898912 NR Description: hypothetical protein
  misc_feature (1)..(88): NCBI GI NO: 18419772 NR Description: putative protein; protein id: At5g18940
  misc_feature (1)..(88): NCBI GI NO: 1794137 NR Description: DMO25 [Drosophila melanogaster]
  misc_feature (1)..(88): NCBI GI NO: 17647657 NR Description: Mo25 CG4083-PA
  misc_feature (1)..(90): NCBI GI NO: 31982582 NR Description: MO25 protein; calcium binding protein, 39 kDa
  misc_feature (1)..(90): NCBI GI NO: 7706481 NR Description: MO25 protein [Homo sapiens]
  misc_feature (1)..(90): NCBI GI NO: 22137752 NR Description: Similar to calcium binding protein, 39 kDa
  misc_feature (1)..(90): NCBI GI NO: 18044843 NR Description: MO25 protein [Mus musculus]
  misc_feature (1)..(90): NCBI GI NO: 34877516 NR Description: similar to MO25 protein [Rattus norvegicus]
MKRYILEVHYLNIMMGLLKDSSKNIRICAFHIFKVFVANPNKPREIIQVLVENHREVLKLLHNLPTSKGEDEQLDEERDLIIKEIEKLVRLSV

SEQ ID NO: 32071 - protein, 80 aa, Zea mays subsp. mays
  peptide (1)..(80): Ceres Seq. ID no. 12343295
  misc_feature (1)..(76): Pfam Name: Pfam Description:  Mo25 protein family
  misc_feature (1)..(80): NCBI GI NO: 33146499 NR Description: unknown protein
  misc_feature (1)..(80): NCBI GI NO: 34898912 NR Description: hypothetical protein
  misc_feature (1)..(75): NCBI GI NO: 18419772 NR Description: putative protein; protein id: At5g18940
  misc_feature (1)..(75): NCBI GI NO: 1794137 NR Description: DMO25 [Drosophila melanogaster]
  misc_feature (1)..(75): NCBI GI NO: 17647657 NR Description: Mo25 CG4083-PA
  misc_feature (1)..(77): NCBI GI NO: 31982582 NR Description: MO25 protein; calcium binding protein, 39 kDa
  misc_feature (1)..(77): NCBI GI NO: 7706481 NR Description: MO25 protein [Homo sapiens]
  misc_feature (1)..(77): NCBI GI NO: 22137752 NR Description: Similar to calcium binding protein, 39 kDa
  misc_feature (1)..(77): NCBI GI NO: 18044843 NR Description: MO25 protein [Mus musculus]
  misc_feature (1)..(77): NCBI GI NO: 34877516 NR Description: similar to MO25 protein [Rattus norvegicus]
MMGLLKDSSKNIRICAFHIFKVFVANPNKPREIIQVLVENHREVLKLLHNLPTSKGEDEQLDEERDLIIKEIEKLVRLSV

SEQ ID NO: 32072 - DNA, 726 bp, Zea mays subsp. mays
  misc_feature (1)..(726): Ceres Seq. ID no. 12400560
  misc_feature (455)..(455): n is a, c, t, g, unknown, or other
  misc_feature (408)..(408): n is a, c, t, g, unknown, or other
ctcggccctctcctcggcgacgccactactcctgcctcacgccgccagctcaaaccgcagaagagagaagagaagcacgcccaaaaattccgaggttttcacctcttggagcgcaccaacaccacccggagaccggagcgactcgccaccggcgcggaaaaggagggcggaggctcgatggcggatgagaatcaggctggaaagaaagaggaggaggaatttagcacaggccctctgtcagtcctaatgatgagtgttaagaacaacacccaggtcctcatcaattgccgcaacaacaagaagctgcttggccgtgttcgtgcttttgatcgccactgtaacatggtgctcgagaacgtgcgtgagatgtggacagagatccccaagactggcaagggcaaaaagaangctctgcctgtgaacaaggatagattcatcagtaagatgttcctcangggcgactcggtcatcatagtgctgaggaacccgaagtgatcgcccaaccagtcaccttgcagcagttatgccccttctctgggttcacggaatccgtgcctctgttgaaaaaaactgtagcttatgtatgtcttggcggattagctggttatcttgaactgacgttcatgtgacatggcaatggcacatgaacatacgtttcatgagtttggttgttaattggcgcttgcagtactttgatccctgaatgttgagattgcacttctgctt

SEQ ID NO: 32073 - protein, 164 aa, Zea mays subsp. mays
  peptide (1)..(164): Ceres Seq. ID no. 12400561
  misc_feature (82)..(161): Pfam Name: Pfam Description:  LSM domain
  misc_feature (62)..(164): NCBI GI NO: 18407411 NR Description: putative small nuclear ribonucleoprotein D2
  misc_feature (62)..(164): NCBI GI NO: 21554692 NR Description: small nuclear ribonucleoprotein-like protein
  misc_feature (62)..(164): NCBI GI NO: 30690747 NR Description: small nuclear ribonucleo protein D2 -related
  misc_feature (68)..(163): NCBI GI NO: 4759158 NR Description: small nuclear ribonucleoprotein polypeptide D2
  misc_feature (65)..(163): NCBI GI NO: 21357623 NR Description: CG1249-PA [Drosophila melanogaster]
  misc_feature (68)..(163): NCBI GI NO: 26337731 NR Description: unnamed protein product [Mus musculus]
  misc_feature (68)..(163): NCBI GI NO: 22203734 NR Description: small nuclear ribonucleoprotein D2-like protein
  misc_feature (68)..(163): NCBI GI NO: 27677236 NR Description: similar to Small nuclear ribonucleoprotein Sm D2
  misc_feature (52)..(163): NCBI GI NO: 39592141 NR Description: Hypothetical protein CBG23345
  misc_feature (52)..(163): NCBI GI NO: 17558868 NR Description: Small nuclear ribonucleoprotein (13.3 kD)
  misc_feature (136)..(136): Xaa is any aa, unknown or other
  misc_feature (152)..(152): Xaa is any aa, unknown or other
LGPLLGDATTPASRRQLKPQKREEKHAQKFRGFHLLERTNTTRRPERLATGAEKEGGGSMADENQAGKKEEEEFSTGPLSVLMMSVKNNTQVLINCRNNKKLLGRVRAFDRHCNMVLENVREMWTEIPKTGKGKKXALPVNKDRFISKMFLXGDSVIIVLRNPK

SEQ ID NO: 32074 - protein, 105 aa, Zea mays subsp. mays
  peptide (1)..(105): Ceres Seq. ID no. 12400562
  misc_feature (23)..(102): Pfam Name: Pfam Description:  LSM domain
  misc_feature (3)..(105): NCBI GI NO: 18407411 NR Description: putative small nuclear ribonucleoprotein D2
  misc_feature (3)..(105): NCBI GI NO: 21554692 NR Description: small nuclear ribonucleoprotein-like protein
  misc_feature (3)..(105): NCBI GI NO: 30690747 NR Description: small nuclear ribonucleo protein D2 -related
  misc_feature (9)..(104): NCBI GI NO: 4759158 NR Description: small nuclear ribonucleoprotein polypeptide D2
  misc_feature (6)..(104): NCBI GI NO: 21357623 NR Description: CG1249-PA [Drosophila melanogaster]
  misc_feature (9)..(104): NCBI GI NO: 26337731 NR Description: unnamed protein product [Mus musculus]
  misc_feature (9)..(104): NCBI GI NO: 22203734 NR Description: small nuclear ribonucleoprotein D2-like protein
  misc_feature (9)..(104): NCBI GI NO: 27677236 NR Description: similar to Small nuclear ribonucleoprotein Sm D2
  misc_feature (1)..(104): NCBI GI NO: 39592141 NR Description: Hypothetical protein CBG23345
  misc_feature (1)..(104): NCBI GI NO: 17558868 NR Description: Small nuclear ribonucleoprotein (13.3 kD)
  misc_feature (77)..(77): Xaa is any aa, unknown or other
  misc_feature (93)..(93): Xaa is any aa, unknown or other
MADENQAGKKEEEEFSTGPLSVLMMSVKNNTQVLINCRNNKKLLGRVRAFDRHCNMVLENVREMWTEIPKTGKGKKXALPVNKDRFISKMFLXGDSVIIVLRNPK

SEQ ID NO: 32075 - protein, 82 aa, Zea mays subsp. mays
  peptide (1)..(82): Ceres Seq. ID no. 12400563
  misc_feature (1)..(79): Pfam Name: Pfam Description:  LSM domain
  misc_feature (1)..(82): NCBI GI NO: 18407411 NR Description: putative small nuclear ribonucleoprotein D2
  misc_feature (1)..(82): NCBI GI NO: 21554692 NR Description: small nuclear ribonucleoprotein-like protein
  misc_feature (1)..(82): NCBI GI NO: 30690747 NR Description: small nuclear ribonucleo protein D2 -related
  misc_feature (1)..(81): NCBI GI NO: 4759158 NR Description: small nuclear ribonucleoprotein polypeptide D2
  misc_feature (1)..(81): NCBI GI NO: 21357623 NR Description: CG1249-PA [Drosophila melanogaster]
  misc_feature (1)..(81): NCBI GI NO: 26337731 NR Description: unnamed protein product [Mus musculus]
  misc_feature (1)..(81): NCBI GI NO: 22203734 NR Description: small nuclear ribonucleoprotein D2-like protein
  misc_feature (1)..(81): NCBI GI NO: 27677236 NR Description: similar to Small nuclear ribonucleoprotein Sm D2
  misc_feature (1)..(81): NCBI GI NO: 39592141 NR Description: Hypothetical protein CBG23345
  misc_feature (1)..(81): NCBI GI NO: 17558868 NR Description: Small nuclear ribonucleoprotein (13.3 kD)
  misc_feature (54)..(54): Xaa is any aa, unknown or other
  misc_feature (70)..(70): Xaa is any aa, unknown or other
MMSVKNNTQVLINCRNNKKLLGRVRAFDRHCNMVLENVREMWTEIPKTGKGKKXALPVNKDRFISKMFLXGDSVIIVLRNPK

SEQ ID NO: 32076 - DNA, 1336 bp, Zea mays subsp. mays
  misc_feature (1)..(1336): Ceres Seq. ID no. 12400914
atatcctataacaatttccccaacccacatggccaacgccgacgctggcgacggcgacgaggtcatcctcgacgctcccggcttcatacgagtgtacaggagcggccgcgtcgagcgctttctgccggtcgacttcgccccgccctccactgacgccgccaccggcgtttcttcaaaggacgtcgccatcctcccagacgcctgcctattggttcgcatttacctcccagcgcccccctcttccggaagttacagcggcaagctccccgtcctggtgttcttccacggcggcgggttctgcctcggttcggcgtttgatgcggcggtgcactcccacgccaaccggttagccgcggctgccggcgcaatcatcgtgtcggtggaataccgcctcgcgccagagcatccggtccccgctctctaccgggacgcgtggacggcgctccagtgggtggccgcgcactccgtgggccgggggcaggaaccctggctgactgcccacgcggacctcgggcgcgtccacgtcggtggagagagcgcgggcgcgaacattgcccaccacgccgcgatgcgcgctggcagagaggagctgggccacggcgtgaagctcagctcgctcgtgatgatccatccctacttcctgggaggcgagagctccgagacagacgacatgggcgtagcgttgctccgcgagctcgtccggctgtggccggtggtatgcccgggcacgagcgggtgcgatgacgacccgttgatcaatccgatggcagagggtgcccccaatctcgctagcttggggtgccgacgcgtagtggtgtgcgtcgggggaaaggacccgatgagaggcagaggaaggctgtattgtgagaagctgaagagaagtgggtggcgcggggaggtggatgactgggaggcggacggccagggacacggtttccatctctcgtgccccatgagcgcagaggcggaggcgcaagtccgggtcatcgctgagtttctgacctacggatgacatatctgttttcccactccttcacgcggccatggtgcattgttctcgaatctgatatacattttttgtttcgagttttggttgaggacttgcatgtttatattttatatttttatctactatttcataagcttaataaatgtttggctatgggttccagattctcaattttcatcagaagaaggggttactgagctgtattagacttacctttgggttaatatctattggtgcaagacccagattggctatacctttgtaatcgtatttgctttgcctggctaaagtttatgacaaaattgtcgcattgctgacattctctct

SEQ ID NO: 32077 - protein, 336 aa, Zea mays subsp. mays
  peptide (1)..(336): Ceres Seq. ID no. 12400915
  misc_feature (74)..(133): Pfam Name: Pfam Description:  Carboxylesterase
  misc_feature (12)..(334): NCBI GI NO: 38344841 NR Description: OSJNBa0064H22.22
  misc_feature (20)..(332): NCBI GI NO: 15228425 NR Description: putative protein; protein id: At3g48690
  misc_feature (20)..(333): NCBI GI NO: 15221975 NR Description: hypothetical protein; protein id: At1g19190.1
  misc_feature (20)..(332): NCBI GI NO: 18086341 NR Description: AT3g48690/T8P19_200 [Arabidopsis thaliana]
  misc_feature (10)..(336): NCBI GI NO: 34393975 NR Description: putative PrMC3
  misc_feature (20)..(333): NCBI GI NO: 15228426 NR Description: putative protein; protein id: At3g48700.1
  misc_feature (19)..(336): NCBI GI NO: 34393904 NR Description: putative cell death associated protein
  misc_feature (6)..(334): NCBI GI NO: 21537287 NR Description: putative esterase [Arabidopsis thaliana]
  misc_feature (6)..(334): NCBI GI NO: 18402731 NR Description: expressed protein; protein id: At1g49650
  misc_feature (19)..(333): NCBI GI NO: 15227669 NR Description: putative esterase; protein id: At2g03550.1
YPITISPTHMANADAGDGDEVILDAPGFIRVYRSGRVERFLPVDFAPPSTDAATGVSSKDVAILPDACLLVRIYLPAPPSSGSYSGKLPVLVFFHGGGFCLGSAFDAAVHSHANRLAAAAGAIIVSVEYRLAPEHPVPALYRDAWTALQWVAAHSVGRGQEPWLTAHADLGRVHVGGESAGANIAHHAAMRAGREELGHGVKLSSLVMIHPYFLGGESSETDDMGVALLRELVRLWPVVCPGTSGCDDDPLINPMAEGAPNLASLGCRRVVVCVGGKDPMRGRGRLYCEKLKRSGWRGEVDDWEADGQGHGFHLSCPMSAEAEAQVRVIAEFLTYG

SEQ ID NO: 32078 - protein, 327 aa, Zea mays subsp. mays
  peptide (1)..(327): Ceres Seq. ID no. 12400916
  misc_feature (65)..(124): Pfam Name: Pfam Description:  Carboxylesterase
  misc_feature (3)..(325): NCBI GI NO: 38344841 NR Description: OSJNBa0064H22.22
  misc_feature (11)..(323): NCBI GI NO: 15228425 NR Description: putative protein; protein id: At3g48690
  misc_feature (11)..(324): NCBI GI NO: 15221975 NR Description: hypothetical protein; protein id: At1g19190.1
  misc_feature (11)..(323): NCBI GI NO: 18086341 NR Description: AT3g48690/T8P19_200 [Arabidopsis thaliana]
  misc_feature (1)..(327): NCBI GI NO: 34393975 NR Description: putative PrMC3
  misc_feature (11)..(324): NCBI GI NO: 15228426 NR Description: putative protein; protein id: At3g48700.1
  misc_feature (10)..(327): NCBI GI NO: 34393904 NR Description: putative cell death associated protein
  misc_feature (1)..(325): NCBI GI NO: 21537287 NR Description: putative esterase [Arabidopsis thaliana]
  misc_feature (1)..(325): NCBI GI NO: 18402731 NR Description: expressed protein; protein id: At1g49650
  misc_feature (10)..(324): NCBI GI NO: 15227669 NR Description: putative esterase; protein id: At2g03550.1
MANADAGDGDEVILDAPGFIRVYRSGRVERFLPVDFAPPSTDAATGVSSKDVAILPDACLLVRIYLPAPPSSGSYSGKLPVLVFFHGGGFCLGSAFDAAVHSHANRLAAAAGAIIVSVEYRLAPEHPVPALYRDAWTALQWVAAHSVGRGQEPWLTAHADLGRVHVGGESAGANIAHHAAMRAGREELGHGVKLSSLVMIHPYFLGGESSETDDMGVALLRELVRLWPVVCPGTSGCDDDPLINPMAEGAPNLASLGCRRVVVCVGGKDPMRGRGRLYCEKLKRSGWRGEVDDWEADGQGHGFHLSCPMSAEAEAQVRVIAEFLTYG

SEQ ID NO: 32079 - DNA, 1316 bp, Zea mays subsp. mays
  misc_feature (1)..(1316): Ceres Seq. ID no. 12400906
tctgctctgctcagccagctagccatatatacggcggcattcttcttctcttcttcttccccaataacatatcgagctgcaagctgctctgcttcttttctagcatgggcatgagggtcttgttggtggtcgtgctcatctcgttcgccccccttattaccactaatgtagcagcaggtgtcaacgccacgagatctgctggtaggcagcagaagcagaagcagaagccgctggcgcctgccctcatcgtgttcggcgactccatcgtggaccccggcaacaacaacgacatccacaccatcatcaaggccgacttcccgccctacggcacctacttccagaaccacagagccacgggaaggttctgcaacggcaggataccaaccgacttcatcgcctcccgcctcggcatcaaggagcttctgccgccctacctcacctccgagccgctcgacaagcacgacctcgtcaccggcgtcagcttcgcgtccggcggcacgggcttcgacccgctcacgccgcagctcgcctccgtgatctcgctcccggaccagctcaccatgttccacgactacctgggcaaggtgcgcgacgccgccggggacgccagggtgtcggatatcctgtcccggggcgtcttcgccatctgcgccggcagcgacgacgtggccaacacctacttcaccctgcgagcgcgcagcagctacgaccacgcctcctacgcgcgcctcctggtgcagcacgccaccgccttcgtcgaggacctcatccgcgccggcgcgcgccgcgtcgccttcatcggcatcccgcccatcggctgcgtcccgtcgcagcgcaccatgtccggcggtctcgaccggggctgctcgcagggccacaacgagatcgccgtcgcatacaacgccgggatggtgcagcagctggcggcgctgcgggccaagtaccccgacacgctgctcgtcttcatggacatctacggcttcctctacgacatgatgatgcacccgcgcagctacggcttcacgcagtccaccagaggatgctgcggcacgggcctcctcgaggtctccgtcctctgcaacggcgtcacctccgccgtctgccaagacgtcggcgactacctcttctgggacagctaccacccaacggagaaggcgtacaagatcctcgccgacttcgtcttcgacaactacgtcaagctcatcctcgtctagcttaccattattttcatttcatgagatggatttgatctgctggattatgcattaattgtttgctgctgtatttacatttgcttgtctgattaattgtttgct

SEQ ID NO: 32080 - protein, 403 aa, Zea mays subsp. mays
  peptide (1)..(403): Ceres Seq. ID no. 12400907
  misc_feature (81)..(393): Pfam Name: Pfam Description:  GDSL-like Lipase/Acylhydrolase
  misc_feature (71)..(398): NCBI GI NO: 15222901 NR Description: family II extracellular lipase 3
  misc_feature (71)..(398): NCBI GI NO: 26449364 NR Description: putative family II lipase EXL3
  misc_feature (71)..(397): NCBI GI NO: 25404994 NR Description: protein T4O12.13 [imported] - Arabidopsis thaliana
  misc_feature (39)..(402): NCBI GI NO: 30102970 NR Description: putative lipase/acylhydrolase
  misc_feature (79)..(397): NCBI GI NO: 37534726 NR Description: putative anter-specific proline-rich protein
  misc_feature (71)..(396): NCBI GI NO: 18394825 NR Description: anter-specific proline-rich protein APG precursor
  misc_feature (71)..(396): NCBI GI NO: 21592372 NR Description: anter-specific proline-rich protein APG precursor
  misc_feature (72)..(401): NCBI GI NO: 18406327 NR Description: proline-rich protein, putative
  misc_feature (60)..(398): NCBI GI NO: 28393626 NR Description: putative family II extracellular lipase 1 (EXL1)
  misc_feature (61)..(398): NCBI GI NO: 8778807 NR Description: T4O12.12 [Arabidopsis thaliana]
CSAQPASHIYGGILLLFFFPNNISSCKLLCFFSSMGMRVLLVVVLISFAPLITTNVAAGVNATRSAGRQQKQKQKPLAPALIVFGDSIVDPGNNNDIHTIIKADFPPYGTYFQNHRATGRFCNGRIPTDFIASRLGIKELLPPYLTSEPLDKHDLVTGVSFASGGTGFDPLTPQLASVISLPDQLTMFHDYLGKVRDAAGDARVSDILSRGVFAICAGSDDVANTYFTLRARSSYDHASYARLLVQHATAFVEDLIRAGARRVAFIGIPPIGCVPSQRTMSGGLDRGCSQGHNEIAVAYNAGMVQQLAALRAKYPDTLLVFMDIYGFLYDMMMHPRSYGFTQSTRGCCGTGLLEVSVLCNGVTSAVCQDVGDYLFWDSYHPTEKAYKILADFVFDNYVKLILV

SEQ ID NO: 32081 - protein, 369 aa, Zea mays subsp. mays
  peptide (1)..(369): Ceres Seq. ID no. 12400908
  misc_feature (47)..(359): Pfam Name: Pfam Description:  GDSL-like Lipase/Acylhydrolase
  misc_feature (37)..(364): NCBI GI NO: 15222901 NR Description: family II extracellular lipase 3
  misc_feature (37)..(364): NCBI GI NO: 26449364 NR Description: putative family II lipase EXL3
  misc_feature (37)..(363): NCBI GI NO: 25404994 NR Description: protein T4O12.13 [imported] - Arabidopsis thaliana
  misc_feature (5)..(368): NCBI GI NO: 30102970 NR Description: putative lipase/acylhydrolase
  misc_feature (45)..(363): NCBI GI NO: 37534726 NR Description: putative anter-specific proline-rich protein
  misc_feature (37)..(362): NCBI GI NO: 18394825 NR Description: anter-specific proline-rich protein APG precursor
  misc_feature (37)..(362): NCBI GI NO: 21592372 NR Description: anter-specific proline-rich protein APG precursor
  misc_feature (38)..(367): NCBI GI NO: 18406327 NR Description: proline-rich protein, putative
  misc_feature (26)..(364): NCBI GI NO: 28393626 NR Description: putative family II extracellular lipase 1 (EXL1)
  misc_feature (27)..(364): NCBI GI NO: 8778807 NR Description: T4O12.12 [Arabidopsis thaliana]
MGMRVLLVVVLISFAPLITTNVAAGVNATRSAGRQQKQKQKPLAPALIVFGDSIVDPGNNNDIHTIIKADFPPYGTYFQNHRATGRFCNGRIPTDFIASRLGIKELLPPYLTSEPLDKHDLVTGVSFASGGTGFDPLTPQLASVISLPDQLTMFHDYLGKVRDAAGDARVSDILSRGVFAICAGSDDVANTYFTLRARSSYDHASYARLLVQHATAFVEDLIRAGARRVAFIGIPPIGCVPSQRTMSGGLDRGCSQGHNEIAVAYNAGMVQQLAALRAKYPDTLLVFMDIYGFLYDMMMHPRSYGFTQSTRGCCGTGLLEVSVLCNGVTSAVCQDVGDYLFWDSYHPTEKAYKILADFVFDNYVKLILV

SEQ ID NO: 32082 - protein, 367 aa, Zea mays subsp. mays
  peptide (1)..(367): Ceres Seq. ID no. 12400909
  misc_feature (45)..(357): Pfam Name: Pfam Description:  GDSL-like Lipase/Acylhydrolase
  misc_feature (35)..(362): NCBI GI NO: 15222901 NR Description: family II extracellular lipase 3
  misc_feature (35)..(362): NCBI GI NO: 26449364 NR Description: putative family II lipase EXL3
  misc_feature (35)..(361): NCBI GI NO: 25404994 NR Description: protein T4O12.13 [imported] - Arabidopsis thaliana
  misc_feature (3)..(366): NCBI GI NO: 30102970 NR Description: putative lipase/acylhydrolase
  misc_feature (43)..(361): NCBI GI NO: 37534726 NR Description: putative anter-specific proline-rich protein
  misc_feature (35)..(360): NCBI GI NO: 18394825 NR Description: anter-specific proline-rich protein APG precursor
  misc_feature (35)..(360): NCBI GI NO: 21592372 NR Description: anter-specific proline-rich protein APG precursor
  misc_feature (36)..(365): NCBI GI NO: 18406327 NR Description: proline-rich protein, putative
  misc_feature (24)..(362): NCBI GI NO: 28393626 NR Description: putative family II extracellular lipase 1 (EXL1)
  misc_feature (25)..(362): NCBI GI NO: 8778807 NR Description: T4O12.12 [Arabidopsis thaliana]
MRVLLVVVLISFAPLITTNVAAGVNATRSAGRQQKQKQKPLAPALIVFGDSIVDPGNNNDIHTIIKADFPPYGTYFQNHRATGRFCNGRIPTDFIASRLGIKELLPPYLTSEPLDKHDLVTGVSFASGGTGFDPLTPQLASVISLPDQLTMFHDYLGKVRDAAGDARVSDILSRGVFAICAGSDDVANTYFTLRARSSYDHASYARLLVQHATAFVEDLIRAGARRVAFIGIPPIGCVPSQRTMSGGLDRGCSQGHNEIAVAYNAGMVQQLAALRAKYPDTLLVFMDIYGFLYDMMMHPRSYGFTQSTRGCCGTGLLEVSVLCNGVTSAVCQDVGDYLFWDSYHPTEKAYKILADFVFDNYVKLILV

SEQ ID NO: 32083 - DNA, 695 bp, Zea mays subsp. mays; identical to SEQ ID NO: 31872
  misc_feature (1)..(695): Ceres Seq. ID no. 12342067

SEQ ID NO: 32084 - protein, 231 aa, Zea mays subsp. mays; identical to SEQ ID NO: 31873
  peptide (1)..(231): Ceres Seq. ID no. 12342068
  misc_feature (56)..(227): Pfam Name: Pfam Description:  Phosphorylase family
  misc_feature (111)..(230): NCBI GI NO: 34897886 NR Description: ESTs AU032452
  misc_feature (56)..(230): NCBI GI NO: 481815 NR Description: vegetative storage protein win4
  misc_feature (27)..(226): NCBI GI NO: 99650 NR Description: major storage protein - Carolina poplar
  misc_feature (56)..(226): NCBI GI NO: 4775662 NR Description: major storage protein [Populus x canadensis]
  misc_feature (40)..(229): NCBI GI NO: 7487318 NR Description: hypothetical protein T22A6
  misc_feature (27)..(226): NCBI GI NO: 421813 NR Description: storage protein, bark - cottonwood
  misc_feature (40)..(227): NCBI GI NO: 21593613 NR Description: unknown [Arabidopsis thaliana]
  misc_feature (40)..(227): NCBI GI NO: 30686500 NR Description: expressed protein [Arabidopsis thaliana]
  misc_feature (56)..(226): NCBI GI NO: 728986 NR Description: BARK STORAGE PROTEIN A PRECURSOR
  misc_feature (56)..(226): NCBI GI NO: 728987 NR Description: BARK STORAGE PROTEIN B PRECURSOR

SEQ ID NO: 32085 - protein, 218 aa, Zea mays subsp. mays; identical to SEQ ID NO: 31874
  peptide (1)..(218): Ceres Seq. ID no. 12342069
  misc_feature (43)..(214): Pfam Name: Pfam Description:  Phosphorylase family
  misc_feature (98)..(217): NCBI GI NO: 34897886 NR Description: ESTs AU032452
  misc_feature (43)..(217): NCBI GI NO: 481815 NR Description: vegetative storage protein win4
  misc_feature (14)..(213): NCBI GI NO: 99650 NR Description: major storage protein - Carolina poplar
  misc_feature (43)..(213): NCBI GI NO: 4775662 NR Description: major storage protein [Populus x canadensis]
  misc_feature (27)..(216): NCBI GI NO: 7487318 NR Description: hypothetical protein T22A6
  misc_feature (14)..(213): NCBI GI NO: 421813 NR Description: storage protein, bark - cottonwood
  misc_feature (27)..(214): NCBI GI NO: 21593613 NR Description: unknown [Arabidopsis thaliana]
  misc_feature (27)..(214): NCBI GI NO: 30686500 NR Description: expressed protein [Arabidopsis thaliana]
  misc_feature (43)..(213): NCBI GI NO: 728986 NR Description: BARK STORAGE PROTEIN A PRECURSOR
  misc_feature (43)..(213): NCBI GI NO: 728987 NR Description: BARK STORAGE PROTEIN B PRECURSOR

SEQ ID NO: 32086 - protein, 172 aa, Zea mays subsp. mays; identical to SEQ ID NO: 31875
  peptide (1)..(172): Ceres Seq. ID no. 12342070
  misc_feature (1)..(168): Pfam Name: Pfam Description:  Phosphorylase family
  misc_feature (52)..(171): NCBI GI NO: 34897886 NR Description: ESTs AU032452
  misc_feature (1)..(171): NCBI GI NO: 481815 NR Description: vegetative storage protein win4
  misc_feature (1)..(167): NCBI GI NO: 99650 NR Description: major storage protein - Carolina poplar
  misc_feature (1)..(167): NCBI GI NO: 4775662 NR Description: major storage protein [Populus x canadensis]
  misc_feature (1)..(170): NCBI GI NO: 7487318 NR Description: hypothetical protein T22A6
  misc_feature (1)..(167): NCBI GI NO: 421813 NR Description: storage protein, bark - cottonwood
  misc_feature (1)..(168): NCBI GI NO: 21593613 NR Description: unknown [Arabidopsis thaliana]
  misc_feature (1)..(168): NCBI GI NO: 30686500 NR Description: expressed protein [Arabidopsis thaliana]
  misc_feature (1)..(167): NCBI GI NO: 728986 NR Description: BARK STORAGE PROTEIN A PRECURSOR
  misc_feature (1)..(167): NCBI GI NO: 728987 NR Description: BARK STORAGE PROTEIN B PRECURSOR

SEQ ID NO: 32087 - DNA, 2266 bp, Zea mays subsp. mays
  misc_feature (1)..(2266): Ceres Seq. ID no. 13492661
gttgtgtgcgaccgacgacgcacagacgatcagagaggtctcctgccgccgtgccacggacgcgaccgacgcgtaaaagttacgctccgcctaggtcgcgcacgggcgccttgcatccgcgccccagtggcctcatttccaggaggcctggggcctgggcacggaacgtgcagcgggcctgtgctttatgccaaacacgaaagggttattaggccccgctcaatattggttttggtctaagagccaagcctggaacgcttggttgggctacgatcctttcggcccacgattgctgtgagatcatcgactgaaagcatgtgatggcggcaatgctttccgctgcttttctttaccgtcctcctagtagacactgacattttaaagactacgattctagtggttgtaataaacagcgacacgtgactgtcgactgtcgttatagccggcagtaaccgccatacagcttgtttcacttgtctcactgagtcactatcagcttctttcatccataaccaaagcaatttgttttctcaccattccttttaaaaaaaggtgaaataaacatgagtccgagtgagcactgagtcgcagaaatatcaaacctaggaccggagacgaggtgctacttcttcaaaatctgaactgtgccatcacaaaagaaagaaagaaagaaaaaagaagagaaatccacaccacagccaccgcaagatcccgggcgcccaatcacccttctccacggagattcctagcctcagccacagcccacatctgcctcatcgtctccctgaggctcccgtcgcgccacgtgttccagcatcccggacgcaccaatggcatccaagcatcagatttatttttattttctggcaacattcaagatagaacttgatcgcggcggtgtttcctccgtcgctttaaataccttcgtcgcctccacaagtccacagcatctcaagccaccatcgatcttcaagtctcgctacgtagcagtgcaataaaaaaagcagccgcaatggcgagcagcaccatggccctctcctccacggccttcgccggcaaggccgtgaacgtgccgtcgtcgtccgccttcggcgaggcccgcgtgacgatgcgcaagacggcggcgaaggccaagccagcggcggcgtccgggagcccgtggtacggccccgaccgcgtgctgtacctgggcccactgtccggcgagccgccgagctacctgacgggcgagttcccgggcgactacggctgggacaccgcggggctgtcggcggacccggagacgttcgccaagaaccgggagctggaggtgatccactcccgctgggccatgctgggcgcgctcggctgcgtcttcccggagctgctcgcccgcaacggcgtcaagttcggcgaggccgtgtggttcaaggccggctcccagatcttcagcgagggtggactggactacctcgggaacccgagcctcatccacgcgcagagcatcctcgccatctgggcctgccaggtcgtgctcatgggcgccgtcgagggctaccgcatcgccggcggcccgctcggcgaggtcgtcgacccgctctatcccggcggcagcttcgacccgctcggcctcgccgacgaccccgaggccttcgctgagctcaaggtgaaggagctcaagaacggccgcctcgccatgttctccatgttcggattcttcgtccaggccatcgtcaccgggaagggcccgctcgagaacctcgctgaccacattgccgaccccgtcaacaacaacgcttgggcctacgccaccaacttcgtccccggcaagtgagggaggcgccgccggtgacctttaggtgtccggatgcatgtgagcgcacgctggttttcggtttgtaccatgatgtaaactattgttcaatcaacaaggaataattgtgttcattgtcattatttttcccctctctttttcgttcctgccgattttatctaaatcaggtgtttgataaacggcatgattggtttcctgcttggccgtgtccagtctcaccaccagtgttgaccgtgtgcatgcacatgattggtgacctacactggctgagcgtagtctgaatgtacgagcacaacctagtcattttaccaccgcttccacatgcacgcgcagaaacgctagaaggaacgttcgctggttacccagaccggcggtaaccaatcacgcgaaaaaagagtagccgaattttacatattagagttcacacatcctagattaagcaccaagaattcg

SEQ ID NO: 32088 - protein, 266 aa, Zea mays subsp. mays
  peptide (1)..(266): Ceres Seq. ID no. 13492662
  misc_feature (65)..(233): Pfam Name: Pfam Description:  Chlorophyll A-B binding protein
  misc_feature (1)..(266): NCBI GI NO: 115786 NR Description: Chlorophyll A-B binding protein
  misc_feature (1)..(266): NCBI GI NO: 115815 NR Description: Chlorophyll A-B binding protein M9
  misc_feature (1)..(266): NCBI GI NO: 283038 NR Description: chlorophyll a/b-binding protein
  misc_feature (1)..(266): NCBI GI NO: 34910682 NR Description: chlorophyll a/b binding protein
  misc_feature (1)..(266): NCBI GI NO: 1657859 NR Description: chlorophyll a/b-binding protein WCAB precursor
  misc_feature (1)..(266): NCBI GI NO: 115825 NR Description: Chlorophyll A-B binding protein 3C
  misc_feature (1)..(266): NCBI GI NO: 3036948 NR Description: light harvesting chlorophyll a/b-binding protein
  misc_feature (1)..(266): NCBI GI NO: 170404 NR Description: chlorophyll a/b-binding protein Cab-3C
  misc_feature (1)..(266): NCBI GI NO: 115804 NR Description: Chlorophyll A-B binding protein 25
  misc_feature (1)..(266): NCBI GI NO: 320618 NR Description: chlorophyll a/b-binding protein I precursor - rice
MASSTMALSSTAFAGKAVNVPSSSAFGEARVTMRKTAAKAKPAAASGSPWYGPDRVLYLGPLSGEPPSYLTGEFPGDYGWDTAGLSADPETFAKNRELEVIHSRWAMLGALGCVFPELLARNGVKFGEAVWFKAGSQIFSEGGLDYLGNPSLIHAQSILAIWACQVVLMGAVEGYRIAGGPLGEVVDPLYPGGSFDPLGLADDPEAFAELKVKELKNGRLAMFSMFGFFVQAIVTGKGPLENLADHIADPVNNNAWAYATNFVPGK

SEQ ID NO: 32089 - protein, 261 aa, Zea mays subsp. mays
  peptide (1)..(261): Ceres Seq. ID no. 13492663
  misc_feature (60)..(228): Pfam Name: Pfam Description:  Chlorophyll A-B binding protein
  misc_feature (1)..(261): NCBI GI NO: 115786 NR Description: Chlorophyll A-B binding protein
  misc_feature (1)..(261): NCBI GI NO: 283038 NR Description: chlorophyll a/b-binding protein
  misc_feature (1)..(261): NCBI GI NO: 115815 NR Description: Chlorophyll A-B binding protein M9
  misc_feature (1)..(261): NCBI GI NO: 34910682 NR Description: chlorophyll a/b binding protein
  misc_feature (1)..(261): NCBI GI NO: 1657859 NR Description: chlorophyll a/b-binding protein WCAB precursor
  misc_feature (1)..(261): NCBI GI NO: 115825 NR Description: Chlorophyll A-B binding protein 3C
  misc_feature (1)..(261): NCBI GI NO: 3036948 NR Description: light harvesting chlorophyll a/b-binding protein
  misc_feature (1)..(261): NCBI GI NO: 170404 NR Description: chlorophyll a/b-binding protein Cab-3C
  misc_feature (1)..(261): NCBI GI NO: 115804 NR Description: Chlorophyll A-B binding protein 25
  misc_feature (1)..(261): NCBI GI NO: 320618 NR Description: chlorophyll a/b-binding protein I precursor - rice
MALSSTAFAGKAVNVPSSSAFGEARVTMRKTAAKAKPAAASGSPWYGPDRVLYLGPLSGEPPSYLTGEFPGDYGWDTAGLSADPETFAKNRELEVIHSRWAMLGALGCVFPELLARNGVKFGEAVWFKAGSQIFSEGGLDYLGNPSLIHAQSILAIWACQVVLMGAVEGYRIAGGPLGEVVDPLYPGGSFDPLGLADDPEAFAELKVKELKNGRLAMFSMFGFFVQAIVTGKGPLENLADHIADPVNNNAWAYATNFVPGK

SEQ ID NO: 32090 - protein, 234 aa, Zea mays subsp. mays
  peptide (1)..(234): Ceres Seq. ID no. 13492664
  misc_feature (33)..(201): Pfam Name: Pfam Description:  Chlorophyll A-B binding protein
  misc_feature (1)..(234): NCBI GI NO: 115786 NR Description: Chlorophyll A-B binding protein
  misc_feature (1)..(234): NCBI GI NO: 283038 NR Description: chlorophyll a/b-binding protein
  misc_feature (1)..(234): NCBI GI NO: 115815 NR Description: Chlorophyll A-B binding protein M9
  misc_feature (1)..(234): NCBI GI NO: 34910682 NR Description: chlorophyll a/b binding protein
  misc_feature (1)..(234): NCBI GI NO: 1657859 NR Description: chlorophyll a/b-binding protein WCAB precursor
  misc_feature (1)..(234): NCBI GI NO: 115825 NR Description: Chlorophyll A-B binding protein 3C
  misc_feature (1)..(234): NCBI GI NO: 3036948 NR Description: light harvesting chlorophyll a/b-binding protein
  misc_feature (1)..(234): NCBI GI NO: 170404 NR Description: chlorophyll a/b-binding protein Cab-3C
  misc_feature (1)..(234): NCBI GI NO: 115804 NR Description: Chlorophyll A-B binding protein 25
  misc_feature (1)..(234): NCBI GI NO: 320618 NR Description: chlorophyll a/b-binding protein I precursor - rice
MRKTAAKAKPAAASGSPWYGPDRVLYLGPLSGEPPSYLTGEFPGDYGWDTAGLSADPETFAKNRELEVIHSRWAMLGALGCVFPELLARNGVKFGEAVWFKAGSQIFSEGGLDYLGNPSLIHAQSILAIWACQVVLMGAVEGYRIAGGPLGEVVDPLYPGGSFDPLGLADDPEAFAELKVKELKNGRLAMFSMFGFFVQAIVTGKGPLENLADHIADPVNNNAWAYATNFVPGK

SEQ ID NO: 32091 - DNA, 1153 bp, Zea mays subsp. mays
  misc_feature (1)..(1153): Ceres Seq. ID no. 12400804
gcacgagaccattacctagaacatcctaatcaaaaaattccgtcgtcgtcgtcagcagcttctgcttgctttgtgggggaaggagagagagagagagcgagagagagatctagtagagaggctagtaggtggtcctcgaacgaagatgttggcggtgttcagcgggcaggtggtggaggtgccggcggagctggtggcggcgggcagccggacgccgtcgcccaagacgaaggcgtcgcagctcgtggggcgcttcctggccgcctccgagccggccgtgtccgtgcagctcggcgaccacggccacctcgcttactcccacaccaaccaggcgctcctccgccccaggtcgttcgcggccaaggacgaggtgttctgcctgttcgaaggggtgctggacaacctgggtcggctgagccagcagcacgggctgtcaagcaagggcgccaacgaggtgctcctcgtcatcgaggcctacaagacgctgcgcgaccgcgcgccctacccggccagcttcatgctcgcccagctcaccggctcctacgccttcgtcctcttcgacaagtccaccaactccctgctcgtcgcatccgaccccgagggcagggtgccgctcttctgggggatcaccgccgacggctgcgtcgccttctccgacgacatcgacatgctcaaaggctcatgcggcaagtcgctcgcgccgttcccgcaaggctgcttctactccaacgcgctcggagggctcaagtgctacgagaaccccaagcacaaggtcaccgctgtccccgccgacgaagaagagatctgcggtgccactttcaaggtggtggaagggtctactgtcctgacggcgctgcactgatcgatcatcagctggcggaggcgatgccatgatgatgatgcagaactttgtacatgcgttggtggatggtggtgtaacatagtggctgccaacaagtcatgctcatgcaaaccgatgaatctatctctgtatcatcgatctcggttgcttgctagtccagactccagacatggctatatatatatagctggtgctaataaataggagtataatcgtcatatcgatcggttgcgtgtggaatgccaatcatgtgtgtaatctgttggcaaataacaaacctctgttcctccc

SEQ ID NO: 32092 - protein, 297 aa, Zea mays subsp. mays
  peptide (1)..(297): Ceres Seq. ID no. 12400805
  misc_feature (75)..(290): NCBI GI NO: 7489387 NR Description: licheninase (EC 3.2.1.73) - barley
ARDHYLEHPNQKIPSSSSAASACFVGEGERERARERSSREASRWSSNEDVGGVQRAGGGGAGGAGGGGQPDAVAQDEGVAARGALPGRLRAGRVRAARRPRPPRLLPHQPGAPPPQVVRGQGRGVLPVRRGAGQPGSAEPAARAVKQGRQRGAPRHRGLQDAARPRALPGQLHARPAHRLLRLRPLRQVHQLPARRIRPRGQGAALLGDHRRRLRRLLRRHRHAQRLMRQVARAVPARLLLLQRARRAQVLREPQAQGHRCPRRRRRDLRCHFQGGGRVYCPDGAALIDHQLAEAMP

SEQ ID NO: 32093 - protein, 238 aa, Zea mays subsp. mays
  peptide (1)..(238): Ceres Seq. ID no. 12400806
  misc_feature (2)..(238): NCBI GI NO: 7489671 NR Description: hypothetical protein wali7 - wheat (fragment)
  misc_feature (1)..(234): NCBI GI NO: 15239658 NR Description: aluminium-induced protein - like
  misc_feature (1)..(236): NCBI GI NO: 7488881 NR Description: hypothetical protein ARG10 - mung bean
  misc_feature (1)..(229): NCBI GI NO: 7488440 NR Description: aluminum-induced protein - rape
  misc_feature (1)..(236): NCBI GI NO: 13958130 NR Description: aluminium induced protein [Avicennia marina]
  misc_feature (1)..(236): NCBI GI NO: 34541994 NR Description: Al-induced protein [Gossypium hirsutum]
  misc_feature (1)..(227): NCBI GI NO: 20340249 NR Description: aluminum-induced protein-like protein
  misc_feature (1)..(227): NCBI GI NO: 30017570 NR Description: unknown protein
  misc_feature (1)..(227): NCBI GI NO: 15239993 NR Description: aluminum-induced protein-like
  misc_feature (1)..(227): NCBI GI NO: 15228883 NR Description: unknown protein; protein id: At3g22850
MLAVFSGQVVEVPAELVAAGSRTPSPKTKASQLVGRFLAASEPAVSVQLGDHGHLAYSHTNQALLRPRSFAAKDEVFCLFEGVLDNLGRLSQQHGLSSKGANEVLLVIEAYKTLRDRAPYPASFMLAQLTGSYAFVLFDKSTNSLLVASDPEGRVPLFWGITADGCVAFSDDIDMLKGSCGKSLAPFPQGCFYSNALGGLKCYENPKHKVTAVPADEEEICGATFKVVEGSTVLTALH

SEQ ID NO: 32094 - DNA, 1828 bp, Zea mays subsp. mays
  misc_feature (1)..(1828): Ceres Seq. ID no. 12372212
atcgatctctcccctcctcacttcctcccctcacgggggcagccacgtacaaaggcaggcagctcgccaacgcccagcaccctctcgccgcgccaccccacgccgtgcgcctttaaagagagcgcacgacaagcttaaaggttcccacgccgccgctcgcgcttgtcttggcgccgcgacacagctggtcggtgcctttgatccgttccttccttttccagctgcagaggttacagagtcccgagccgtcgcgcgcgcgaaagcagaggagcggcaatggcggtggccgcgcggctcggcgccgtcttggcgtgcgtcatcttggcggccgtggcggtggcgccgcggccggtggcggggatcctcgacccggtcgacttcctcgcgctgcaggcggtgcggcggtcgctggacgacatgcccgggtccgcgttcttcgacgggtgggacttcaccgccgacccgtgcgggttccccggtgtgttctgcgacgcaccgggtggtggcgctcgcgctcggcgacccgcgggcggggtctccggggctgacggggaggctggacccagcgctgggccggctgtccgcgctcaccgagctctcgctcgtgcccgggcgcgtcgagggggagctcccggcgtcgctggcgtcgtgctcgaacctccgcttcctggccgtcagcaagaacctcctctccggccagatacctgacggcttcagcgcgctgtccaacctgcggacgctcgacgccagcttcaaccagatctccggcaccatcccgccgtccatcgccgcgctgccgtcgatcaccaacctcatcctctgccacaaccagcttaccggcggcgttccatcgttcctggactcgtccccgctcctgcggctggatctcaagcacaacgcgctctccggcggcgtgcctaccctgccggccgggctgcagtacctgtcgctgtccgcgaacaagctcaccggcacggtcgatcaggtgctgcccgggctgtcccggctcaacttcctcgacctcagcatgaaccagcttgagggcccgatcccggcgtcggtgctctcgctgccgctgtccgtgctgcagttgcagcgcaacttcttctcagggccggtgcagccgtcgaacgacgtgacgatcccggtggtggacctgagctacaacaggttctggggccagctctcgccactgctggcgggcgtcgggcagctgtaccttaacaacaaccggttcaccggcgaggtccccgcgcggctggtgcaggagctggtgggctccggcggcctgcaggtgctgtacctgcagcacaacttcctgacgggcatcgcgatatcgccgtcatcgtcgctcccctccaccgtctcgctctgcctgatgtacaactgcatggtgccgccggtgtacgcgccgtgcccgatcaaggccgggtcgcagaacacgcggccggcggaccagtgcccggagtggaggggctgagcctgatgtcggggtgagcttgatcgtgtctcagcaacgccagtgccaatgccggatcgcctccgatcaccggttgggaatagcgggaaagcagaactgaaggtcaatgattctttgattgatttgggtatagttacaggcaagtaagtgccttaataatccggatttacaggtgtgtgtttttgtttagttggtgtatgtgcgtttgtgtatctctgtgctgtatagtgagcagtactccctcccggagcttctatcgcactgccgcatgatgacgctgtttgcatctgatgatggatggtgttagtaagaggcagtgaagttattatttatcgaatcatgtcgctg

SEQ ID NO: 32095 - protein, 492 aa, Zea mays subsp. mays
  peptide (1)..(492): Ceres Seq. ID no. 12372213
  misc_feature (141)..(492): NCBI GI NO: 25406734 NR Description: protein F21B7.6 [imported] - Arabidopsis thaliana
  misc_feature (141)..(492): NCBI GI NO: 30678566 NR Description: leucine rich repeat protein family
  misc_feature (150)..(492): NCBI GI NO: 15236232 NR Description: leucine rich repeat protein family
  misc_feature (138)..(487): NCBI GI NO: 15229088 NR Description: leucine rich repeat protein family
  misc_feature (195)..(468): NCBI GI NO: 18390097 NR Description: putative receptor protein kinase [Sorghum bicolor]
  misc_feature (137)..(487): NCBI GI NO: 15231699 NR Description: leucine rich repeat protein family
  misc_feature (148)..(470): NCBI GI NO: 34898088 NR Description: ESTs C22657
  misc_feature (162)..(468): NCBI GI NO: 15241760 NR Description: putative protein; protein id: At5g62230.1
  misc_feature (162)..(468): NCBI GI NO: 15225286 NR Description: putative receptor-like protein kinase, ERECTA
  misc_feature (181)..(463): NCBI GI NO: 15528705 NR Description: putative receptor protein kinase
SISPLLTSSPHGGSHVQRQAARQRPAPSRRATPRRAPLKRAHDKLKGSHAAARACLGAATQLVGAFDPFLPFPAAEVTESRAVARAKAEERQWRWPRGSAPSWRASSWRPWRWRRGRWRGSSTRSTSSRCRRCGGRWTTCPGPRSSTGGTSPPTRAGSPVCSATHRVVALALGDPRAGSPGLTGRLDPALGRLSALTELSLVPGRVEGELPASLASCSNLRFLAVSKNLLSGQIPDGFSALSNLRTLDASFNQISGTIPPSIAALPSITNLILCHNQLTGGVPSFLDSSPLLRLDLKHNALSGGVPTLPAGLQYLSLSANKLTGTVDQVLPGLSRLNFLDLSMNQLEGPIPASVLSLPLSVLQLQRNFFSGPVQPSNDVTIPVVDLSYNRFWGQLSPLLAGVGQLYLNNNRFTGEVPARLVQELVGSGGLQVLYLQHNFLTGIAISPSSSLPSTVSLCLMYNCMVPPVYAPCPIKAGSQNTRPADQCPEWRG

SEQ ID NO: 32096 - DNA, 958 bp, Zea mays subsp. mays
  misc_feature (1)..(958): Ceres Seq. ID no. 12340928
aacaagcatcagagctcggtgtcacaaaacctgaccgatggcggcccggtgctccacagctgcctccgtggtcagaacaggatcgcgagacctctccccctccttttccttcacagccgcggcgctcccctcggcgcgtctgaggccggtaggagcgtgggtccgcggtggagggtacacctgcaggctccgcgccgtctgcgccatgggctccgcgccgtcgtcgtcccaatccccgtcgccgcacacgccttcaggacaaacccaagggaaagcagattataaatcactgagtgaagaggagtggaagaagcgcctgactgaagagcagtattatgttactcggcagaagggcactgaaagagcattcactggggaatactggaatactaaaaccccaggcatttatcagtgtgtctgctgcgacacccctctgtttcagtcatcaaccaaatttgatagtggtactgggtggccatcctattataaaccaattggtgaaaatgtcaagagcaagcttgatatgtcaatcatttttatgccccggaccgaggtgctctgtgcaacctgtgatgctcatctggggcatgtcttcgatgacgggccaccaccaacagggaagagatactgtatcaatagtgcatctctgaaattgaagccccaatagttgctggatactttagcaagaagtcaactataacgctggtccgccctatgtaaacttcggggttatgtatataaactactcgagttgtagcatatttattattctctttgttatgtaatatatgtgttcacaaaccgatgaaagtatgaaacaaacagccgctacttcactctggtattctggtctagaattaaggtgttgtttggttgacgaattgtaacgtaaatggcaacggtaatggtttgcactcgagtgacagttgacaacggtaataaatttaaatagatcttt

SEQ ID NO: 32097 - protein, 209 aa, Zea mays subsp. mays
  peptide (1)..(209): Ceres Seq. ID no. 12340929
  misc_feature (87)..(206): Pfam Name: Pfam Description:  SelR domain
  misc_feature (53)..(206): NCBI GI NO: 30695559 NR Description: transcriptional regulator -related
  misc_feature (62)..(206): NCBI GI NO: 21593253 NR Description: transcriptional regulator, putative
  misc_feature (86)..(209): NCBI GI NO: 22298757 NR Description: ORF_ID:tlr1214~hypothetical protein
  misc_feature (86)..(209): NCBI GI NO: 37523588 NR Description: hypothetical protein gll4019
  misc_feature (86)..(205): NCBI GI NO: 23040381 NR Description: hypothetical protein
  misc_feature (86)..(208): NCBI GI NO: 33597872 NR Description: peptide methionine sulfoxide reductase
  misc_feature (86)..(208): NCBI GI NO: 33594433 NR Description: peptide methionine sulfoxide reductase
  misc_feature (86)..(209): NCBI GI NO: 37523908 NR Description: hypothetical protein glr4339
  misc_feature (83)..(209): NCBI GI NO: 23103339 NR Description: hypothetical protein [Azotobacter vinelandii]
  misc_feature (88)..(209): NCBI GI NO: 23472103 NR Description: hypothetical protein
MAARCSTAASVVRTGSRDLSPSFSFTAAALPSARLRPVGAWVRGGGYTCRLRAVCAMGSAPSSSQSPSPHTPSGQTQGKADYKSLSEEEWKKRLTEEQYYVTRQKGTERAFTGEYWNTKTPGIYQCVCCDTPLFQSSTKFDSGTGWPSYYKPIGENVKSKLDMSIIFMPRTEVLCATCDAHLGHVFDDGPPPTGKRYCINSASLKLKPQ

SEQ ID NO: 32098 - protein, 153 aa, Zea mays subsp. mays
  peptide (1)..(153): Ceres Seq. ID no. 12340930
  misc_feature (31)..(150): Pfam Name: Pfam Description:  SelR domain
  misc_feature (1)..(150): NCBI GI NO: 30695559 NR Description: transcriptional regulator -related
  misc_feature (6)..(150): NCBI GI NO: 21593253 NR Description: transcriptional regulator, putative
  misc_feature (30)..(153): NCBI GI NO: 22298757 NR Description: ORF_ID:tlr1214~hypothetical protein
  misc_feature (30)..(153): NCBI GI NO: 37523588 NR Description: hypothetical protein gll4019
  misc_feature (30)..(149): NCBI GI NO: 23040381 NR Description: hypothetical protein
  misc_feature (30)..(152): NCBI GI NO: 33597872 NR Description: peptide methionine sulfoxide reductase
  misc_feature (30)..(152): NCBI GI NO: 33594433 NR Description: peptide methionine sulfoxide reductase
  misc_feature (30)..(153): NCBI GI NO: 37523908 NR Description: hypothetical protein glr4339
  misc_feature (27)..(153): NCBI GI NO: 23103339 NR Description: hypothetical protein [Azotobacter vinelandii]
  misc_feature (32)..(153): NCBI GI NO: 23472103 NR Description: hypothetical protein
MGSAPSSSQSPSPHTPSGQTQGKADYKSLSEEEWKKRLTEEQYYVTRQKGTERAFTGEYWNTKTPGIYQCVCCDTPLFQSSTKFDSGTGWPSYYKPIGENVKSKLDMSIIFMPRTEVLCATCDAHLGHVFDDGPPPTGKRYCINSASLKLKPQ

SEQ ID NO: 32099 - protein, 104 aa, Zea mays subsp. mays
  peptide (1)..(104): Ceres Seq. ID no. 12340931
MLLGRRALKEHSLGNTGILKPQAFISVSAATPLCFSHQPNLIVVLGGHPIINQLVKMSRASLICQSFLCPGPRCSVQPVMLIWGMSSMTGHHQQGRDTVSIVHL

SEQ ID NO: 32100 - DNA, 1199 bp, Zea mays subsp. mays
  misc_feature (1)..(1199): Ceres Seq. ID no. 12355415
  misc_feature (607)..(607): n is a, c, t, g, unknown, or other
  misc_feature (667)..(667): n is a, c, t, g, unknown, or other
  misc_feature (668)..(668): n is a, c, t, g, unknown, or other
  misc_feature (606)..(606): n is a, c, t, g, unknown, or other
  misc_feature (604)..(604): n is a, c, t, g, unknown, or other
  misc_feature (666)..(666): n is a, c, t, g, unknown, or other
aacaaaactcgtcagtagctgagtagccactgtgctcttgagaaggatgacgagccccatgcacgcgcggaaggctaagctcaagacccacttcatctccgccaaagcgaagctcaagcacaacgtcaccccgcgtcgcgtcgtcctgctggctgccgccgctacctccgccttcctcctcctattcaccctccgcaccctccactctgccgcgtcacgcagcgccagagcaagcgccgctgccaccgttgccgctgccattgcctccacgtctccagcgtccgtcgccgccgaccacgccgaccagctggagcagcaccaccatcaagagtgcgccaaggtgccgtcgtccgtcgcagaggcgctggtccactacgcgacgtccaacgagacgccgcaccagacggtggcggaggccggggccgccgcgcgcgtgctggcgcggcgtgcgccgtgtagcctcctggtgctggggctgggacccgacagcgcgctctgggcggcactcaaccacggcggccgcacgctcttcctcgaggcggacgccggccggatcgcctcggcccgcgccgcgcactcggccgggatcgacctccaggcccancnngtcgctctccaacaagaggccatgacgccgtccgacgatctcctggctctccgcaactnnnccgactgcgctgcctccccgccgaaacctctcaccgtggaccacctagagcaatctccgtgcacgctggcgccgcgcgggctaccggaaacgttctacgaggcggagtgggacgtgatcatggtgaacgccccggtgcctggagcgatctacacggccgcggtggcggctagggcgcggcgcccggggactggggaaaccgacgtgctggtccacggcgtggatgacactaccgaggagagcttcgccagggcattcttgtgtgagccgtacctgaaagaggaagctagcaggctccggcacttctccattcctagccacatggacaaggacgccatgccattttgcccattaatacgctaatgatataattgctatactgaataatcactcgtagatttaatctgaagttcatactttttttttctgttctggtgaaacagcatttgacactgtgatttctgtattttgtgatttggtgtttagattttgctcattttatcggtgtttgtgtataataattcactactgg

SEQ ID NO: 32101 - protein, 327 aa, Zea mays subsp. mays
  peptide (1)..(327): Ceres Seq. ID no. 12355416
  misc_feature (94)..(323): Pfam Name: DUF579 Pfam Description: Protein of unknown function
  misc_feature (70)..(324): NCBI GI NO: 15234881 NR Description: putative protein; protein id: At4g09990.1
  misc_feature (94)..(325): NCBI GI NO: 18398986 NR Description: expressed protein; protein id: At1g33800
  misc_feature (96)..(324): NCBI GI NO: 15217566 NR Description: unknown protein; protein id: At1g09610.1
  misc_feature (96)..(324): NCBI GI NO: 25402555 NR Description: hypothetical protein
  misc_feature (94)..(324): NCBI GI NO: 18409879 NR Description: hypothetical protein; protein id: At1g71690.1
  misc_feature (94)..(324): NCBI GI NO: 25354648 NR Description: hypothetical protein F14O23.3
  misc_feature (105)..(323): NCBI GI NO: 15220402 NR Description: unknown protein; protein id: At1g67330.1
  misc_feature (105)..(312): NCBI GI NO: 21537399 NR Description: unknown [Arabidopsis thaliana]
  misc_feature (105)..(312): NCBI GI NO: 18396558 NR Description: expressed protein; protein id: At1g27930
  misc_feature (14)..(323): NCBI GI NO: 15229700 NR Description: putative protein; protein id: At3g50220
  misc_feature (186)..(186): Xaa is any aa, unknown or other
  misc_feature (187)..(187): Xaa is any aa, unknown or other
  misc_feature (207)..(207): Xaa is any aa, unknown or other
  misc_feature (208)..(208): Xaa is any aa, unknown or other
MTSPMHARKAKLKTHFISAKAKLKHNVTPRRVVLLAAAATSAFLLLFTLRTLHSAASRSARASAAATVAAAIASTSPASVAADHADQLEQHHHQECAKVPSSVAEALVHYATSNETPHQTVAEAGAAARVLARRAPCSLLVLGLGPDSALWAALNHGGRTLFLEADAGRIASARAAHSAGIDLQAXXVALQQEAMTPSDDLLALRNXXDCAASPPKPLTVDHLEQSPCTLAPRGLPETFYEAEWDVIMVNAPVPGAIYTAAVAARARRPGTGETDVLVHGVDDTTEESFARAFLCEPYLKEEASRLRHFSIPSHMDKDAMPFCPLIR

SEQ ID NO: 32102 - protein, 323 aa, Zea mays subsp. mays
  peptide (1)..(323): Ceres Seq. ID no. 12355417
  misc_feature (90)..(319): Pfam Name: DUF579 Pfam Description: Protein of unknown function
  misc_feature (66)..(320): NCBI GI NO: 15234881 NR Description: putative protein; protein id: At4g09990.1
  misc_feature (90)..(321): NCBI GI NO: 18398986 NR Description: expressed protein; protein id: At1g33800
  misc_feature (92)..(320): NCBI GI NO: 15217566 NR Description: unknown protein; protein id: At1g09610.1
  misc_feature (92)..(320): NCBI GI NO: 25402555 NR Description: hypothetical protein
  misc_feature (90)..(320): NCBI GI NO: 18409879 NR Description: hypothetical protein; protein id: At1g71690.1
  misc_feature (90)..(320): NCBI GI NO: 25354648 NR Description: hypothetical protein F14O23.3
  misc_feature (101)..(319): NCBI GI NO: 15220402 NR Description: unknown protein; protein id: At1g67330.1
  misc_feature (101)..(308): NCBI GI NO: 21537399 NR Description: unknown [Arabidopsis thaliana]
  misc_feature (101)..(308): NCBI GI NO: 18396558 NR Description: expressed protein; protein id: At1g27930
  misc_feature (10)..(319): NCBI GI NO: 15229700 NR Description: putative protein; protein id: At3g50220
  misc_feature (182)..(182): Xaa is any aa, unknown or other
  misc_feature (183)..(183): Xaa is any aa, unknown or other
  misc_feature (203)..(203): Xaa is any aa, unknown or other
  misc_feature (204)..(204): Xaa is any aa, unknown or other
MHARKAKLKTHFISAKAKLKHNVTPRRVVLLAAAATSAFLLLFTLRTLHSAASRSARASAAATVAAAIASTSPASVAADHADQLEQHHHQECAKVPSSVAEALVHYATSNETPHQTVAEAGAAARVLARRAPCSLLVLGLGPDSALWAALNHGGRTLFLEADAGRIASARAAHSAGIDLQAXXVALQQEAMTPSDDLLALRNXXDCAASPPKPLTVDHLEQSPCTLAPRGLPETFYEAEWDVIMVNAPVPGAIYTAAVAARARRPGTGETDVLVHGVDDTTEESFARAFLCEPYLKEEASRLRHFSIPSHMDKDAMPFCPLIR

SEQ ID NO: 32103 - DNA, 1349 bp, Zea mays subsp. mays
  misc_feature (1)..(1349): Ceres Seq. ID no. 12357275
cagaccccagacctttccccttccgtccccggccggcgccaacgccactccagtgagccgagggcggagacggtcacggtgggcagagtgacacgccgcacgcctctccgccccgctccgctccagattgcgcgcacccacccatggcgctcgccgcttcccaccacggcctcctgcccttcgcccccgctgccacgcctaccccgtcacgggggcacctgcgcttccgcgccgcgcgccctctgccccgccccgcccggagaatttgttgccaatctatcaactcagctaatgtgttgggagcttcttcaacgacatctgatgaggcagtcccagtcccagttgtccagatagatcaggactcagaccgtgatgcgaccattgtgcagctaagttttggagatcgtttgggggcactacttgacacgatgaaagcactccaaggaccttggccttgatgtcacaaaaggaagtgtgacaactgactcagctgtcacacaaacaaagttccacatcatgcgatttgggcgcaaggttgaggaccctgacatgttagaaaggattcggctaaccatcatcaacaaccttctccagtaccatcctgaatcaagtgagaagttagccatgggtgaattttttgggataaaacctcctgagaagaaggtagatgttgatattgcaacacatatagttgttgaagatgacggaccaaaaagaagcatactttacatagaaaccgccgaccggcctggcctacttcttgagataatcaagatcattgcggacacaaatattgatgtggaatcagctgagattgatactgaaggtttggttgcgaaggacaagtttcatgtaagttacagaggtggaaaactaaacagctccttatctcaggcgctgaccaattgcctgcgttattacctccgaaggcctgagacagatgaagacagctattgattgttgtgtttgtcgaaccttcctatagtgcattagaatcagaaactttggcttcagttccttcgctatgggccccttgtactgctgcaaatggagttttccattgtagctgataaagtgccgacaaggtgcatccatatgtgcataggtggcactgaatcggggctcactggaccagtttgatattgtagtaatatatatacagctgggagcaacataatttaggtttcgatcatcattatcccatttgattcctgttataagggatcacattggaaaaccctcacatgattgatgttgtctgtattctgtaagttggtgcaatccatttgcatgtaaaactcagctgcgtactgtggcgttctatgtagtggaataaataaaagagcatt

SEQ ID NO: 32104 - protein, 146 aa, Zea mays subsp. mays
  peptide (1)..(146): Ceres Seq. ID no. 12357276
  misc_feature (68)..(137): Pfam Name: Pfam Description:  ACT domain
  misc_feature (1)..(146): NCBI GI NO: 15238305 NR Description: putative protein; protein id: At5g04740
  misc_feature (1)..(146): NCBI GI NO: 21592963 NR Description: unknown [Arabidopsis thaliana]
  misc_feature (1)..(146): NCBI GI NO: 18394414 NR Description: expressed protein; protein id: At1g16880
MRFGRKVEDPDMLERIRLTIINNLLQYHPESSEKLAMGEFFGIKPPEKKVDVDIATHIVVEDDGPKRSILYIETADRPGLLLEIIKIIADTNIDVESAEIDTEGLVAKDKFHVSYRGGKLNSSLSQALTNCLRYYLRRPETDEDSY

SEQ ID NO: 32105 - protein, 135 aa, Zea mays subsp. mays
  peptide (1)..(135): Ceres Seq. ID no. 12357277
  misc_feature (57)..(126): Pfam Name: Pfam Description:  ACT domain
  misc_feature (1)..(135): NCBI GI NO: 15238305 NR Description: putative protein; protein id: At5g04740
  misc_feature (1)..(135): NCBI GI NO: 21592963 NR Description: unknown [Arabidopsis thaliana]
  misc_feature (1)..(135): NCBI GI NO: 18394414 NR Description: expressed protein; protein id: At1g16880
MLERIRLTIINNLLQYHPESSEKLAMGEFFGIKPPEKKVDVDIATHIVVEDDGPKRSILYIETADRPGLLLEIIKIIADTNIDVESAEIDTEGLVAKDKFHVSYRGGKLNSSLSQALTNCLRYYLRRPETDEDSY

SEQ ID NO: 32106 - protein, 117 aa, Zea mays subsp. mays
  peptide (1)..(117): Ceres Seq. ID no. 12357278
QTPDLSPSVPGRRQRHSSEPRAETVTVGRVTRRTPLRPAPLQIARTHPWRSPLPTTASCPSPPLPRLPRHGGTCASAPRALCPAPPGEFVANLSTQLMCWELLQRHLMRQSQSQLSR

SEQ ID NO: 32107 - DNA, 1124 bp, Zea mays subsp. mays
  misc_feature (1)..(1124): Ceres Seq. ID no. 12400892
aaaaaaacaaattagatagagctcgccgagcaagcaagcaagccaactcggccgtccgaacgaaagcgaagcgcggccaaactcactcgctaaacgctcccgttctcctccgcctgcccccaccggctccccttgtacacgagcgccggagacgccatggcggcggcgcagccgaagccggccaagaggctgggcggcatggcggaggcgctcgccatcgccgccgacctcggattccccgcctctaccacgcaggaagatcagactagctccgacaaaagcgatgatttggtgaaggttttgagggaactgactgtcgtgcagaggaacattgccaacttgcaagtggagctacagggaagaaaggatgataaaaacattgctcatttgactcatgtgagtgagatggaaaagaagtgcgagtctttggccagaatgactgcaattttgaaagatgtaattcagaacaaggatcgtattattgctcggctgcaacagccttattcccttgactgcataccagttgaagctgaataccagaaacaattctcggagctacttctgaaagcagcaagtgactatggggcattgacagcatcagtcggcgatttccagtggagccaaaactttagggaatcaccagctgtctggggggaaatgctgcgaccgattcctgctgcacttgcttcctgcacccggttcttcgaggcaatgtctgcgatgagggaatccttttctactcttcagaaactacgcgttggccattcctctctgtcaataaccccaagtgactccagcgacgattcaaagttcttgacgccacctcagtggagagacggctcgatactcgatagctggaagcaaatggatgacatcaacctggagagcagtggaattgacgccatgaatcagaggaggttgtcttggccctccatcaagagggacccgtaggtcgcaggtcacccattggatttaggttcccatgttacataaataggattccaccttgtgtagttggcattgattctctgtatttttaatccgatcacctgcacccatttggcatgttcgacttgtgagagatggtctataagttccttaaatcaatgtcgtggcaaaatttg

SEQ ID NO: 32108 - protein, 264 aa, Zea mays subsp. mays
  peptide (1)..(264): Ceres Seq. ID no. 12400893
  misc_feature (1)..(263): NCBI GI NO: 40253396 NR Description: unknown protein
  misc_feature (7)..(232): NCBI GI NO: 18403146 NR Description: expressed protein; protein id: At2g32980
  misc_feature (7)..(232): NCBI GI NO: 21593334 NR Description: unknown [Arabidopsis thaliana]
  misc_feature (70)..(232): NCBI GI NO: 7452463 NR Description: hypothetical protein At2g32980
MAAAQPKPAKRLGGMAEALAIAADLGFPASTTQEDQTSSDKSDDLVKVLRELTVVQRNIANLQVELQGRKDDKNIAHLTHVSEMEKKCESLARMTAILKDVIQNKDRIIARLQQPYSLDCIPVEAEYQKQFSELLLKAASDYGALTASVGDFQWSQNFRESPAVWGEMLRPIPAALASCTRFFEAMSAMRESFSTLQKLRVGHSSLSITPSDSSDDSKFLTPPQWRDGSILDSWKQMDDINLESSGIDAMNQRRLSWPSIKRDP

SEQ ID NO: 32109 - protein, 250 aa, Zea mays subsp. mays
  peptide (1)..(250): Ceres Seq. ID no. 12400894
  misc_feature (1)..(249): NCBI GI NO: 40253396 NR Description: unknown protein
  misc_feature (1)..(218): NCBI GI NO: 18403146 NR Description: expressed protein; protein id: At2g32980
  misc_feature (1)..(218): NCBI GI NO: 21593334 NR Description: unknown [Arabidopsis thaliana]
  misc_feature (56)..(218): NCBI GI NO: 7452463 NR Description: hypothetical protein At2g32980
MAEALAIAADLGFPASTTQEDQTSSDKSDDLVKVLRELTVVQRNIANLQVELQGRKDDKNIAHLTHVSEMEKKCESLARMTAILKDVIQNKDRIIARLQQPYSLDCIPVEAEYQKQFSELLLKAASDYGALTASVGDFQWSQNFRESPAVWGEMLRPIPAALASCTRFFEAMSAMRESFSTLQKLRVGHSSLSITPSDSSDDSKFLTPPQWRDGSILDSWKQMDDINLESSGIDAMNQRRLSWPSIKRDP

SEQ ID NO: 32110 - protein, 181 aa, Zea mays subsp. mays
  peptide (1)..(181): Ceres Seq. ID no. 12400895
  misc_feature (1)..(180): NCBI GI NO: 40253396 NR Description: unknown protein
  misc_feature (1)..(149): NCBI GI NO: 18403146 NR Description: expressed protein; protein id: At2g32980
  misc_feature (1)..(149): NCBI GI NO: 21593334 NR Description: unknown [Arabidopsis thaliana]
  misc_feature (1)..(149): NCBI GI NO: 7452463 NR Description: hypothetical protein At2g32980
MEKKCESLARMTAILKDVIQNKDRIIARLQQPYSLDCIPVEAEYQKQFSELLLKAASDYGALTASVGDFQWSQNFRESPAVWGEMLRPIPAALASCTRFFEAMSAMRESFSTLQKLRVGHSSLSITPSDSSDDSKFLTPPQWRDGSILDSWKQMDDINLESSGIDAMNQRRLSWPSIKRDP

SEQ ID NO: 32111 - DNA, 1049 bp, Zea mays subsp. mays; identical to SEQ ID NO: 31969
  misc_feature (1)..(1049): Ceres Seq. ID no. 12345528

SEQ ID NO: 32112 - protein, 192 aa, Zea mays subsp. mays; identical to SEQ ID NO: 31970
  peptide (1)..(192): Ceres Seq. ID no. 12345529
  misc_feature (54)..(185): Pfam Name: Pfam Description:  Tim17/Tim22/Tim23 family
  misc_feature (1)..(192): NCBI GI NO: 37536126 NR Description: putaive mitochondrial inner membrane protein
  misc_feature (1)..(189): NCBI GI NO: 34902184 NR Description: Putative mitochondrial inner membrane protein
  misc_feature (11)..(191): NCBI GI NO: 15218593 NR Description: inner mitochondrial membrane protein
  misc_feature (11)..(191): NCBI GI NO: 18394498 NR Description: inner mitochondrial membrane protein, putative
  misc_feature (11)..(191): NCBI GI NO: 13641346 NR Description: translocase of inner mitochondrial membrane TIM23
  misc_feature (1)..(191): NCBI GI NO: 15229350 NR Description: putative inner mitochondrial membrane protein
  misc_feature (8)..(99): NCBI GI NO: 38344267 NR Description: OSJNBa0005N02.5
  misc_feature (23)..(187): NCBI GI NO: 19075496 NR Description: putative mitochondrial import inner membranetranslocase subunit
  misc_feature (127)..(189): NCBI GI NO: 12039278 NR Description: putative inner mitochondrial membrane protein
  misc_feature (90)..(188): NCBI GI NO: 34394286 NR Description: hypothetical protein

SEQ ID NO: 32113 - protein, 187 aa, Zea mays subsp. mays; identical to SEQ ID NO: 31971
  peptide (1)..(187): Ceres Seq. ID no. 12345530
  misc_feature (49)..(180): Pfam Name: Pfam Description:  Tim17/Tim22/Tim23 family
  misc_feature (1)..(187): NCBI GI NO: 37536126 NR Description: putaive mitochondrial inner membrane protein
  misc_feature (1)..(184): NCBI GI NO: 34902184 NR Description: Putative mitochondrial inner membrane protein
  misc_feature (6)..(186): NCBI GI NO: 15218593 NR Description: inner mitochondrial membrane protein
  misc_feature (6)..(186): NCBI GI NO: 18394498 NR Description: inner mitochondrial membrane protein, putative
  misc_feature (6)..(186): NCBI GI NO: 13641346 NR Description: translocase of inner mitochondrial membrane TIM23
  misc_feature (1)..(186): NCBI GI NO: 15229350 NR Description: putative inner mitochondrial membrane protein
  misc_feature (3)..(94): NCBI GI NO: 38344267 NR Description: OSJNBa0005N02.5
  misc_feature (18)..(182): NCBI GI NO: 19075496 NR Description: putative mitochondrial import inner membranetranslocase subunit
  misc_feature (122)..(184): NCBI GI NO: 12039278 NR Description: putative inner mitochondrial membrane protein
  misc_feature (85)..(183): NCBI GI NO: 34394286 NR Description: hypothetical protein

SEQ ID NO: 32114 - protein, 177 aa, Zea mays subsp. mays; identical to SEQ ID NO: 31972
  peptide (1)..(177): Ceres Seq. ID no. 12345531
  misc_feature (21)..(121): Pfam Name: Pfam Description:  Mucin-like glycoprotein
  misc_feature (3)..(177): NCBI GI NO: 27375632 NR Description: blr0521 [Bradyrhizobium japonicum]
  misc_feature (9)..(177): NCBI GI NO: 188864 NR Description: mucin
  misc_feature (9)..(177): NCBI GI NO: 186396 NR Description: mucin

SEQ ID NO: 32115 - DNA, 1023 bp, Zea mays subsp. mays
  misc_feature (1)..(1023): Ceres Seq. ID no. 12400860
aagttgcattgcatccatcgtgcctgatctccctcccaataagcacgtctgtttctccccagctccaagccggacgacgcagcgtagcagcagagagccagagaccagagatggccgccctcgccgccgcctccacggccgccttcgccgcgaagccgcgcgcgcgcctctccgtggcctgctccgccgccaccggcgacagcagcagcgtgtcgctcgcgtcctccgtgaagacgttctccgccgcgctggcgctgtcgtcggtgctgctgtcctcggccgccacctcccctccgcccgcggccgccgacatcgcggggctgaccccgtgcaaggagtccaaggcgttcgcgaagcgcgagaagaactcgatcaagaagctcaccgcgtcgctgaagaagtacgcgcccgacagcgcccccgcgctcgccatcaacgccaccatcgagaagaccaagcgccggttcgagaactacggcaagttcgggctgctgtgcggcgccgacggcctgccgcacctcatcgtcagcggcgaccagcggcactggggcgagttcgtcaccccgggcctgctcttcctctacatcgccggctggatcgggtgggtcggcaggagctacctcatcgccatcagcggcgagaagaagcccgccatgagggagatcatcatcgacgtcgagctcgccacccgcctcctccccagggggttcatctggcccgtcgccgcctaccgcgagctcatcaacggggacctcgtcgtcgacgacaaggacatcggctactactagctgcgcttgttcacctgcttgcactgtgcatatatattgctgctgccgagctgggcgcttggatagtacgtggggaaacatggatggcttttggtgtaggagctgcatgctttgctagggctatctggtcatgtaggaaatggaagctctgctgtactttaagaaacttgatgaaacctttgtataactcaactgtacctctatctatcccttgtgtgtatttgagaacgatttc

SEQ ID NO: 32116 - protein, 340 aa, Zea mays subsp. mays
  peptide (1)..(340): Ceres Seq. ID no. 12400861
  misc_feature (37)..(259): Pfam Name: Pfam Description:  HlyD family secretion protein
SCIASIVPDLPPNKHVCFSPAPSRTTQRSSREPETRDGRPRRRLHGRLRREAARAPLRGLLRRHRRQQQRVARVLREDVLRRAGAVVGAAVLGRHLPSARGRRHRGADPVQGVQGVREAREELDQEAHRVAEEVRARQRPRARHQRHHREDQAPVRELRQVRAAVRRRRPAAPHRQRRPAALGRVRHPGPALPLHRRLDRVGRQELPHRHQRREEARHEGDHHRRRARHPPPPQGVHLARRRLPRAHQRGPRRRRQGHRLLLAALVHLLALCIYIAAAELGAWIVRGETWMAFGVGAACFARAIWSCRKWKLCCTLRNLMKPLYNSTVPLSIPCVYLRTI

SEQ ID NO: 32117 - protein, 261 aa, Zea mays subsp. mays
  peptide (1)..(261): Ceres Seq. ID no. 12400862
  misc_feature (78)..(255): Pfam Name: Pfam Description:  Photosystem I reaction centre subunit III
  misc_feature (37)..(260): NCBI GI NO: 548604 NR Description: Photosystem I reaction centre subunit III
  misc_feature (37)..(260): NCBI GI NO: 34897038 NR Description: photosystem-1 F subunit precursor
  misc_feature (37)..(260): NCBI GI NO: 3885892 NR Description: photosystem-1 F subunit precursor [Oryza sativa]
  misc_feature (52)..(255): NCBI GI NO: 5734518 NR Description: photosystem I subunit III precursor
  misc_feature (52)..(255): NCBI GI NO: 15221681 NR Description: photosystem I subunit III precursor, putative
  misc_feature (52)..(255): NCBI GI NO: 15450361 NR Description: At1g31330/T19E23_1 [Arabidopsis thaliana]
  misc_feature (53)..(255): NCBI GI NO: 8954295 NR Description: photosystem I reaction center subunit III
  misc_feature (57)..(252): NCBI GI NO: 1172664 NR Description: Photosystem I reaction centre subunit III
  misc_feature (48)..(252): NCBI GI NO: 30013659 NR Description: putative photosystem I subunit III precursor
  misc_feature (44)..(252): NCBI GI NO: 131187 NR Description: Photosystem I reaction centre subunit III
VALHPSCLISLPISTSVSPQLQAGRRSVAAESQRPEMAALAAASTAAFAAKPRARLSVACSAATGDSSSVSLASSVKTFSAALALSSVLLSSAATSPPPAAADIAGLTPCKESKAFAKREKNSIKKLTASLKKYAPDSAPALAINATIEKTKRRFENYGKFGLLCGADGLPHLIVSGDQRHWGEFVTPGLLFLYIAGWIGWVGRSYLIAISGEKKPAMREIIIDVELATRLLPRGFIWPVAAYRELINGDLVVDDKDIGYY

SEQ ID NO: 32118 - protein, 225 aa, Zea mays subsp. mays
  peptide (1)..(225): Ceres Seq. ID no. 12400863
  misc_feature (42)..(219): Pfam Name: Pfam Description:  Photosystem I reaction centre subunit III
  misc_feature (1)..(224): NCBI GI NO: 548604 NR Description: Photosystem I reaction centre subunit III
  misc_feature (1)..(224): NCBI GI NO: 34897038 NR Description: photosystem-1 F subunit precursor
  misc_feature (1)..(224): NCBI GI NO: 3885892 NR Description: photosystem-1 F subunit precursor [Oryza sativa]
  misc_feature (16)..(219): NCBI GI NO: 5734518 NR Description: photosystem I subunit III precursor
  misc_feature (16)..(219): NCBI GI NO: 15221681 NR Description: photosystem I subunit III precursor, putative
  misc_feature (16)..(219): NCBI GI NO: 15450361 NR Description: At1g31330/T19E23_1 [Arabidopsis thaliana]
  misc_feature (17)..(219): NCBI GI NO: 8954295 NR Description: photosystem I reaction center subunit III
  misc_feature (21)..(216): NCBI GI NO: 1172664 NR Description: Photosystem I reaction centre subunit III
  misc_feature (12)..(216): NCBI GI NO: 30013659 NR Description: putative photosystem I subunit III precursor
  misc_feature (8)..(216): NCBI GI NO: 131187 NR Description: Photosystem I reaction centre subunit III
MAALAAASTAAFAAKPRARLSVACSAATGDSSSVSLASSVKTFSAALALSSVLLSSAATSPPPAAADIAGLTPCKESKAFAKREKNSIKKLTASLKKYAPDSAPALAINATIEKTKRRFENYGKFGLLCGADGLPHLIVSGDQRHWGEFVTPGLLFLYIAGWIGWVGRSYLIAISGEKKPAMREIIIDVELATRLLPRGFIWPVAAYRELINGDLVVDDKDIGYY

SEQ ID NO: 32119 - DNA, 776 bp, Zea mays subsp. mays
  misc_feature (1)..(776): Ceres Seq. ID no. 12345536
agtcgcctccttcctgcgccgccgccgccgccgccgccgccgctaccaccgcctcgcggccgcctgcggctccgcgtttccgcacggaagttggtgaaggtttcttgaggctgagaacatggtgctgaagacggaactttgccgcttcagcggccagaagatttatcctgggaaaggcattagatttatccgtgctgattctcaggtcttcctttttgccaactcgaaatgcaagcgctacttccacaaccgcctgaagcctgcaaagcttacctggacagcaatgtacaggaagcagcacaagaaggatatccatgctgaagcggtaaagaagaggcgccgcgccaccaagaagccatactccaggtcaattgtgggtgcttccttggaagtaatccagaagaagagagctgagaagccagaggtccgcgatgctgctagagaggctgctcttcgtgagatcaaggagcgcatcaagaagaccaaggatgagaagaaagcgaagaaggcggaggtgagcaagtcccagaagacgcagacaaagggtgcggtccagaagggttccaagggccccaagttgggcggcggtggtgggaagcgctgaaagaacttagtgtcgtttctcgacattgcagtcgttccttagccaaagccactttcgtagaacctgtgttgaatttgcaagacttattcaagcgttgcttgtgcgtgctaaataccatggcaagagaacggatttatatttatgcctgaaaaaaatgaccgttcatattctt

SEQ ID NO: 32120 - protein, 161 aa, Zea mays subsp. mays; identical to SEQ ID NO: 23397
  peptide (1)..(161): Ceres Seq. ID no. 12345537
  misc_feature (3)..(73): Pfam Name: Pfam Description:  Ribosomal protein L24e
  misc_feature (1)..(161): NCBI GI NO: 1710521 NR Description: 60S RIBOSOMAL PROTEIN L24
  misc_feature (4)..(161): NCBI GI NO: 34900364 NR Description: putative 60S ribosomal protein L24
  misc_feature (1)..(160): NCBI GI NO: 6094040 NR Description: 60S ribosomal protein L24
  misc_feature (1)..(156): NCBI GI NO: 10180025 NR Description: 60S ribosomal protein L24 [Prunus avium]
  misc_feature (1)..(161): NCBI GI NO: 18404176 NR Description: 60S ribosomal protein L24; protein id: At2g36620
  misc_feature (1)..(161): NCBI GI NO: 15231730 NR Description: 60S ribosomal protein - like; protein id:At3g53020
  misc_feature (5)..(161): NCBI GI NO: 25295112 NR Description: 60S ribosomal protein L24
  misc_feature (3)..(150): NCBI GI NO: 19075214 NR Description: 60s ribosomal protein L24
  misc_feature (3)..(150): NCBI GI NO: 19115030 NR Description: 60S ribosomal protein L24
  misc_feature (10)..(154): NCBI GI NO: 40741063 NR Description: conserved hypothetical protein

SEQ ID NO: 32121 - protein, 106 aa, Zea mays subsp. mays; identical to SEQ ID NO: 23398
  peptide (1)..(106): Ceres Seq. ID no. 12345538
  misc_feature (1)..(106): NCBI GI NO: 1710521 NR Description: 60S RIBOSOMAL PROTEIN L24
  misc_feature (1)..(106): NCBI GI NO: 34900364 NR Description: putative 60S ribosomal protein L24
  misc_feature (1)..(105): NCBI GI NO: 6094040 NR Description: 60S ribosomal protein L24
  misc_feature (1)..(101): NCBI GI NO: 10180025 NR Description: 60S ribosomal protein L24 [Prunus avium]
  misc_feature (1)..(106): NCBI GI NO: 18404176 NR Description: 60S ribosomal protein L24; protein id: At2g36620
  misc_feature (1)..(106): NCBI GI NO: 15231730 NR Description: 60S ribosomal protein - like; protein id:At3g53020
  misc_feature (1)..(106): NCBI GI NO: 25295112 NR Description: 60S ribosomal protein L24
  misc_feature (1)..(95): NCBI GI NO: 19075214 NR Description: 60s ribosomal protein L24
  misc_feature (1)..(95): NCBI GI NO: 19115030 NR Description: 60S ribosomal protein L24
  misc_feature (1)..(99): NCBI GI NO: 40741063 NR Description: conserved hypothetical protein

SEQ ID NO: 32122 - DNA, 949 bp, Zea mays subsp. mays
  misc_feature (1)..(949): Ceres Seq. ID no. 12357451
aagtcacccaccccatccaaggccctcccaaagtcccaaaggccgccgccgcccgccagcccaccatggccgcgcagtccttcctcctcgccgccactgccgccgccaggtcccccgcggtcttcgccgctccctattcctccgcacgccctttccactcggtccacttcgtcgccggcccgtggggcgccgccgccgccagggcgctcgtcgtcgcggacgccactaagaaggccgtagccgtcctcaagggcgcgtctgaggtcgagggcgtggtcacgctcacgcaggacgacgatggacctacaactgtgaatgtccgtatcactggacttacccctggacttcatggcttccacctccacgagtttggtgatactaccaatgggtgcatatcgacaggaccacattttaatccaaacaatctgacgcacggtgcaccagaagacgaagtccgtcatgcgggtgacctgggaaacattgttgcaaatgctgagggcatagccgaggcaaccattgttgatacccagattcctttgactggcccaaattcagttgttgggagagcatttgtggttcatgagcttgaagatgatttggggaaagggggccatgagctcagcctctctactggaaatgctggtggaagactggcatgtggtgttgttggcctgactccattgtaggttgctcgccgggtgcccgggttgcagttgcagctacgctgttacatccttgccttggtggacttttgtcttcaatcgtgttattgggacagtgacctttttgtattacttggattcattccatgcatgtggtatggtgcgtaatagcctttgcaggtcgactgtataaaaagcaatatttagttgaggaaataagtgttgccacatatccaaatcgatctatgaagcactatgaacatcaaatgttattttgattttgtttc

SEQ ID NO: 32123 - protein, 227 aa, Zea mays subsp. mays; identical to SEQ ID NO: 25128
  peptide (1)..(227): Ceres Seq. ID no. 12357452
  misc_feature (22)..(227): NCBI GI NO: 3915008 NR Description: Superoxide dismutase
  misc_feature (22)..(227): NCBI GI NO: 14326463 NR Description: copper/zinc superoxide dismutase precursor
  misc_feature (22)..(227): NCBI GI NO: 7433318 NR Description: superoxide dismutase (EC 1
  misc_feature (22)..(227): NCBI GI NO: 7433305 NR Description: probable superoxide dismutase (EC 1
  misc_feature (67)..(227): NCBI GI NO: 20900 NR Description: Cu/Zn superoxide dismutase II [Pisum sativum]
  misc_feature (64)..(227): NCBI GI NO: 11358868 NR Description: superoxide dismutase (EC 1
  misc_feature (64)..(227): NCBI GI NO: 18401659 NR Description: copper/zinc superoxide dismutase
  misc_feature (67)..(227): NCBI GI NO: 134683 NR Description: Superoxide dismutase
  misc_feature (64)..(227): NCBI GI NO: 5689611 NR Description: copper/zinc superoxide dismutase
  misc_feature (22)..(227): NCBI GI NO: 38073257 NR Description: superoxide dismutase [Trifolium pratense]

SEQ ID NO: 32124 - protein, 206 aa, Zea mays subsp. mays; identical to SEQ ID NO: 25129
  peptide (1)..(206): Ceres Seq. ID no. 12357453
  misc_feature (1)..(206): NCBI GI NO: 3915008 NR Description: Superoxide dismutase
  misc_feature (1)..(206): NCBI GI NO: 14326463 NR Description: copper/zinc superoxide dismutase precursor
  misc_feature (1)..(206): NCBI GI NO: 7433318 NR Description: superoxide dismutase (EC 1
  misc_feature (1)..(206): NCBI GI NO: 7433305 NR Description: probable superoxide dismutase (EC 1
  misc_feature (46)..(206): NCBI GI NO: 20900 NR Description: Cu/Zn superoxide dismutase II [Pisum sativum]
  misc_feature (43)..(206): NCBI GI NO: 11358868 NR Description: superoxide dismutase (EC 1
  misc_feature (43)..(206): NCBI GI NO: 18401659 NR Description: copper/zinc superoxide dismutase
  misc_feature (46)..(206): NCBI GI NO: 134683 NR Description: Superoxide dismutase
  misc_feature (43)..(206): NCBI GI NO: 5689611 NR Description: copper/zinc superoxide dismutase
  misc_feature (1)..(206): NCBI GI NO: 38073257 NR Description: superoxide dismutase [Trifolium pratense]

SEQ ID NO: 32125 - DNA, 1777 bp, Zea mays subsp. mays
  misc_feature (1)..(1777): Ceres Seq. ID no. 12400848
  misc_feature (550)..(550): n is a, c, t, g, unknown, or other
acgcacgaatccaacccaagaacccatcaccaccctcgcgtcacatgcgcgcataggcccccggccgcaccgcaggtcgccatcacatcaccaccatgccgcctccgctgcttgtttgtctcctcatctttctcgcccccgtgtcgcggccgtggtctgtcgccgtcgaggccgagccgcagagcccgggcgcgaagcctcgtgtgttcccgctgcgggcgcggcaggtgccggcgggggcgctgccgcggccgccgagcaagctgcgcttccaccacaacgtcagcctcaccgtctcgctcgccgtcggcaagccgccgcagaacgtcactatggtgttcgacaccggcagcgagctctcctggctgctctgcgcgacggggcgccagggcagcgccggcgctgccagcgccatgggcgagtcgttccgcccgagggactcggccacgttcgccgccgtgccctgcggctccgcgcagtgcagctcccgggacctgccggcgccgccgtcctgcgacggggcctcgcgccagtgcagcgtgtcgctgtnctacgcggacgggtccacctccgacggcgcgctcgccaccgacgttttcgccgtcggcgacgcgccgccgctgcggtccgcgttcgggtgcatgtccaccgcgtatgactcctcccccgacggtgtcgcgacggccgggctgctgggcatgaacaggggcacgctctcctttgtgacgcaggccagcacgcgccgcttctcgtactgcatctccgaccgggacgacgccggcgtgctgctcctcggccacagcgacctcccctttctgccgctcaactacacgccgctgtatcagcccaccctgccgctcccctacttcgaccgcgtggcctactctgtccagctcctcggcatccgcgtcggcggcaagcccctgccgatcccggcgtcggtgctcgcgccggaccacaccggcgcagggcagacgatggtggactccggcacgcagttcaccttcctcctcggggatgcatactccgccctgaaagccgagttcttgaaacaaacgaagcccctcctccccgcgctcggcgaccccagctttgcattccaagaagcgctcgacacctgcttccgcgtgccagcggggcgcccgccgccgtcggcgaggctcccgcccgtgaccctgctgttcaatggcgcggagatgtcggtggccggggacaggctgctgtacaaggtccccggcgagcgccggggagccgacggcgtgtggtgcctaacgttcgggaacgcggacatggtgcccctgacggcgtacgtgatcgggcaccaccaccagatgaacctgtgggtcgagtacgacctggagcgcggtcgcgtcgggatcacgcctgtcaagtgcgacgtcgccagcgagcggctcggcctgatgttgtgacgctgcctggcgaaccgtaacctctctggctcgggggtttgttcctccagactccagtggccataaccttgataaacaagttgacagaaaagtcgatttttaacctgccaaacgtttctaagtttggaacttgtttatctttttttttttcatgtgaggaaggaaaacttgcataaccttgatcgtgcgtgtggcatgtacgatgtttagcgtaaactgtaaagtaagtgtagtgcagtgttgtgcttctttattttactgaacacgtagtgatttaacatgatctaagtagtggtgtactactgtactgctgtatattgtatgtaaatattagcttgttgtatatt

SEQ ID NO: 32126 - protein, 444 aa, Zea mays subsp. mays
  peptide (1)..(444): Ceres Seq. ID no. 12400849
  misc_feature (26)..(431): Pfam Name: Pfam Description:  Eukaryotic aspartyl protease
  misc_feature (1)..(444): NCBI GI NO: 34908230 NR Description: P0406G08.30
  misc_feature (5)..(441): NCBI GI NO: 34902108 NR Description: hypothetical protein
  misc_feature (30)..(442): NCBI GI NO: 15241713 NR Description: putative protein; protein id: At5g02190.1
  misc_feature (37)..(442): NCBI GI NO: 7487691 NR Description: hypothetical protein At2g39710
  misc_feature (37)..(442): NCBI GI NO: 18405138 NR Description: expressed protein; protein id: At2g39710
  misc_feature (37)..(442): NCBI GI NO: 26451756 NR Description: unknown protein [Arabidopsis thaliana]
  misc_feature (1)..(433): NCBI GI NO: 18408451 NR Description: expressed protein; protein id: At1g66180
  misc_feature (1)..(433): NCBI GI NO: 21618176 NR Description: unknown [Arabidopsis thaliana]
  misc_feature (1)..(433): NCBI GI NO: 18421660 NR Description: putative protein; protein id: At5g37540
  misc_feature (69)..(433): NCBI GI NO: 34895664 NR Description: nucleoid DNA-binding protein cnd41-like protein
  misc_feature (152)..(152): Xaa is any aa, unknown or other
MPPPLLVCLLIFLAPVSRPWSVAVEAEPQSPGAKPRVFPLRARQVPAGALPRPPSKLRFHHNVSLTVSLAVGKPPQNVTMVFDTGSELSWLLCATGRQGSAGAASAMGESFRPRDSATFAAVPCGSAQCSSRDLPAPPSCDGASRQCSVSLXYADGSTSDGALATDVFAVGDAPPLRSAFGCMSTAYDSSPDGVATAGLLGMNRGTLSFVTQASTRRFSYCISDRDDAGVLLLGHSDLPFLPLNYTPLYQPTLPLPYFDRVAYSVQLLGIRVGGKPLPIPASVLAPDHTGAGQTMVDSGTQFTFLLGDAYSALKAEFLKQTKPLLPALGDPSFAFQEALDTCFRVPAGRPPPSARLPPVTLLFNGAEMSVAGDRLLYKVPGERRGADGVWCLTFGNADMVPLTAYVIGHHHQMNLWVEYDLERGRVGITPVKCDVASERLGLML

SEQ ID NO: 32127 - protein, 365 aa, Zea mays subsp. mays
  peptide (1)..(365): Ceres Seq. ID no. 12400850
  misc_feature (1)..(352): Pfam Name: Pfam Description:  Eukaryotic aspartyl protease
  misc_feature (1)..(365): NCBI GI NO: 34908230 NR Description: P0406G08.30
  misc_feature (1)..(362): NCBI GI NO: 34902108 NR Description: hypothetical protein
  misc_feature (1)..(363): NCBI GI NO: 15241713 NR Description: putative protein; protein id: At5g02190.1
  misc_feature (1)..(363): NCBI GI NO: 7487691 NR Description: hypothetical protein At2g39710
  misc_feature (1)..(363): NCBI GI NO: 18405138 NR Description: expressed protein; protein id: At2g39710
  misc_feature (1)..(363): NCBI GI NO: 26451756 NR Description: unknown protein [Arabidopsis thaliana]
  misc_feature (1)..(354): NCBI GI NO: 18408451 NR Description: expressed protein; protein id: At1g66180
  misc_feature (1)..(354): NCBI GI NO: 21618176 NR Description: unknown [Arabidopsis thaliana]
  misc_feature (1)..(354): NCBI GI NO: 18421660 NR Description: putative protein; protein id: At5g37540
  misc_feature (1)..(354): NCBI GI NO: 34895664 NR Description: nucleoid DNA-binding protein cnd41-like protein
  misc_feature (73)..(73): Xaa is any aa, unknown or other
MVFDTGSELSWLLCATGRQGSAGAASAMGESFRPRDSATFAAVPCGSAQCSSRDLPAPPSCDGASRQCSVSLXYADGSTSDGALATDVFAVGDAPPLRSAFGCMSTAYDSSPDGVATAGLLGMNRGTLSFVTQASTRRFSYCISDRDDAGVLLLGHSDLPFLPLNYTPLYQPTLPLPYFDRVAYSVQLLGIRVGGKPLPIPASVLAPDHTGAGQTMVDSGTQFTFLLGDAYSALKAEFLKQTKPLLPALGDPSFAFQEALDTCFRVPAGRPPPSARLPPVTLLFNGAEMSVAGDRLLYKVPGERRGADGVWCLTFGNADMVPLTAYVIGHHHQMNLWVEYDLERGRVGITPVKCDVASERLGLML

SEQ ID NO: 32128 - protein, 338 aa, Zea mays subsp. mays
  peptide (1)..(338): Ceres Seq. ID no. 12400851
  misc_feature (1)..(325): Pfam Name: Pfam Description:  Eukaryotic aspartyl protease
  misc_feature (1)..(338): NCBI GI NO: 34908230 NR Description: P0406G08.30
  misc_feature (1)..(335): NCBI GI NO: 34902108 NR Description: hypothetical protein
  misc_feature (1)..(336): NCBI GI NO: 15241713 NR Description: putative protein; protein id: At5g02190.1
  misc_feature (1)..(336): NCBI GI NO: 7487691 NR Description: hypothetical protein At2g39710
  misc_feature (1)..(336): NCBI GI NO: 18405138 NR Description: expressed protein; protein id: At2g39710
  misc_feature (1)..(336): NCBI GI NO: 26451756 NR Description: unknown protein [Arabidopsis thaliana]
  misc_feature (1)..(327): NCBI GI NO: 18408451 NR Description: expressed protein; protein id: At1g66180
  misc_feature (1)..(327): NCBI GI NO: 21618176 NR Description: unknown [Arabidopsis thaliana]
  misc_feature (1)..(327): NCBI GI NO: 18421660 NR Description: putative protein; protein id: At5g37540
  misc_feature (1)..(327): NCBI GI NO: 34895664 NR Description: nucleoid DNA-binding protein cnd41-like protein
  misc_feature (46)..(46): Xaa is any aa, unknown or other
MGESFRPRDSATFAAVPCGSAQCSSRDLPAPPSCDGASRQCSVSLXYADGSTSDGALATDVFAVGDAPPLRSAFGCMSTAYDSSPDGVATAGLLGMNRGTLSFVTQASTRRFSYCISDRDDAGVLLLGHSDLPFLPLNYTPLYQPTLPLPYFDRVAYSVQLLGIRVGGKPLPIPASVLAPDHTGAGQTMVDSGTQFTFLLGDAYSALKAEFLKQTKPLLPALGDPSFAFQEALDTCFRVPAGRPPPSARLPPVTLLFNGAEMSVAGDRLLYKVPGERRGADGVWCLTFGNADMVPLTAYVIGHHHQMNLWVEYDLERGRVGITPVKCDVASERLGLML

SEQ ID NO: 32129 - DNA, 1576 bp, Zea mays subsp. mays
  misc_feature (1)..(1576): Ceres Seq. ID no. 12400844
  misc_feature (327)..(327): n is a, c, t, g, unknown, or other
  misc_feature (359)..(359): n is a, c, t, g, unknown, or other
  misc_feature (278)..(278): n is a, c, t, g, unknown, or other
  misc_feature (284)..(284): n is a, c, t, g, unknown, or other
tcttccccgtccctgtcgccatctatcactttccccgtttgcgttttggcccgaatctccgtctccgtctccgtctccatctccatctcctagccgccgcggctccactcctcagtcctcagtccgaagcgaactctccctccgcatccactgccaccatgagccgcgatcgctacttccaccgcctcctcgacctccacctccacgccaacgacgacctcttcttccccttccctacccctgcctcgtcctgcccctacatcaccgcctcctccgcncaccancgcttcctcctcgacgaccaccccttctacccaacctcctgcncgctcggcatcacctcccgctccccgatcgangacaccttcgacctcgacctcctcctccccctccccctccacgccgccgtctccgcgcccccgtgcgcggccttcgacttcgaccccttcctcctcgacaccctcggccaccgcatctccgtcctcgagcgcgcgctcgccctcgccccaccccgccgcaagtacacctacgccgccgaggccaacggcaggaagctcaagtggaccgccgaggacaggcccgccgggggccgcaacctcaagtgggaggccgagctcaggaccccgcacaccgacggcttcgaccgcaagtggaagtgggagtccaaggagtccgccaccggttccaccaaggtcaagtgggccaaggagatcaaggggaagggctgcctcgagccttggtccaactcctactccgtcgaggagacctacggtgaggatgaccatgccgacgacgacagggagaagaagaaacccactggcgtccagaagaaagtcaagggggaaaacaagcagcagcagaagaagcagggcaatgtggagatcgtcgagatcgaggacaacactgccggatgcgtcgccatcagaaaggcttttgaaatgaaccactacaagggcaagaggaaggaactttccccacaggatgccgcactgctcatccagatgaactacagggcgcacctggcccatcgctcccaggtgctccgttgccttcgcgacctcgccgtcgccaaggccaagctcaaggagatcaggtccttcttctacaacatcacataccgccgccgcatcgcatatgacaatgaagagcgccagaggtttgctgagaagatcattgtcctgctactgacagttgatgcccttgagggaccggactacatggtccgcaacgcaaggaggtccatgctggaggagctggaggggatgctggagatcgtggagcctcagccgccggggaagccgaggacgcttagccgcaggaggttcgatctcccagaaggcggagccatcgaaaaggagacgagggaggagggcaagtgaagtgcatcggtgggtggtggcatgcttgggcagtttggtatgcgcgatgcggactatagagtttgagtttgtgctgctaccgaaccgtggaccaccttaccccgttgagatgtttgatagctggactttttgtgctgttgtatttgtagaccagaacgttgttctttgtaataaattggcgtgtgctgctttttgcc

SEQ ID NO: 32130 - protein, 458 aa, Zea mays subsp. mays
  peptide (1)..(458): Ceres Seq. ID no. 12400845
  misc_feature (326)..(346): Pfam Name: Pfam Description:  IQ calmodulin-binding motif
  misc_feature (66)..(452): NCBI GI NO: 34897716 NR Description: ESTs AU082316
  misc_feature (169)..(455): NCBI GI NO: 15241803 NR Description: KED - like protein; protein id: At5g62390
  misc_feature (92)..(92): Xaa is any aa, unknown or other
  misc_feature (94)..(94): Xaa is any aa, unknown or other
  misc_feature (109)..(109): Xaa is any aa, unknown or other
  misc_feature (119)..(119): Xaa is any aa, unknown or other
FPVPVAIYHFPRLRFGPNLRLRLRLHLHLLAAAAPLLSPQSEANSPSASTATMSRDRYFHRLLDLHLHANDDLFFPFPTPASSCPYITASSXHXRFLLDDHPFYPTSCXLGITSRSPIXDTFDLDLLLPLPLHAAVSAPPCAAFDFDPFLLDTLGHRISVLERALALAPPRRKYTYAAEANGRKLKWTAEDRPAGGRNLKWEAELRTPHTDGFDRKWKWESKESATGSTKVKWAKEIKGKGCLEPWSNSYSVEETYGEDDHADDDREKKKPTGVQKKVKGENKQQQKKQGNVEIVEIEDNTAGCVAIRKAFEMNHYKGKRKELSPQDAALLIQMNYRAHLAHRSQVLRCLRDLAVAKAKLKEIRSFFYNITYRRRIAYDNEERQRFAEKIIVLLLTVDALEGPDYMVRNARRSMLEELEGMLEIVEPQPPGKPRTLSRRRFDLPEGGAIEKETREEGK

SEQ ID NO: 32131 - protein, 406 aa, Zea mays subsp. mays
  peptide (1)..(406): Ceres Seq. ID no. 12400846
  misc_feature (274)..(294): Pfam Name: Pfam Description:  IQ calmodulin-binding motif
  misc_feature (14)..(400): NCBI GI NO: 34897716 NR Description: ESTs AU082316
  misc_feature (117)..(403): NCBI GI NO: 15241803 NR Description: KED - like protein; protein id: At5g62390
  misc_feature (40)..(40): Xaa is any aa, unknown or other
  misc_feature (42)..(42): Xaa is any aa, unknown or other
  misc_feature (57)..(57): Xaa is any aa, unknown or other
  misc_feature (67)..(67): Xaa is any aa, unknown or other
MSRDRYFHRLLDLHLHANDDLFFPFPTPASSCPYITASSXHXRFLLDDHPFYPTSCXLGITSRSPIXDTFDLDLLLPLPLHAAVSAPPCAAFDFDPFLLDTLGHRISVLERALALAPPRRKYTYAAEANGRKLKWTAEDRPAGGRNLKWEAELRTPHTDGFDRKWKWESKESATGSTKVKWAKEIKGKGCLEPWSNSYSVEETYGEDDHADDDREKKKPTGVQKKVKGENKQQQKKQGNVEIVEIEDNTAGCVAIRKAFEMNHYKGKRKELSPQDAALLIQMNYRAHLAHRSQVLRCLRDLAVAKAKLKEIRSFFYNITYRRRIAYDNEERQRFAEKIIVLLLTVDALEGPDYMVRNARRSMLEELEGMLEIVEPQPPGKPRTLSRRRFDLPEGGAIEKETREEGK

SEQ ID NO: 32132 - protein, 257 aa, Zea mays subsp. mays
  peptide (1)..(257): Ceres Seq. ID no. 12400847
  misc_feature (2)..(172): Pfam Name: Pfam Description:  Formin Homology 2 Domain
  misc_feature (17)..(195): NCBI GI NO: 25412275 NR Description: hypothetical protein At2g25050
  misc_feature (2)..(172): NCBI GI NO: 20138131 NR Description: Vegetative cell wall protein gp1 precursor
  misc_feature (17)..(195): NCBI GI NO: 30682634 NR Description: formin homology 2 (FH2) domain-containing protein
  misc_feature (93)..(93): Xaa is any aa, unknown or other
  misc_feature (95)..(95): Xaa is any aa, unknown or other
  misc_feature (109)..(109): Xaa is any aa, unknown or other
  misc_feature (120)..(120): Xaa is any aa, unknown or other
LPRPCRHLSLSPFAFWPESPSPSPSPSPSPSRRGSTPQSSVRSELSLRIHCHHEPRSLLPPPPRPPPPRQRRPLLPLPYPCLVLPLHHRLLRXPXLPPRRPPLLPNLLXARHHLPLPDRXHLRPRPPPPPPPPRRRLRAPVRGLRLRPLPPRHPRPPHLRPRARARPRPTPPQVHLRRRGQRQEAQVDRRGQARRGPQPQVGGRAQDPAHRRLRPQVEVGVQGVRHRFHQGQVGQGDQGEGLPRALVQLLLRRGDLR

SEQ ID NO: 32133 - DNA, 1080 bp, Zea mays subsp. mays
  misc_feature (1)..(1080): Ceres Seq. ID no. 12372229
gtacccgcgccgctcacgcccatccatcccttcgcgcacgcaacgcaaaaacaagcacaaacacgcgcgatccgatctgggccggccaagcagccacccatccatggcgactagggtttggctcaccgccctcctgcttggtttcctcgtcgccgcctcccccttcaccagccgagttgctagagctgaatccgaggaagatgctgctgcagctgaggttgttgaaggggctgatctaggtattgtgggtgatgatacacaggtttccagtgatggacctttaagtcctgctcctggtgtagagacagtagttgtcttcccaaaaaatgctggcaaaattgtactagcaggtgaagaaactgaattactagttggtctgcaaaatgacggtgaatcaattttgaatgttgttgctgttcattcaactctccatcttccttttgaccacaatatgtatggccagaaccttactgttcagaatttcttcaattcatcagttcctgtttctgtgcaagcaaccttcccctacaagttcgttgtgagcaagttcttgcagcctggagcatatgatctggttggttacatagtgtatgagatcgaccagcacccttaccagaatgtattctacaatggcactatcgaggttgttgaggctgtaggcttactcagtgttgagtctgtgttcctcatcacccttggatttgcacttcttggtctgtttggattgtgggcatatggccaggttcagcagctctcgaagaaaacaaagaaggcacccaaggtggagctcggaactggaacaactgatgccaacatcgatgagtggctggagggcacttcgtttgtgcagagaagcaaatccaagaagaagcagacctgagtctctccaggcttagttaaatccttttgaggatctagaatgaggcatttgagggtagcccttcacaagtgacttttgcagaaagatagatgcgtaaggaggtgctgaaaaccgtaaacatcttcattgacattttcgaccttagtgtactttacatggaacaaaattttgttaaaagaaagtatatgctgtggtttctg

SEQ ID NO: 32134 - protein, 292 aa, Zea mays subsp. mays
  peptide (1)..(292): Ceres Seq. ID no. 12372230
  misc_feature (41)..(290): NCBI GI NO: 21555380 NR Description: putative signal sequence receptor, alpha subunit
  misc_feature (41)..(290): NCBI GI NO: 18399609 NR Description: putative signal sequence receptor, alpha subunit
  misc_feature (41)..(290): NCBI GI NO: 25335776 NR Description: hypothetical protein At2g21160
  misc_feature (44)..(290): NCBI GI NO: 547391 NR Description: alpha-subunit; putative
  misc_feature (159)..(291): NCBI GI NO: 15227250 NR Description: putative TRAP protein; protein id: At2g16595.1
YPRRSRPSIPSRTQRKNKHKHARSDLGRPSSHPSMATRVWLTALLLGFLVAASPFTSRVARAESEEDAAAAEVVEGADLGIVGDDTQVSSDGPLSPAPGVETVVVFPKNAGKIVLAGEETELLVGLQNDGESILNVVAVHSTLHLPFDHNMYGQNLTVQNFFNSSVPVSVQATFPYKFVVSKFLQPGAYDLVGYIVYEIDQHPYQNVFYNGTIEVVEAVGLLSVESVFLITLGFALLGLFGLWAYGQVQQLSKKTKKAPKVELGTGTTDANIDEWLEGTSFVQRSKSKKKQT

SEQ ID NO: 32135 - protein, 258 aa, Zea mays subsp. mays
  peptide (1)..(258): Ceres Seq. ID no. 12372231
  misc_feature (7)..(256): NCBI GI NO: 21555380 NR Description: putative signal sequence receptor, alpha subunit
  misc_feature (7)..(256): NCBI GI NO: 18399609 NR Description: putative signal sequence receptor, alpha subunit
  misc_feature (7)..(256): NCBI GI NO: 25335776 NR Description: hypothetical protein At2g21160
  misc_feature (10)..(256): NCBI GI NO: 547391 NR Description: alpha-subunit; putative
  misc_feature (125)..(257): NCBI GI NO: 15227250 NR Description: putative TRAP protein; protein id: At2g16595.1
MATRVWLTALLLGFLVAASPFTSRVARAESEEDAAAAEVVEGADLGIVGDDTQVSSDGPLSPAPGVETVVVFPKNAGKIVLAGEETELLVGLQNDGESILNVVAVHSTLHLPFDHNMYGQNLTVQNFFNSSVPVSVQATFPYKFVVSKFLQPGAYDLVGYIVYEIDQHPYQNVFYNGTIEVVEAVGLLSVESVFLITLGFALLGLFGLWAYGQVQQLSKKTKKAPKVELGTGTTDANIDEWLEGTSFVQRSKSKKKQT

SEQ ID NO: 32136 - DNA, 1693 bp, Zea mays subsp. mays
  misc_feature (1)..(1693): Ceres Seq. ID no. 12566679
actactctggtcgtcctcgcgccgccgcagcagcagcagcgacgcgaccgccggtaatggcttccaccgttgtgctccggaacgccggctcccgccgactcttctgctactccactctccgcgccgccgcaatattgggacccgccgcgccacctgatgcgcccgcggcggcgtcggcccagccgccaccgatggcaggaaccctctgggcgaggtccatggccactttcacgcgcacgaagccacatgtgaacgtcggcaccattgggcacgtcgatcacggcaaaaccacactcactgccgccattaccaaggttctggcagaggcagggaaggccaaagcagttgcttttgacgagatcgacaaggccccggaagagagagccagaggaatcaccattgcaacagctcatgtcgagtatgagacggctaaaaggcattatgctcatgttgattgtccaggtcacgcagattatgtcaagaacatgatcactggagctgctcaaatggatggtggtattcttgtcgtgtcagctcctgatggcccaatgccacaaacaaaggagcacattcttcttgcccgtcaggttggtgtaccttcccttgtgtgcttcttaaacaaagttgatgctgttgatgacccagagctactggaacttgtagagatggagcttcgggagctcctcagtttctacaagttccctggtgatgagattccgatcatccgtgggtctgcgttgtctgctttgcaagggaacaacgatgagataggaaagaatgccattttgaaactaatggatgcagttgatgagtacattcctgatcctgtaaggcagcttgataaggctttcttgatgccgatagaagatgtgttttctatccagggtcgtggaactgttgttactgggcgtgttgagcagggaacaattaaaactggcgaagatgttgagatcttgggtttgacacagagtggtcccttgaagactacagttactggtgttgagatgttcaaaaagatactggaccatggagaggctggtgacaacgttggtcttcttcttcgtggtctaaagcgtggtgatgtcgagcgtggccaggtggtgtgcaaacctggtagtctgaagacatacaaaaagtttgaggcagaaatatacgtcctgacaaaggatgaaggtggccggcacactgcctttgtcacaaattacacaccccaattctacttcaggactgctgatgtcactggaaaggttgagttgcttggtgagacgaagatggttttgcccggtgacaatgtaaccgcgaatttcgagttgatatcgcctgttcctcttgaaactgggcaaagatttgcgatgagggaaggagggaggacagttggtgccggggttgtctccaaagttattagctgatgagtttccagtttcttgcccgtagcaatttagtaaagaaatgaatgctgacatgtttcttggaatgcatgggcaaaaaggcagagctggctggtctggccgccattcattctggacagtaccttgtgctttcttgttgaggtggctcatcataaagcatattttgtagccacttttccgagttgatattagtgggttcttaccaaatttaccgcgaaaattgctggtcatgttgggccgatgcgtcgttcttcgataggagatgaagtgctgttatcagtgcc

SEQ ID NO: 32137 - protein, 468 aa, Zea mays subsp. mays
  peptide (1)..(468): Ceres Seq. ID no. 12566680
  misc_feature (80)..(276): Pfam Name: Pfam Description:  Elongation factor Tu GTP binding domain
  misc_feature (19)..(468): NCBI GI NO: 11181616 NR Description: translational elongation factor EF-TuM [Zea mays]
  misc_feature (19)..(468): NCBI GI NO: 18001149 NR Description: translational elongation factor Tu [Oryza sativa]
  misc_feature (19)..(468): NCBI GI NO: 15236220 NR Description: mitochondrial elongation factor Tu
  misc_feature (67)..(468): NCBI GI NO: 1149571 NR Description: mitochondrial elongation factor Tu
  misc_feature (74)..(467): NCBI GI NO: 23054529 NR Description: hypothetical protein [Geobacter metallireducens]
  misc_feature (66)..(467): NCBI GI NO: 22966137 NR Description: hypothetical protein [Rhodospirillum rubrum]
  misc_feature (76)..(467): NCBI GI NO: 22998293 NR Description: hypothetical protein [Magnetococcus sp. MC-1]
  misc_feature (69)..(467): NCBI GI NO: 22965193 NR Description: hypothetical protein [Rhodopseudomonas palustris]
  misc_feature (74)..(466): NCBI GI NO: 15892931 NR Description: elongation factor EF-Tu [Rickettsia conorii]
  misc_feature (76)..(468): NCBI GI NO: 30526332 NR Description: translation elongation factor TU
YSGRPRAAAAAAATRPPVMASTVVLRNAGSRRLFCYSTLRAAAILGPAAPPDAPAAASAQPPPMAGTLWARSMATFTRTKPHVNVGTIGHVDHGKTTLTAAITKVLAEAGKAKAVAFDEIDKAPEERARGITIATAHVEYETAKRHYAHVDCPGHADYVKNMITGAAQMDGGILVVSAPDGPMPQTKEHILLARQVGVPSLVCFLNKVDAVDDPELLELVEMELRELLSFYKFPGDEIPIIRGSALSALQGNNDEIGKNAILKLMDAVDEYIPDPVRQLDKAFLMPIEDVFSIQGRGTVVTGRVEQGTIKTGEDVEILGLTQSGPLKTTVTGVEMFKKILDHGEAGDNVGLLLRGLKRGDVERGQVVCKPGSLKTYKKFEAEIYVLTKDEGGRHTAFVTNYTPQFYFRTADVTGKVELLGETKMVLPGDNVTANFELISPVPLETGQRFAMREGGRTVGAGVVSKVIS

SEQ ID NO: 32138 - protein, 450 aa, Zea mays subsp. mays
  peptide (1)..(450): Ceres Seq. ID no. 12566681
  misc_feature (62)..(258): Pfam Name: Pfam Description:  Elongation factor Tu GTP binding domain
  misc_feature (1)..(450): NCBI GI NO: 11181616 NR Description: translational elongation factor EF-TuM [Zea mays]
  misc_feature (1)..(450): NCBI GI NO: 18001149 NR Description: translational elongation factor Tu [Oryza sativa]
  misc_feature (1)..(450): NCBI GI NO: 15236220 NR Description: mitochondrial elongation factor Tu
  misc_feature (49)..(450): NCBI GI NO: 1149571 NR Description: mitochondrial elongation factor Tu
  misc_feature (56)..(449): NCBI GI NO: 23054529 NR Description: hypothetical protein [Geobacter metallireducens]
  misc_feature (48)..(449): NCBI GI NO: 22966137 NR Description: hypothetical protein [Rhodospirillum rubrum]
  misc_feature (58)..(449): NCBI GI NO: 22998293 NR Description: hypothetical protein [Magnetococcus sp. MC-1]
  misc_feature (51)..(449): NCBI GI NO: 22965193 NR Description: hypothetical protein [Rhodopseudomonas palustris]
  misc_feature (56)..(448): NCBI GI NO: 15892931 NR Description: elongation factor EF-Tu [Rickettsia conorii]
  misc_feature (58)..(450): NCBI GI NO: 30526332 NR Description: translation elongation factor TU
MASTVVLRNAGSRRLFCYSTLRAAAILGPAAPPDAPAAASAQPPPMAGTLWARSMATFTRTKPHVNVGTIGHVDHGKTTLTAAITKVLAEAGKAKAVAFDEIDKAPEERARGITIATAHVEYETAKRHYAHVDCPGHADYVKNMITGAAQMDGGILVVSAPDGPMPQTKEHILLARQVGVPSLVCFLNKVDAVDDPELLELVEMELRELLSFYKFPGDEIPIIRGSALSALQGNNDEIGKNAILKLMDAVDEYIPDPVRQLDKAFLMPIEDVFSIQGRGTVVTGRVEQGTIKTGEDVEILGLTQSGPLKTTVTGVEMFKKILDHGEAGDNVGLLLRGLKRGDVERGQVVCKPGSLKTYKKFEAEIYVLTKDEGGRHTAFVTNYTPQFYFRTADVTGKVELLGETKMVLPGDNVTANFELISPVPLETGQRFAMREGGRTVGAGVVSKVIS

SEQ ID NO: 32139 - protein, 405 aa, Zea mays subsp. mays
  peptide (1)..(405): Ceres Seq. ID no. 12566682
  misc_feature (17)..(213): Pfam Name: Pfam Description:  Elongation factor Tu GTP binding domain
  misc_feature (1)..(405): NCBI GI NO: 11181616 NR Description: translational elongation factor EF-TuM [Zea mays]
  misc_feature (1)..(405): NCBI GI NO: 18001149 NR Description: translational elongation factor Tu [Oryza sativa]
  misc_feature (1)..(405): NCBI GI NO: 15236220 NR Description: mitochondrial elongation factor Tu
  misc_feature (4)..(405): NCBI GI NO: 1149571 NR Description: mitochondrial elongation factor Tu
  misc_feature (11)..(404): NCBI GI NO: 23054529 NR Description: hypothetical protein [Geobacter metallireducens]
  misc_feature (3)..(404): NCBI GI NO: 22966137 NR Description: hypothetical protein [Rhodospirillum rubrum]
  misc_feature (13)..(404): NCBI GI NO: 22998293 NR Description: hypothetical protein [Magnetococcus sp. MC-1]
  misc_feature (6)..(404): NCBI GI NO: 22965193 NR Description: hypothetical protein [Rhodopseudomonas palustris]
  misc_feature (11)..(403): NCBI GI NO: 15892931 NR Description: elongation factor EF-Tu [Rickettsia conorii]
  misc_feature (13)..(405): NCBI GI NO: 30526332 NR Description: translation elongation factor TU
MAGTLWARSMATFTRTKPHVNVGTIGHVDHGKTTLTAAITKVLAEAGKAKAVAFDEIDKAPEERARGITIATAHVEYETAKRHYAHVDCPGHADYVKNMITGAAQMDGGILVVSAPDGPMPQTKEHILLARQVGVPSLVCFLNKVDAVDDPELLELVEMELRELLSFYKFPGDEIPIIRGSALSALQGNNDEIGKNAILKLMDAVDEYIPDPVRQLDKAFLMPIEDVFSIQGRGTVVTGRVEQGTIKTGEDVEILGLTQSGPLKTTVTGVEMFKKILDHGEAGDNVGLLLRGLKRGDVERGQVVCKPGSLKTYKKFEAEIYVLTKDEGGRHTAFVTNYTPQFYFRTADVTGKVELLGETKMVLPGDNVTANFELISPVPLETGQRFAMREGGRTVGAGVVSKVIS

SEQ ID NO: 32140 - DNA, 519 bp, Zea mays subsp. mays
  misc_feature (1)..(519): Ceres Seq. ID no. 1324806
atcctaatcgaaaaatcgatctattctcgtctgaagcaattcgcccctgtcgtgagcagaaccctacagctcgtattcgcctcatctcgcagcagcagcagaagaacaagggtatggcgaaggatgggggtcccgactggaacggcctgctcaagtggagcctcgcccacggsacggcaccaacccgccgcgtgctctcagcgaggaagacagaaaatggttcatggatgctatgcaagccaacacggtagatgttgtgaagaggatgaaggagatcactcaggtgatgaaaactccagaagatgtcttgcagtctcagggcgtgacccctgagaacatcgaagatatgttggatgagctacaggagcatgttgaatccattgacatggcaaatgatctacattctattggtgggctggatcctctacttggttacttgaaaaattcaaatgctggcatccgagcaaaggcagcagaagttgttagtacaattgtgcagaataatccccacgagtcagc

SEQ ID NO: 32141 - protein, 110 aa, Zea mays subsp. mays
  peptide (1)..(110): Ceres Seq. ID no. 1324807
  misc_feature (58)..(58): Xaa is any aa, unknown or other
ILIEKSIYSRLKQFAPVVSRTLQLVFASSRSSSRRTRVWRRMGVPTGTACSSGASPTXRHQPAACSQRGRQKMVHGCYASQHGRCCEEDEGDHSGDENSRRCLAVSGRDP

SEQ ID NO: 32142 - protein, 98 aa, Zea mays subsp. mays
  peptide (1)..(98): Ceres Seq. ID no. 1324808
  misc_feature (1)..(95): NCBI GI NO: 34897412 NR Description: putative Hsp70 binding protein
  misc_feature (1)..(95): NCBI GI NO: 15241689 NR Description: putative protein; protein id: At5g02150.1
  misc_feature (1)..(95): NCBI GI NO: 6478927 NR Description: hypothetical protein [Arabidopsis thaliana]
  misc_feature (1)..(95): NCBI GI NO: 15232329 NR Description: putative protein; protein id: At3g53800
  misc_feature (1)..(95): NCBI GI NO: 26449490 NR Description: unknown protein [Arabidopsis thaliana]
  misc_feature (1)..(95): NCBI GI NO: 18398480 NR Description: expressed protein; protein id: At3g09350
  misc_feature (1)..(95): NCBI GI NO: 21553998 NR Description: unknown [Arabidopsis thaliana]
  misc_feature (1)..(95): NCBI GI NO: 31221541 NR Description: ENSANGP00000019732 [Anopheles gambiae]
MDAMQANTVDVVKRMKEITQVMKTPEDVLQSQGVTPENIEDMLDELQEHVESIDMANDLHSIGGLDPLLGYLKNSNAGIRAKAAEVVSTIVQNNPHES

SEQ ID NO: 32143 - protein, 95 aa, Zea mays subsp. mays
  peptide (1)..(95): Ceres Seq. ID no. 1324809
  misc_feature (1)..(92): NCBI GI NO: 34897412 NR Description: putative Hsp70 binding protein
  misc_feature (1)..(92): NCBI GI NO: 15241689 NR Description: putative protein; protein id: At5g02150.1
  misc_feature (1)..(92): NCBI GI NO: 6478927 NR Description: hypothetical protein [Arabidopsis thaliana]
  misc_feature (1)..(92): NCBI GI NO: 15232329 NR Description: putative protein; protein id: At3g53800
  misc_feature (1)..(92): NCBI GI NO: 26449490 NR Description: unknown protein [Arabidopsis thaliana]
  misc_feature (1)..(92): NCBI GI NO: 18398480 NR Description: expressed protein; protein id: At3g09350
  misc_feature (1)..(92): NCBI GI NO: 21553998 NR Description: unknown [Arabidopsis thaliana]
  misc_feature (1)..(92): NCBI GI NO: 31221541 NR Description: ENSANGP00000019732 [Anopheles gambiae]
MQANTVDVVKRMKEITQVMKTPEDVLQSQGVTPENIEDMLDELQEHVESIDMANDLHSIGGLDPLLGYLKNSNAGIRAKAAEVVSTIVQNNPHES

SEQ ID NO: 32144 - DNA, 1534 bp, Zea mays subsp. mays
  misc_feature (1)..(1534): Ceres Seq. ID no. 12351659
actactacttcccccccccgtcctctcgatctctctccccgttcccctgacgagccaggcgtcaagtggcagggaggagaggaggcaccgcgtgtgaggctcaatggggacggggagcgcgcgggcgctggccctggcgctcgccgtgcttctggcctgctccgacgtcgccgtcgtcacggctcaggaaaccgagcggatcgaaggaagcgctggtgatgtgttagaagatgaccctgttgggaggctcaaggtctatgtctatgatctccccagcaaatacaacaagaagctgctcaagaaggatcctaggtgcctgaaccatatgtttgccgctgagatcttcatgcaccggttcctgttgtcaagcgctgtccgaacttttaatcctgaggaagcagattggttctacacacccgtatacacgacgtgtgatctgacccctaagggtcttcccttgcctttcaagtctcctcggatgatgcgtagcgcaatccagctgattgctacgaactggccttactggaatagatcagatggcgcagatcatttctttgtcacaccccatgactttggtgcttgctttcattatcaggaagagaaagccattggacggggaatccttcccttgcttcagcgtgctacgttggttcagacctttggacagaagaaccatgtctgcctgaaggatgggtccatcacgatcccgccatatgcgcctcctcagaaaatgcagactcaccttatccccccggacacccctcgatccatctttgtgtacttccgaggtctgttctatgacaccggcaatgaccccgagggcggatactacgcaagaggtgctcgtgcatcggtctgggagaacttcaagaacaacccgctgtttgacatctcgaccgatcacccaccaacatactacgaagacatgcagcgctcggtgttctgcctctgcccgttgggctgggcaccgtggagtcccaggctagtcgaagccgtggtctttggctgcatcccggtgatcatcgcagacgacatcgtcctccccttcgcggacgccatccccgtgggaggagatcggcgtcttcgttgcagaggatgatgtcccgcagctggacagcatcctgacatccatccccacagacgtcgtgctgaggaagcagcggctccttgcgaacccgtcgatgaagcaggccatgctgttcccccagcctgctcagccaggagatgcgttccaccagatcctgaacggcctagcgcgcaagctcccgcacggcagcaatgtcttcctgaagcctggtgagagggccctgaactggaccgctggaccaccaggcgacctgaaaccttggtagcgtcctgtggatctgagatggatacgacttgttctgaaaggaaatatggagaacatgattatatatatacccgtgcctttgagttaccatgggtgcatagtgctgacaagaagccaaatgtacatcgttctatgttctttttctataactgttatatacatataaatatcttcgtttcttcc

SEQ ID NO: 32145 - protein, 331 aa, Zea mays subsp. mays
  peptide (1)..(331): Ceres Seq. ID no. 12351660
  misc_feature (51)..(320): Pfam Name: Pfam Description:  Exostosin family
  misc_feature (9)..(320): NCBI GI NO: 34907048 NR Description: contains EST D24978
  misc_feature (10)..(320): NCBI GI NO: 34907046 NR Description: contains EST D39982
  misc_feature (9)..(320): NCBI GI NO: 18424516 NR Description: putative protein; protein id: At5g61840
  misc_feature (9)..(320): NCBI GI NO: 21592991 NR Description: unknown [Arabidopsis thaliana]
  misc_feature (30)..(320): NCBI GI NO: 15223522 NR Description: unknown protein; protein id: At1g27440.1
  misc_feature (9)..(320): NCBI GI NO: 37531708 NR Description: unknown protein
  misc_feature (9)..(320): NCBI GI NO: 18642697 NR Description: Unknown protein [Oryza sativa]
  misc_feature (1)..(322): NCBI GI NO: 34907044 NR Description: hypothetical protein~similar to Arabidopsisthaliana chromosome 1
  misc_feature (75)..(320): NCBI GI NO: 23821292 NR Description: pectin-glucuronyltransferase
  misc_feature (75)..(320): NCBI GI NO: 10176877 NR Description: gb|AAC80624
MGTGSARALALALAVLLACSDVAVVTAQETERIEGSAGDVLEDDPVGRLKVYVYDLPSKYNKKLLKKDPRCLNHMFAAEIFMHRFLLSSAVRTFNPEEADWFYTPVYTTCDLTPKGLPLPFKSPRMMRSAIQLIATNWPYWNRSDGADHFFVTPHDFGACFHYQEEKAIGRGILPLLQRATLVQTFGQKNHVCLKDGSITIPPYAPPQKMQTHLIPPDTPRSIFVYFRGLFYDTGNDPEGGYYARGARASVWENFKNNPLFDISTDHPPTYYEDMQRSVFCLCPLGWAPWSPRLVEAVVFGCIPVIIADDIVLPFADAIPVGGDRRLRCRG

SEQ ID NO: 32146 - protein, 257 aa, Zea mays subsp. mays
  peptide (1)..(257): Ceres Seq. ID no. 12351661
  misc_feature (1)..(246): Pfam Name: Pfam Description:  Exostosin family
  misc_feature (1)..(246): NCBI GI NO: 34907048 NR Description: contains EST D24978
  misc_feature (1)..(246): NCBI GI NO: 34907046 NR Description: contains EST D39982
  misc_feature (1)..(246): NCBI GI NO: 18424516 NR Description: putative protein; protein id: At5g61840
  misc_feature (1)..(246): NCBI GI NO: 21592991 NR Description: unknown [Arabidopsis thaliana]
  misc_feature (1)..(246): NCBI GI NO: 15223522 NR Description: unknown protein; protein id: At1g27440.1
  misc_feature (1)..(246): NCBI GI NO: 37531708 NR Description: unknown protein
  misc_feature (1)..(246): NCBI GI NO: 18642697 NR Description: Unknown protein [Oryza sativa]
  misc_feature (1)..(248): NCBI GI NO: 34907044 NR Description: hypothetical protein~similar to Arabidopsisthaliana chromosome 1
  misc_feature (1)..(246): NCBI GI NO: 23821292 NR Description: pectin-glucuronyltransferase
  misc_feature (1)..(246): NCBI GI NO: 10176877 NR Description: gb|AAC80624
MFAAEIFMHRFLLSSAVRTFNPEEADWFYTPVYTTCDLTPKGLPLPFKSPRMMRSAIQLIATNWPYWNRSDGADHFFVTPHDFGACFHYQEEKAIGRGILPLLQRATLVQTFGQKNHVCLKDGSITIPPYAPPQKMQTHLIPPDTPRSIFVYFRGLFYDTGNDPEGGYYARGARASVWENFKNNPLFDISTDHPPTYYEDMQRSVFCLCPLGWAPWSPRLVEAVVFGCIPVIIADDIVLPFADAIPVGGDRRLRCRG

SEQ ID NO: 32147 - protein, 250 aa, Zea mays subsp. mays
  peptide (1)..(250): Ceres Seq. ID no. 12351662
  misc_feature (1)..(239): Pfam Name: Pfam Description:  Exostosin family
  misc_feature (1)..(239): NCBI GI NO: 34907048 NR Description: contains EST D24978
  misc_feature (1)..(239): NCBI GI NO: 34907046 NR Description: contains EST D39982
  misc_feature (1)..(239): NCBI GI NO: 18424516 NR Description: putative protein; protein id: At5g61840
  misc_feature (1)..(239): NCBI GI NO: 21592991 NR Description: unknown [Arabidopsis thaliana]
  misc_feature (1)..(239): NCBI GI NO: 15223522 NR Description: unknown protein; protein id: At1g27440.1
  misc_feature (1)..(239): NCBI GI NO: 37531708 NR Description: unknown protein
  misc_feature (1)..(239): NCBI GI NO: 18642697 NR Description: Unknown protein [Oryza sativa]
  misc_feature (1)..(241): NCBI GI NO: 34907044 NR Description: hypothetical protein~similar to Arabidopsisthaliana chromosome 1
  misc_feature (1)..(239): NCBI GI NO: 23821292 NR Description: pectin-glucuronyltransferase
  misc_feature (1)..(239): NCBI GI NO: 10176877 NR Description: gb|AAC80624
MHRFLLSSAVRTFNPEEADWFYTPVYTTCDLTPKGLPLPFKSPRMMRSAIQLIATNWPYWNRSDGADHFFVTPHDFGACFHYQEEKAIGRGILPLLQRATLVQTFGQKNHVCLKDGSITIPPYAPPQKMQTHLIPPDTPRSIFVYFRGLFYDTGNDPEGGYYARGARASVWENFKNNPLFDISTDHPPTYYEDMQRSVFCLCPLGWAPWSPRLVEAVVFGCIPVIIADDIVLPFADAIPVGGDRRLRCRG

SEQ ID NO: 32148 - DNA, 1159 bp, Zea mays subsp. mays
  misc_feature (1)..(1159): Ceres Seq. ID no. 12400840
atccaggggtcggcatcagcctctctccctcgctctctctgactcgtcgcggcataaacaaacaaaccaaacaaagcaaagcaaaggcaaaaccccacctccaccacacctcgtcgtttgcttttcctcggtgcgggcggtgcggcacaagcccccagaccggttgcctccattactgagctgtgcgtgcgtggtggctgtctgccttgtggcggcgccggtcatggtgatggtggagatggacggtggcgtgggaggaggaggaggaggagggcagacgccggcgccacggcggtggcgcctggcggacgagcggtgtgacctgcgcgccatggagacggactacgtgcggcggtttcaccggcacgagccccgcgaacaccagtgctcctccgccgtcgccaagcacatcaaggcgcccgtccacctcgtctggtctctagtgaggcggtttgatcaaccacagcttttcaagccctttgtgagccggtgtgaaatgaagggcaacattgagattggcagtgtcagggaggttaatgtaaagtctgggctgccagccacaagaagcacggagaggctggaactgttagatgacaatgagcacatactcagcgtcagatttgttggaggtgatcacaggctgcagaactactcgtccatcctcaccgtccaccccgaggtcatcgacggcccgaccggggacgctcgtgatcgagtccttcgtggtggacgtccccgacggcaacaccaaggacgagacctgctacttcgtggaggccctgctcaagtgcaacctcaagtcgctcgcggaggtgtccgagcgacaggtcgtcaaggatcaaacggagccccttgaccggtgatgggggagatacatacatacatgtccgaacgatatgttcggatcactgcattgcattgcttacgatgtgcagagctaatcttcaacggagcccctaggttcctggagaaaagagctttgagggactgctactgctactgctatgccgcgtcgttcaaagttaagtttcctccttgcgattgtgtttgctgtccttttctccggcgttgtacgtcgcacaaggagaaggacaggcagaatatgatgtgctattgtagtattgaaaaatgaaaggaaaaaaagaactgtgaggctctg

SEQ ID NO: 32149 - protein, 284 aa, Zea mays subsp. mays
  peptide (1)..(284): Ceres Seq. ID no. 12400841
  misc_feature (128)..(224): Pfam Name: Pfam Description:  Pathogenesis-related protein Bet v I family
  misc_feature (112)..(233): NCBI GI NO: 15238661 NR Description: putative protein; protein id: At5g53160.1
  misc_feature (111)..(233): NCBI GI NO: 18378830 NR Description: expressed protein; protein id: At1g01360
  misc_feature (111)..(233): NCBI GI NO: 21593547 NR Description: unknown [Arabidopsis thaliana]
  misc_feature (111)..(233): NCBI GI NO: 25348264 NR Description: hypothetical protein F6F3
  misc_feature (116)..(233): NCBI GI NO: 18411513 NR Description: Expressed protein; protein id: At4g01026
  misc_feature (116)..(233): NCBI GI NO: 21593105 NR Description: unknown [Arabidopsis thaliana]
  misc_feature (107)..(233): NCBI GI NO: 30687786 NR Description: expressed protein [Arabidopsis thaliana]
  misc_feature (107)..(233): NCBI GI NO: 7486961 NR Description: hypothetical protein T13J8
  misc_feature (144)..(233): NCBI GI NO: 7486358 NR Description: hypothetical protein F3I3
  misc_feature (118)..(230): NCBI GI NO: 18404709 NR Description: expressed protein; protein id: At2g38310
SRGRHQPLSLALSDSSRHKQTNQTKQSKGKTPPPPHLVVCFSSVRAVRHKPPDRLPPLLSCACVVAVCLVAAPVMVMVEMDGGVGGGGGGGQTPAPRRWRLADERCDLRAMETDYVRRFHRHEPREHQCSSAVAKHIKAPVHLVWSLVRRFDQPQLFKPFVSRCEMKGNIEIGSVREVNVKSGLPATRSTERLELLDDNEHILSVRFVGGDHRLQNYSSILTVHPEVIDGPTGDARDRVLRGGRPRRQHQGRDLLLRGGPAQVQPQVARGGVRATGRQGSNGAP

SEQ ID NO: 32150 - protein, 210 aa, Zea mays subsp. mays
  peptide (1)..(210): Ceres Seq. ID no. 12400842
  misc_feature (54)..(150): Pfam Name: Pfam Description:  Pathogenesis-related protein Bet v I family
  misc_feature (38)..(159): NCBI GI NO: 15238661 NR Description: putative protein; protein id: At5g53160.1
  misc_feature (37)..(159): NCBI GI NO: 18378830 NR Description: expressed protein; protein id: At1g01360
  misc_feature (37)..(159): NCBI GI NO: 25348264 NR Description: hypothetical protein F6F3
  misc_feature (37)..(159): NCBI GI NO: 21593547 NR Description: unknown [Arabidopsis thaliana]
  misc_feature (42)..(159): NCBI GI NO: 18411513 NR Description: Expressed protein; protein id: At4g01026
  misc_feature (42)..(159): NCBI GI NO: 21593105 NR Description: unknown [Arabidopsis thaliana]
  misc_feature (33)..(159): NCBI GI NO: 30687786 NR Description: expressed protein [Arabidopsis thaliana]
  misc_feature (33)..(159): NCBI GI NO: 7486961 NR Description: hypothetical protein T13J8
  misc_feature (70)..(159): NCBI GI NO: 7486358 NR Description: hypothetical protein F3I3
  misc_feature (44)..(156): NCBI GI NO: 18404709 NR Description: expressed protein; protein id: At2g38310
MVMVEMDGGVGGGGGGGQTPAPRRWRLADERCDLRAMETDYVRRFHRHEPREHQCSSAVAKHIKAPVHLVWSLVRRFDQPQLFKPFVSRCEMKGNIEIGSVREVNVKSGLPATRSTERLELLDDNEHILSVRFVGGDHRLQNYSSILTVHPEVIDGPTGDARDRVLRGGRPRRQHQGRDLLLRGGPAQVQPQVARGGVRATGRQGSNGAP

SEQ ID NO: 32151 - protein, 208 aa, Zea mays subsp. mays
  peptide (1)..(208): Ceres Seq. ID no. 12400843
  misc_feature (52)..(148): Pfam Name: Pfam Description:  Pathogenesis-related protein Bet v I family
  misc_feature (36)..(157): NCBI GI NO: 15238661 NR Description: putative protein; protein id: At5g53160.1
  misc_feature (35)..(157): NCBI GI NO: 18378830 NR Description: expressed protein; protein id: At1g01360
  misc_feature (35)..(157): NCBI GI NO: 25348264 NR Description: hypothetical protein F6F3
  misc_feature (35)..(157): NCBI GI NO: 21593547 NR Description: unknown [Arabidopsis thaliana]
  misc_feature (40)..(157): NCBI GI NO: 18411513 NR Description: Expressed protein; protein id: At4g01026
  misc_feature (40)..(157): NCBI GI NO: 21593105 NR Description: unknown [Arabidopsis thaliana]
  misc_feature (31)..(157): NCBI GI NO: 30687786 NR Description: expressed protein [Arabidopsis thaliana]
  misc_feature (31)..(157): NCBI GI NO: 7486961 NR Description: hypothetical protein T13J8
  misc_feature (68)..(157): NCBI GI NO: 7486358 NR Description: hypothetical protein F3I3
  misc_feature (42)..(154): NCBI GI NO: 18404709 NR Description: expressed protein; protein id: At2g38310
MVEMDGGVGGGGGGGQTPAPRRWRLADERCDLRAMETDYVRRFHRHEPREHQCSSAVAKHIKAPVHLVWSLVRRFDQPQLFKPFVSRCEMKGNIEIGSVREVNVKSGLPATRSTERLELLDDNEHILSVRFVGGDHRLQNYSSILTVHPEVIDGPTGDARDRVLRGGRPRRQHQGRDLLLRGGPAQVQPQVARGGVRATGRQGSNGAP

SEQ ID NO: 32152 - DNA, 2062 bp, Zea mays subsp. mays
  misc_feature (1)..(2062): Ceres Seq. ID no. 12372221
cacgacttctacgcctccaccacgaggcacgcaacaattagaacacatctcgccgccgccgaggacgacggcgatgatgtggcgttcgcgagctcgtgcgctgctcctactccgctcgaccattacccggccaccgccaccacctccacaaccatatcccactcgaaccctaacccgagtcccacctccccgcttcctgtcctcctccccggatcccatccccgattcctcctccgccgccgccgcggatcccttccctgaagccttctcctccccgaccaaggcttctcaagatgccgctgaggccggagaggacaacctgagctcgatgtgggaggaagctggcgacgccgacgacatctttgcctcccccggcagcgccgacgccgtagccgacgatgaggaggtcgcccgcatctgcgccgccgtggagtccacccccgaggacgagatcgcctccaccctcgctgacatgaccgtggacttcaacgagccactcctagccgcagtccttcttgctgctgatcaatgctcctgtaagaagctgatttccctgttcaactatgccgcgaagaataaccccacttccaagagcctctcgaatcttgaggttctcgtgagcaagctagctgattctgctgagatagacaaggcagacgcttacttgctttgggattcgattaaggaaataggctctgtgccaggatcagtgagtacaccgttgttgaatgaaatgattgccatattttggaagcttgagaagtcgaaagcagcgttggaggtgttctccaagttcgatgagtttggttgcactccggacagtgacagctattatcttgtgattgaagcagcacgaaagaagtccttgttccgctctgcttgtgaagtctgtgagaagatgattggctctgcctgcttccccaatggtgagaaggttggcaggattttgatttacctttgtgaggggaagaaggtgaagatggcacactcattataccttgcagtgaaggaaaaaaagattccagtcccaaaactagccttggatttccttgttggtgctttggcaaggaatgatgagaccattggtactgctctggagctgctggaagagtaccaaggggagtcgcttaagcatgcaggcaagtcctttgccacagttgtacatgctttgtgtaggctaagcaaaatggaggatgcaaataatttgttgatgaggatggtgcagcttgaagagtacaaaggggaatctcttaagaatgcaggcaagacatttgccacagttatacatggtttgtgtaggaaaaagaaattggaggatgcaaaagcattgttgatgagaatggtaaatgttgggccagctcctggtaatgcagtgtttaattttgtcatcacagcattgtcaaaacagggagaaatggaggatgcaaaaggtttgatgagaatgatggagagccaagggatcagccctgatatctatacttacagtgtgctcatgagtggctacgtgaaaggaggcatgattgatgaagcccatgatctacttcgtgaagctaagaaaattcatccgaagctaaacagggttgcttatcacatacttatccgtggatactgcaagatggaggacttcgagaaggccaatgagtgcctaaaggagatgaagaaagatgggttgcagccaaatgtggatgagtatgacaaactgattcagtcattgtgtctcaaggctatggactggagaagagctgagaaactcctggaggaaatggaggatagtggtttatgcctaaggggtataagtcgcagcctcataactgcagttaaggagttggaaggggaggaaatgcagtcaaaggcgagccaagaagcatagtttctctaggatactcgaatccatatgtctgctaattaacttttggatagagcctttctttttgagcttttcagctctggtgagcttgcaagaaacatcatctttgtacctgtgtttgtttgttgttatttactacaataattttgcatttatatttaaatgctagactgacaaagaagaatatttagttct

SEQ ID NO: 32153 - protein, 622 aa, Zea mays subsp. mays
  peptide (1)..(622): Ceres Seq. ID no. 12372222
  misc_feature (527)..(561): Pfam Name: Pfam Description:  PPR repeat
  misc_feature (26)..(557): NCBI GI NO: 34907634 NR Description: P0674H09.16
  misc_feature (393)..(622): NCBI GI NO: 34907634 NR Description: P0674H09.16
  misc_feature (384)..(612): NCBI GI NO: 15232945 NR Description: hypothetical protein; protein id: At3g02650.1
  misc_feature (64)..(560): NCBI GI NO: 15232945 NR Description: hypothetical protein; protein id: At3g02650.1
  misc_feature (204)..(607): NCBI GI NO: 15234269 NR Description: putative protein; protein id: At4g11690.1
  misc_feature (213)..(592): NCBI GI NO: 37535782 NR Description: putative leaf protein
  misc_feature (252)..(593): NCBI GI NO: 32488707 NR Description: OSJNBa0088H09.8
  misc_feature (179)..(605): NCBI GI NO: 38175588 NR Description: pentatricopeptide
  misc_feature (205)..(592): NCBI GI NO: 33859440 NR Description: PPR protein [Oryza sativa (indica cultivar-group)]
  misc_feature (183)..(590): NCBI GI NO: 22329519 NR Description: hypothetical protein; protein id: At1g12700.1
TTSTPPPRGTQQLEHISPPPRTTAMMWRSRARALLLLRSTITRPPPPPPQPYPTRTLTRVPPPRFLSSSPDPIPDSSSAAAADPFPEAFSSPTKASQDAAEAGEDNLSSMWEEAGDADDIFASPGSADAVADDEEVARICAAVESTPEDEIASTLADMTVDFNEPLLAAVLLAADQCSCKKLISLFNYAAKNNPTSKSLSNLEVLVSKLADSAEIDKADAYLLWDSIKEIGSVPGSVSTPLLNEMIAIFWKLEKSKAALEVFSKFDEFGCTPDSDSYYLVIEAARKKSLFRSACEVCEKMIGSACFPNGEKVGRILIYLCEGKKVKMAHSLYLAVKEKKIPVPKLALDFLVGALARNDETIGTALELLEEYQGESLKHAGKSFATVVHALCRLSKMEDANNLLMRMVQLEEYKGESLKNAGKTFATVIHGLCRKKKLEDAKALLMRMVNVGPAPGNAVFNFVITALSKQGEMEDAKGLMRMMESQGISPDIYTYSVLMSGYVKGGMIDEAHDLLREAKKIHPKLNRVAYHILIRGYCKMEDFEKANECLKEMKKDGLQPNVDEYDKLIQSLCLKAMDWRRAEKLLEEMEDSGLCLRGISRSLITAVKELEGEEMQSKASQEA

SEQ ID NO: 32154 - protein, 598 aa, Zea mays subsp. mays
  peptide (1)..(598): Ceres Seq. ID no. 12372223
  misc_feature (503)..(537): Pfam Name: Pfam Description:  PPR repeat
  misc_feature (2)..(533): NCBI GI NO: 34907634 NR Description: P0674H09.16
  misc_feature (369)..(598): NCBI GI NO: 34907634 NR Description: P0674H09.16
  misc_feature (360)..(588): NCBI GI NO: 15232945 NR Description: hypothetical protein; protein id: At3g02650.1
  misc_feature (40)..(536): NCBI GI NO: 15232945 NR Description: hypothetical protein; protein id: At3g02650.1
  misc_feature (180)..(583): NCBI GI NO: 15234269 NR Description: putative protein; protein id: At4g11690.1
  misc_feature (189)..(568): NCBI GI NO: 37535782 NR Description: putative leaf protein
  misc_feature (228)..(569): NCBI GI NO: 32488707 NR Description: OSJNBa0088H09.8
  misc_feature (155)..(581): NCBI GI NO: 38175588 NR Description: pentatricopeptide
  misc_feature (181)..(568): NCBI GI NO: 33859440 NR Description: PPR protein [Oryza sativa (indica cultivar-group)]
  misc_feature (159)..(566): NCBI GI NO: 22329519 NR Description: hypothetical protein; protein id: At1g12700.1
MMWRSRARALLLLRSTITRPPPPPPQPYPTRTLTRVPPPRFLSSSPDPIPDSSSAAAADPFPEAFSSPTKASQDAAEAGEDNLSSMWEEAGDADDIFASPGSADAVADDEEVARICAAVESTPEDEIASTLADMTVDFNEPLLAAVLLAADQCSCKKLISLFNYAAKNNPTSKSLSNLEVLVSKLADSAEIDKADAYLLWDSIKEIGSVPGSVSTPLLNEMIAIFWKLEKSKAALEVFSKFDEFGCTPDSDSYYLVIEAARKKSLFRSACEVCEKMIGSACFPNGEKVGRILIYLCEGKKVKMAHSLYLAVKEKKIPVPKLALDFLVGALARNDETIGTALELLEEYQGESLKHAGKSFATVVHALCRLSKMEDANNLLMRMVQLEEYKGESLKNAGKTFATVIHGLCRKKKLEDAKALLMRMVNVGPAPGNAVFNFVITALSKQGEMEDAKGLMRMMESQGISPDIYTYSVLMSGYVKGGMIDEAHDLLREAKKIHPKLNRVAYHILIRGYCKMEDFEKANECLKEMKKDGLQPNVDEYDKLIQSLCLKAMDWRRAEKLLEEMEDSGLCLRGISRSLITAVKELEGEEMQSKASQEA

SEQ ID NO: 32155 - protein, 597 aa, Zea mays subsp. mays
  peptide (1)..(597): Ceres Seq. ID no. 12372224
  misc_feature (502)..(536): Pfam Name: Pfam Description:  PPR repeat
  misc_feature (1)..(532): NCBI GI NO: 34907634 NR Description: P0674H09.16
  misc_feature (368)..(597): NCBI GI NO: 34907634 NR Description: P0674H09.16
  misc_feature (359)..(587): NCBI GI NO: 15232945 NR Description: hypothetical protein; protein id: At3g02650.1
  misc_feature (39)..(535): NCBI GI NO: 15232945 NR Description: hypothetical protein; protein id: At3g02650.1
  misc_feature (179)..(582): NCBI GI NO: 15234269 NR Description: putative protein; protein id: At4g11690.1
  misc_feature (188)..(567): NCBI GI NO: 37535782 NR Description: putative leaf protein
  misc_feature (227)..(568): NCBI GI NO: 32488707 NR Description: OSJNBa0088H09.8
  misc_feature (154)..(580): NCBI GI NO: 38175588 NR Description: pentatricopeptide
  misc_feature (180)..(567): NCBI GI NO: 33859440 NR Description: PPR protein [Oryza sativa (indica cultivar-group)]
  misc_feature (158)..(565): NCBI GI NO: 22329519 NR Description: hypothetical protein; protein id: At1g12700.1
MWRSRARALLLLRSTITRPPPPPPQPYPTRTLTRVPPPRFLSSSPDPIPDSSSAAAADPFPEAFSSPTKASQDAAEAGEDNLSSMWEEAGDADDIFASPGSADAVADDEEVARICAAVESTPEDEIASTLADMTVDFNEPLLAAVLLAADQCSCKKLISLFNYAAKNNPTSKSLSNLEVLVSKLADSAEIDKADAYLLWDSIKEIGSVPGSVSTPLLNEMIAIFWKLEKSKAALEVFSKFDEFGCTPDSDSYYLVIEAARKKSLFRSACEVCEKMIGSACFPNGEKVGRILIYLCEGKKVKMAHSLYLAVKEKKIPVPKLALDFLVGALARNDETIGTALELLEEYQGESLKHAGKSFATVVHALCRLSKMEDANNLLMRMVQLEEYKGESLKNAGKTFATVIHGLCRKKKLEDAKALLMRMVNVGPAPGNAVFNFVITALSKQGEMEDAKGLMRMMESQGISPDIYTYSVLMSGYVKGGMIDEAHDLLREAKKIHPKLNRVAYHILIRGYCKMEDFEKANECLKEMKKDGLQPNVDEYDKLIQSLCLKAMDWRRAEKLLEEMEDSGLCLRGISRSLITAVKELEGEEMQSKASQEA

SEQ ID NO: 32156 - DNA, 1993 bp, Zea mays subsp. mays
  misc_feature (1)..(1993): Ceres Seq. ID no. 12367252
aggaaccatctagatacagcggcggtacgtggactggactggagcgagcaagcctgcgccggcgccgccgtcctcccgaaacagaagctgtagttggtcaagaactggggatactgagttgaatatgatctcaaatccggtggactggtatagtttcggacccggatagaattggtagggatgcaagattggagggtgcgtgagttcgaaggtaaattcactgatgagtttgcccacagcagtagcaacgaacataaaggtggagttgaggcttctggtgtcattagtagtaagaagttgaagcatgcagttgctaatgagaaaatccaaggtgtcatccccggtacaaatagctcaggttcactgaaacgtaattcagagaacatccaacatgcgaacggggtattatcccagaatataagctgcgctggtgactacaaaaatggctccattgcctttcctttgagagaagaaaatacaataactgagaccagatgtccagatgataactggaactcctgtcagtttgcactgaacaatggttcgtccattctcaataaccacagtgctccccaggatagcctcacttatggagataatgatctaaactacatcgaatggcctggcattgacaattttgaggatgtcgatacattattcaggagttttgattcaacatatggtcagcagcagctggagaatgcagatgggttatcttggattccgtcttcagatgctgtttactctaccgatgttgctttgcaacaagggcttgattcgtcttattcagattatggtattctggatgatctctccgcattccaatgtgcagaagataaatcactacccttggttgatccttcatcagctttatgtgataatcaattcaatgatacctacctgttcagtgaacaaaagaatgtgaatgcatatggtgaacagatataccaagaggatttgatggagttgttgcccactgaccagatatgcagcggacatgaaaacattgatatggttggaaaccagtatccatctgaaaatgcaattcaaggtaccgaagataagaaattctctatagcgtcaacttcccagctgagttctcagaatttactgaatcaaagacaccacttagattccagttcaccaagcaatattacttcggagtcctatccaggaaagttcggtccatctagctgttcttctgcacaaagaaactcaaaagtgcagaagaaaactgtcaacatacaaccaagacagccagcaaatgataatgttatgaacacaagcagagcttcttacccttgtgagaactatgaaactgaaagaagaggattagggaaaagaactctgggggatcctcaagttacaatgggtagttcaatggtagtggatggctcatttgtatcatctatgtcctctgataactcagtcgaagaaagcagctttcaacaactgcaggatgctgttagtcagctggatgtgcaaaccaaattgtgcatcagggatggtttataccgattggcacgaagtgcgcaacatagacaagtttttccaaatacgatgaacagcaatggtggtagcgaggacggaaaggaactggagaacgcagaaacttcgtgcaagttcatggaccctcggagcatcgagacgcagacaaacccgatcgatcggtctatagctctgctacttttccgcgagtcatctggcggccatgtccatgtggctgtagcagccgacgatgcctcgtcactgaaatcccctgctggtgtatgatttcctgcctgccacatctcagttccagggccctgctgctaacccaggatgtttctaggcatgtatgtaaaaaaaaaaacaagcgtattgtgtagccaatagtctgtactctgtagtcacattaattttgtcatgcttgtatcctattgctagacggccgatgtgctaacctagtgctgttgactcaaattttatgcgtaatctaaaaaaaattatttct

SEQ ID NO: 32157 - protein, 530 aa, Zea mays subsp. mays
  peptide (1)..(530): Ceres Seq. ID no. 12367253
  misc_feature (271)..(508): NCBI GI NO: 15237638 NR Description: putative protein; protein id: At5g64170
  misc_feature (257)..(504): NCBI GI NO: 15232525 NR Description: putative protein; protein id: At3g54500.1
MQDWRVREFEGKFTDEFAHSSSNEHKGGVEASGVISSKKLKHAVANEKIQGVIPGTNSSGSLKRNSENIQHANGVLSQNISCAGDYKNGSIAFPLREENTITETRCPDDNWNSCQFALNNGSSILNNHSAPQDSLTYGDNDLNYIEWPGIDNFEDVDTLFRSFDSTYGQQQLENADGLSWIPSSDAVYSTDVALQQGLDSSYSDYGILDDLSAFQCAEDKSLPLVDPSSALCDNQFNDTYLFSEQKNVNAYGEQIYQEDLMELLPTDQICSGHENIDMVGNQYPSENAIQGTEDKKFSIASTSQLSSQNLLNQRHHLDSSSPSNITSESYPGKFGPSSCSSAQRNSKVQKKTVNIQPRQPANDNVMNTSRASYPCENYETERRGLGKRTLGDPQVTMGSSMVVDGSFVSSMSSDNSVEESSFQQLQDAVSQLDVQTKLCIRDGLYRLARSAQHRQVFPNTMNSNGGSEDGKELENAETSCKFMDPRSIETQTNPIDRSIALLLFRESSGGHVHVAVAADDASSLKSPAGV

SEQ ID NO: 32158 - protein, 270 aa, Zea mays subsp. mays
  peptide (1)..(270): Ceres Seq. ID no. 12367254
  misc_feature (11)..(248): NCBI GI NO: 15237638 NR Description: putative protein; protein id: At5g64170
  misc_feature (1)..(244): NCBI GI NO: 15232525 NR Description: putative protein; protein id: At3g54500.1
MELLPTDQICSGHENIDMVGNQYPSENAIQGTEDKKFSIASTSQLSSQNLLNQRHHLDSSSPSNITSESYPGKFGPSSCSSAQRNSKVQKKTVNIQPRQPANDNVMNTSRASYPCENYETERRGLGKRTLGDPQVTMGSSMVVDGSFVSSMSSDNSVEESSFQQLQDAVSQLDVQTKLCIRDGLYRLARSAQHRQVFPNTMNSNGGSEDGKELENAETSCKFMDPRSIETQTNPIDRSIALLLFRESSGGHVHVAVAADDASSLKSPAGV

SEQ ID NO: 32159 - DNA, 1199 bp, Zea mays subsp. mays
  misc_feature (1)..(1199): Ceres Seq. ID no. 12400837
gataaggagacggtactagtaaactgactaactgctgcccactcgccggagaaccatggccacggcggcggcgtgtgtgcgggtggcgtctccgttcacgggcccacctatctggcatcccagacacgtcatctcaacgaggcggggacccaggagggccgggctggccgtcacggcggcggctgccgccggtggatcgccgcgcactgtgctcgtcaccggcgcgggcggccgaacaggccaaattgtgtacaagaagttgaaggagagggaaggacagtttgtgggacgtggcctagtcaggacgggagagagcaaaggcaaaattggaggcggtgacgacgtgtttgtcggcgacatcagagaccccgagagcattgctcctgcgatcgagggcattgacgcgctcatcatcctcaccagcgcggtcccaaagatgaaaccggggtttgatcctagcaaaggggggcgccctgagttttactttgaagaagggagttatcctgagcaggtggattggattggccaaaagaatcaaattgatgctgctaagagcatcggtgcaaagcacatagttttggtgggatccatgggaggaacagacatcaatcacccgctaaacaagttaggaaatgcaaatatactggtgtggaagcgcaaggcagaacagtacctagcagactccggtcttccatatacaattataagagctggcggtttacaagataaagatggtggcttgcgagagttgattgttgggaaggatgatgagatcctgaaaacagaaacaagaactatagccagggccgatgttgcagaagtttgcatacaggcattgctattcgaagagtcaaagtttaaggcatttgatctggcatcaaaaccagaaggtgaagggacgccaactacagactttagggcactttttgcacaagttaatagtcgcttctaaagacataagattgttcttgccaagaagttgagggcattctttcgtaaagcgatatgaaatgtgtgtttagtaaggttagtttcctgtttactaagttcctaatatattacagttgttccatgtagcatccttttttatctcttgctctctagctacttttggctttatttcctgtctagacagcggattctgcataatgctaatgaactttcatatcaaataagattgctcagttatccataatgtt

SEQ ID NO: 32160 - protein, 298 aa, Zea mays subsp. mays
  peptide (1)..(298): Ceres Seq. ID no. 12400838
  misc_feature (52)..(126): Pfam Name: Pfam Description:  Isoflavone reductase
  misc_feature (1)..(298): NCBI GI NO: 14719331 NR Description: putative 3-beta hydroxysteroiddehydrogenase/isomerase protein
  misc_feature (37)..(298): NCBI GI NO: 18404496 NR Description: expressed protein; protein id: At2g37660
  misc_feature (37)..(298): NCBI GI NO: 7485430 NR Description: hypothetical protein At2g37660
  misc_feature (42)..(298): NCBI GI NO: 34897418 NR Description: unknown protein
  misc_feature (51)..(298): NCBI GI NO: 18413869 NR Description: putative protein; protein id: At5g02240
  misc_feature (51)..(293): NCBI GI NO: 11358410 NR Description: hypothetical protein T7H20
  misc_feature (38)..(297): NCBI GI NO: 30689062 NR Description: expressed protein [Arabidopsis thaliana]
  misc_feature (151)..(296): NCBI GI NO: 37523053 NR Description: hypothetical protein gll3484
  misc_feature (46)..(294): NCBI GI NO: 17230395 NR Description: hypothetical protein [Nostoc sp. PCC 7120]
  misc_feature (150)..(294): NCBI GI NO: 16330694 NR Description: hypothetical protein [Synechocystis sp. PCC 6803]
MATAAACVRVASPFTGPPIWHPRHVISTRRGPRRAGLAVTAAAAAGGSPRTVLVTGAGGRTGQIVYKKLKEREGQFVGRGLVRTGESKGKIGGGDDVFVGDIRDPESIAPAIEGIDALIILTSAVPKMKPGFDPSKGGRPEFYFEEGSYPEQVDWIGQKNQIDAAKSIGAKHIVLVGSMGGTDINHPLNKLGNANILVWKRKAEQYLADSGLPYTIIRAGGLQDKDGGLRELIVGKDDEILKTETRTIARADVAEVCIQALLFEESKFKAFDLASKPEGEGTPTTDFRALFAQVNSRF

SEQ ID NO: 32161 - protein, 171 aa, Zea mays subsp. mays
  peptide (1)..(171): Ceres Seq. ID no. 12400839
  misc_feature (24)..(149): Pfam Name: Pfam Description:  Isoflavone reductase
  misc_feature (1)..(171): NCBI GI NO: 14719331 NR Description: putative 3-beta hydroxysteroiddehydrogenase/isomerase protein
  misc_feature (1)..(171): NCBI GI NO: 18404496 NR Description: expressed protein; protein id: At2g37660
  misc_feature (1)..(171): NCBI GI NO: 7485430 NR Description: hypothetical protein At2g37660
  misc_feature (1)..(171): NCBI GI NO: 34897418 NR Description: unknown protein
  misc_feature (1)..(171): NCBI GI NO: 18413869 NR Description: putative protein; protein id: At5g02240
  misc_feature (1)..(166): NCBI GI NO: 11358410 NR Description: hypothetical protein T7H20
  misc_feature (1)..(170): NCBI GI NO: 30689062 NR Description: expressed protein [Arabidopsis thaliana]
  misc_feature (24)..(169): NCBI GI NO: 37523053 NR Description: hypothetical protein gll3484
  misc_feature (1)..(167): NCBI GI NO: 17230395 NR Description: hypothetical protein [Nostoc sp. PCC 7120]
  misc_feature (23)..(167): NCBI GI NO: 16330694 NR Description: hypothetical protein [Synechocystis sp. PCC 6803]
MKPGFDPSKGGRPEFYFEEGSYPEQVDWIGQKNQIDAAKSIGAKHIVLVGSMGGTDINHPLNKLGNANILVWKRKAEQYLADSGLPYTIIRAGGLQDKDGGLRELIVGKDDEILKTETRTIARADVAEVCIQALLFEESKFKAFDLASKPEGEGTPTTDFRALFAQVNSRF

SEQ ID NO: 32162 - DNA, 1577 bp, Zea mays subsp. mays
  misc_feature (1)..(1577): Ceres Seq. ID no. 12595047
accaacttctcatcatcagccaagtgtaaagagtgcgaagaagcagtagcaaaaggattccattctcgtgttcttggagtggtccatcgatcgagctccgtgaaagagagagagagagagcaagcaatggcgacagcaggaaaggtgatcaagtgcagagctgccgtgacgtgggaggccggcaaaccgctgtccatcgaggaggtggaggtagcgccgccgcaggccatggaggtgcgtatcaagatcctctacaccgcgctctgccacaccgacgtctacttctgggaggccaaggggcaaaccccggtgttcccgaggatcttaggacacgaagcgggaggcatcgtggagagcgtcggagagggcgtgaccgacgtcgcgccaggcgaccacgtcctcccggtgttcaccggcgagtgcaaggagtgcgcccactgcaagtcggaggagagcaacatgtgcgacctcctcaggatcaacgtcgaccgcggcgtgatgatcggcgacggtaagtcccgcttcaccatcagcgggcagcccatcttccacttcgtcgggacgtccaccttcagcgagtacaccgtcatccatgtcggctgcctggccaagatcaaccccgaggcgcctctcgacaaagtctgcatcctcagctgtggtatctcgaccggccttggcgcgacactgaatgtggcgaaaccagccaagggctcgacggtggcgattttcgggcttggggctgtaggccttgctgctatggaaggtgctagactggctggtgcatcaaggatcatcggcgtggacatcaacccagcaaaatacgagcaagctaagaaatttggctgcactgaattcgttaaccccaaggaccacgacaagccagtgcaagaggtgctgattgagctgaccaacggcggcgtcgaccgcagcgtggagtgcaccggtaacgtcaacgccatgatatccgccttcgaatgtgtccacgacggctggggtgtcgccgtgctggtgggtgtcccgcacaaggacgaccagttcaagacccaccccatgaacttcctcagcgagaagacactcaagggcaccttcttcggaaactacaagccccgcaccgacctgcccaacgtggtcgagatgtacatgaaaaaggagctggagctggagaagttcatcacgcacagcgtgcccttctcggagatcaacacggcgttcgacctgatgctcaagggggagagcctgcgctgcatcatgaggatggaggattagagcttcattgcaagcttgctcctcctgcagggcaggcatgtcgcacagcaaatgggcatgaaaagttgaaggcgctccagtcctccagcttgtgtagtacacagtagcaataaaacgttagtgtttgtcctgtgcccatcctgtattattctgttccagggtttcacctttatcgtcagtgtgtggtcaggtttcaacccttctcagaacaacccccctcccagaaaaaaaacaaaggaagaagtttgtgtttcaagtttcagaatcccctgtctgtaatatccatttgcatgacaataatgagatactgt

SEQ ID NO: 32163 - protein, 421 aa, Zea mays subsp. mays
  peptide (1)..(421): Ceres Seq. ID no. 12595048
  misc_feature (43)..(421): NCBI GI NO: 113377 NR Description: ALCOHOL DEHYDROGENASE 2
  misc_feature (43)..(421): NCBI GI NO: 6979319 NR Description: alcohol dehydrogenase 2 [Oryza sativa]
  misc_feature (43)..(420): NCBI GI NO: 539057 NR Description: alcohol dehydrogenase (EC 1
  misc_feature (43)..(420): NCBI GI NO: 113385 NR Description: ALCOHOL DEHYDROGENASE 3
  misc_feature (43)..(420): NCBI GI NO: 13872817 NR Description: alcohol dehydrogenase [Pennisetum glaucum]
  misc_feature (43)..(421): NCBI GI NO: 82669 NR Description: alcohol dehydrogenase (EC 1.1.1.1) 1 - maize
  misc_feature (43)..(421): NCBI GI NO: 22122 NR Description: alcohol dehydrogenase 1 [Zea mays]
  misc_feature (43)..(421): NCBI GI NO: 113362 NR Description: Alcohol dehydrogenase 1 (ADH slow-allele)
  misc_feature (43)..(421): NCBI GI NO: 3420019 NR Description: putative alcohol dehydrogenase 1 [Sorghum bicolor]
  misc_feature (43)..(421): NCBI GI NO: 113359 NR Description: Alcohol dehydrogenase 1
TNFSSSAKCKECEEAVAKGFHSRVLGVVHRSSSVKEREREQAMATAGKVIKCRAAVTWEAGKPLSIEEVEVAPPQAMEVRIKILYTALCHTDVYFWEAKGQTPVFPRILGHEAGGIVESVGEGVTDVAPGDHVLPVFTGECKECAHCKSEESNMCDLLRINVDRGVMIGDGKSRFTISGQPIFHFVGTSTFSEYTVIHVGCLAKINPEAPLDKVCILSCGISTGLGATLNVAKPAKGSTVAIFGLGAVGLAAMEGARLAGASRIIGVDINPAKYEQAKKFGCTEFVNPKDHDKPVQEVLIELTNGGVDRSVECTGNVNAMISAFECVHDGWGVAVLVGVPHKDDQFKTHPMNFLSEKTLKGTFFGNYKPRTDLPNVVEMYMKKELELEKFITHSVPFSEINTAFDLMLKGESLRCIMRMED

SEQ ID NO: 32164 - protein, 379 aa, Zea mays subsp. mays
  peptide (1)..(379): Ceres Seq. ID no. 12595049
  misc_feature (1)..(379): NCBI GI NO: 113377 NR Description: ALCOHOL DEHYDROGENASE 2
  misc_feature (1)..(379): NCBI GI NO: 6979319 NR Description: alcohol dehydrogenase 2 [Oryza sativa]
  misc_feature (1)..(378): NCBI GI NO: 539057 NR Description: alcohol dehydrogenase (EC 1
  misc_feature (1)..(378): NCBI GI NO: 113385 NR Description: ALCOHOL DEHYDROGENASE 3
  misc_feature (1)..(378): NCBI GI NO: 13872817 NR Description: alcohol dehydrogenase [Pennisetum glaucum]
  misc_feature (1)..(379): NCBI GI NO: 82669 NR Description: alcohol dehydrogenase (EC 1.1.1.1) 1 - maize
  misc_feature (1)..(379): NCBI GI NO: 22122 NR Description: alcohol dehydrogenase 1 [Zea mays]
  misc_feature (1)..(379): NCBI GI NO: 113362 NR Description: Alcohol dehydrogenase 1 (ADH slow-allele)
  misc_feature (1)..(379): NCBI GI NO: 3420019 NR Description: putative alcohol dehydrogenase 1 [Sorghum bicolor]
  misc_feature (1)..(379): NCBI GI NO: 113359 NR Description: Alcohol dehydrogenase 1
MATAGKVIKCRAAVTWEAGKPLSIEEVEVAPPQAMEVRIKILYTALCHTDVYFWEAKGQTPVFPRILGHEAGGIVESVGEGVTDVAPGDHVLPVFTGECKECAHCKSEESNMCDLLRINVDRGVMIGDGKSRFTISGQPIFHFVGTSTFSEYTVIHVGCLAKINPEAPLDKVCILSCGISTGLGATLNVAKPAKGSTVAIFGLGAVGLAAMEGARLAGASRIIGVDINPAKYEQAKKFGCTEFVNPKDHDKPVQEVLIELTNGGVDRSVECTGNVNAMISAFECVHDGWGVAVLVGVPHKDDQFKTHPMNFLSEKTLKGTFFGNYKPRTDLPNVVEMYMKKELELEKFITHSVPFSEINTAFDLMLKGESLRCIMRMED

SEQ ID NO: 32165 - protein, 345 aa, Zea mays subsp. mays
  peptide (1)..(345): Ceres Seq. ID no. 12595050
  misc_feature (1)..(345): NCBI GI NO: 113377 NR Description: ALCOHOL DEHYDROGENASE 2
  misc_feature (1)..(345): NCBI GI NO: 6979319 NR Description: alcohol dehydrogenase 2 [Oryza sativa]
  misc_feature (1)..(344): NCBI GI NO: 539057 NR Description: alcohol dehydrogenase (EC 1
  misc_feature (1)..(344): NCBI GI NO: 113385 NR Description: ALCOHOL DEHYDROGENASE 3
  misc_feature (1)..(344): NCBI GI NO: 13872817 NR Description: alcohol dehydrogenase [Pennisetum glaucum]
  misc_feature (1)..(345): NCBI GI NO: 82669 NR Description: alcohol dehydrogenase (EC 1.1.1.1) 1 - maize
  misc_feature (1)..(345): NCBI GI NO: 22122 NR Description: alcohol dehydrogenase 1 [Zea mays]
  misc_feature (1)..(345): NCBI GI NO: 113362 NR Description: Alcohol dehydrogenase 1 (ADH slow-allele)
  misc_feature (1)..(345): NCBI GI NO: 3420019 NR Description: putative alcohol dehydrogenase 1 [Sorghum bicolor]
  misc_feature (1)..(345): NCBI GI NO: 113359 NR Description: Alcohol dehydrogenase 1
MEVRIKILYTALCHTDVYFWEAKGQTPVFPRILGHEAGGIVESVGEGVTDVAPGDHVLPVFTGECKECAHCKSEESNMCDLLRINVDRGVMIGDGKSRFTISGQPIFHFVGTSTFSEYTVIHVGCLAKINPEAPLDKVCILSCGISTGLGATLNVAKPAKGSTVAIFGLGAVGLAAMEGARLAGASRIIGVDINPAKYEQAKKFGCTEFVNPKDHDKPVQEVLIELTNGGVDRSVECTGNVNAMISAFECVHDGWGVAVLVGVPHKDDQFKTHPMNFLSEKTLKGTFFGNYKPRTDLPNVVEMYMKKELELEKFITHSVPFSEINTAFDLMLKGESLRCIMRMED

SEQ ID NO: 32166 - DNA, 966 bp, Zea mays subsp. mays
  misc_feature (1)..(966): Ceres Seq. ID no. 12400800
aaaaataaataaataaaaacacgccgccgccatcaatggcgatgtcgcgcttcgggcgctccgggcagccggagaaccgcgaatctttctccatcctcgtcctcaacgtctccttccgcactacggctgacgatctcttcccgctcttcgatcgctacggcaaggtcttagacatctacatcccgcgcgaccacaggactggggatccgcgagggttcgcgttcgtgaggtacaattacgaggatgcaggcgcgggatgccattgacgggcttgatgggatgaggtttgatgggcgtgcgctcatggtgcagtttgccaaatacggacccaatgctgaaaagattcataggggtagaattacagaagaaaatccaaagccaaggggtcgttgcagaagccgcagtccaagacagaggtatcgagaggattatcgggatagagactatagaaggcgaagccagagcagaagtagggagcgatatgaacaggccgggtacagagatggtgatcatcgtcgccataggactcacagtatcagtcctgattatgacaggaaacgtaacagacacagtggctctcctgtacttaaacgccccagtcatagcagaagtcgttcgcctcgtagggcacctcatgaaggaatacctagcaagcccagagatggccgcgctgcatgttctggaagcccttgaccctgagctgtggctgaatatcacacagtttctcctggacagcttgaggcatctaaacagttctcatcatttgtattttcttactaagatggcctttgttttagtccaggatgagtagacgagctttggcaaaaacaacaatgtctgcttggttactgaatctacatggtgacaatgatggaatattgatgtggcacagcattcaacttccagtactgcgctttgtaaacatctaagcctcatttgggaactatatgcatgttggatattgtc

SEQ ID NO: 32167 - protein, 173 aa, Zea mays subsp. mays
  peptide (1)..(173): Ceres Seq. ID no. 12400801
MGVRSWCSLPNTDPMLKRFIGVELQKKIQSQGVVAEAAVQDRGIERIIGIETIEGEARAEVGSDMNRPGTEMVIIVAIGLTVSVLIMTGNVTDTVALLYLNAPVIAEVVRLVGHLMKEYLASPEMAALHVLEALDPELWLNITQFLLDSLRHLNSSHHLYFLTKMAFVLVQDE

SEQ ID NO: 32168 - protein, 159 aa, Zea mays subsp. mays
  peptide (1)..(159): Ceres Seq. ID no. 12400802
MLKRFIGVELQKKIQSQGVVAEAAVQDRGIERIIGIETIEGEARAEVGSDMNRPGTEMVIIVAIGLTVSVLIMTGNVTDTVALLYLNAPVIAEVVRLVGHLMKEYLASPEMAALHVLEALDPELWLNITQFLLDSLRHLNSSHHLYFLTKMAFVLVQDE

SEQ ID NO: 32169 - protein, 149 aa, Zea mays subsp. mays
  peptide (1)..(149): Ceres Seq. ID no. 12400803
  misc_feature (2)..(149): NCBI GI NO: 33146621 NR Description: putative splicing factor, arginine/serine-rich 2
  misc_feature (2)..(149): NCBI GI NO: 7446336 NR Description: probable arginine/serine-rich splicing factor -alfalfa
  misc_feature (2)..(149): NCBI GI NO: 9843653 NR Description: splicing factor SC35 [Arabidopsis thaliana]
  misc_feature (2)..(149): NCBI GI NO: 15237641 NR Description: arginine/serine-rich splicing factor SC35
  misc_feature (38)..(142): NCBI GI NO: 9843653 NR Description: splicing factor SC35 [Arabidopsis thaliana]
  misc_feature (38)..(142): NCBI GI NO: 15237641 NR Description: arginine/serine-rich splicing factor SC35
  misc_feature (1)..(149): NCBI GI NO: 266991 NR Description: Splicing factor, arginine/serine-rich 2
  misc_feature (1)..(139): NCBI GI NO: 28279759 NR Description: Similar to splicing factor, arginine/serine-rich 2
  misc_feature (1)..(149): NCBI GI NO: 6755478 NR Description: splicing factor, arginine/serine-rich 2
  misc_feature (1)..(149): NCBI GI NO: 39794351 NR Description: Unknown (protein for MGC:75633)
MQARDAIDGLDGMRFDGRALMVQFAKYGPNAEKIHRGRITEENPKPRGRCRSRSPRQRYREDYRDRDYRRRSQSRSRERYEQAGYRDGDHRRHRTHSISPDYDRKRNRHSGSPVLKRPSHSRSRSPRRAPHEGIPSKPRDGRAACSGSP

SEQ ID NO: 32170 - DNA, 949 bp, Zea mays subsp. mays; identical to SEQ ID NO: 32122
  misc_feature (1)..(949): Ceres Seq. ID no. 12357451

SEQ ID NO: 32171 - protein, 227 aa, Zea mays subsp. mays; identical to SEQ ID NO: 25128
  peptide (1)..(227): Ceres Seq. ID no. 12357452
  misc_feature (22)..(227): NCBI GI NO: 3915008 NR Description: Superoxide dismutase
  misc_feature (22)..(227): NCBI GI NO: 14326463 NR Description: copper/zinc superoxide dismutase precursor
  misc_feature (22)..(227): NCBI GI NO: 7433318 NR Description: superoxide dismutase (EC 1
  misc_feature (22)..(227): NCBI GI NO: 7433305 NR Description: probable superoxide dismutase (EC 1
  misc_feature (67)..(227): NCBI GI NO: 20900 NR Description: Cu/Zn superoxide dismutase II [Pisum sativum]
  misc_feature (64)..(227): NCBI GI NO: 11358868 NR Description: superoxide dismutase (EC 1
  misc_feature (64)..(227): NCBI GI NO: 18401659 NR Description: copper/zinc superoxide dismutase
  misc_feature (67)..(227): NCBI GI NO: 134683 NR Description: Superoxide dismutase
  misc_feature (64)..(227): NCBI GI NO: 5689611 NR Description: copper/zinc superoxide dismutase
  misc_feature (22)..(227): NCBI GI NO: 38073257 NR Description: superoxide dismutase [Trifolium pratense]

SEQ ID NO: 32172 - protein, 206 aa, Zea mays subsp. mays; identical to SEQ ID NO: 25129
  peptide (1)..(206): Ceres Seq. ID no. 12357453
  misc_feature (1)..(206): NCBI GI NO: 3915008 NR Description: Superoxide dismutase
  misc_feature (1)..(206): NCBI GI NO: 14326463 NR Description: copper/zinc superoxide dismutase precursor
  misc_feature (1)..(206): NCBI GI NO: 7433318 NR Description: superoxide dismutase (EC 1
  misc_feature (1)..(206): NCBI GI NO: 7433305 NR Description: probable superoxide dismutase (EC 1
  misc_feature (46)..(206): NCBI GI NO: 20900 NR Description: Cu/Zn superoxide dismutase II [Pisum sativum]
  misc_feature (43)..(206): NCBI GI NO: 11358868 NR Description: superoxide dismutase (EC 1
  misc_feature (43)..(206): NCBI GI NO: 18401659 NR Description: copper/zinc superoxide dismutase
  misc_feature (46)..(206): NCBI GI NO: 134683 NR Description: Superoxide dismutase
  misc_feature (43)..(206): NCBI GI NO: 5689611 NR Description: copper/zinc superoxide dismutase
  misc_feature (1)..(206): NCBI GI NO: 38073257 NR Description: superoxide dismutase [Trifolium pratense]

SEQ ID NO: 32173 - DNA, 735 bp, Zea mays subsp. mays
  misc_feature (1)..(735): Ceres Seq. ID no. 12351018
cccaaaatactccaccaccgcacccactagggtttccgcaccgcattgcagaacctcgccgcctccaccctcaccacaccaccggcgatgtccacagcggcggcgcagggcggcagcgacaagccggcgctccggaggcccgtcttcaccaaggtcgaccagctcaggccgggcaccaacgggcacaccctcaccgtcaaggtcgtcagcgccacccccgtgcctgggcgcgcgcgcccaggcgcacccgccgccgccccatcccgcgcgccgcgcatcgccgagtgcctcgtcggggacgagaccggcgccatcgtcttcaccgcccgcaacgaccaagttgacttgctgaagcccaatgcgacagtgatcttgcgcaatgccaaaatagacatgttcaaaggatcaatgaggcttgcagtggacaagtgggggcggattgaggctgtagagccagccagtttcacggtgaaggaagacaacaacctgtctctaatagagtatgaattggttaatgtggctgagtaactgtccaatccaagcgtttctgccccctttatttcgtgccataagaaggaagtaccatgaatgaacattataaagcctcttgaagcgaagcgagtttatttgctacggtggggtagataaaggtcaaggctgtatggcctgtgttagaactttggataaattaagatgaattgcccttgcatctatgagattgttatccatctttgt

SEQ ID NO: 32174 - protein, 146 aa, Zea mays subsp. mays
  peptide (1)..(146): Ceres Seq. ID no. 12351019
  misc_feature (1)..(146): NCBI GI NO: 34904470 NR Description: OSJNBa0086P08.14
  misc_feature (1)..(146): NCBI GI NO: 18403397 NR Description: Expressed protein; protein id: At2g33845
  misc_feature (3)..(144): NCBI GI NO: 15235304 NR Description: putative protein; protein id: At4g28440
  misc_feature (14)..(144): NCBI GI NO: 34909622 NR Description: P0435B05.31
  misc_feature (10)..(146): NCBI GI NO: 18395285 NR Description: expressed protein; protein id: At1g23750
  misc_feature (14)..(144): NCBI GI NO: 18391179 NR Description: expressed protein; protein id: At1g10590
  misc_feature (14)..(144): NCBI GI NO: 30681801 NR Description: expressed protein [Arabidopsis thaliana]
  misc_feature (1)..(142): NCBI GI NO: 15219562 NR Description: hypothetical protein; protein id: At1g03810.1
  misc_feature (14)..(95): NCBI GI NO: 6573753 NR Description: F20B24.1 [Arabidopsis thaliana]
  misc_feature (85)..(144): NCBI GI NO: 6573753 NR Description: F20B24.1 [Arabidopsis thaliana]
MSTAAAQGGSDKPALRRPVFTKVDQLRPGTNGHTLTVKVVSATPVPGRARPGAPAAAPSRAPRIAECLVGDETGAIVFTARNDQVDLLKPNATVILRNAKIDMFKGSMRLAVDKWGRIEAVEPASFTVKEDNNLSLIEYELVNVAE

SEQ ID NO: 32175 - protein, 116 aa, Zea mays subsp. mays
  peptide (1)..(116): Ceres Seq. ID no. 12351020
  misc_feature (14)..(109): Pfam Name: Pfam Description:  Extensin-like region
  misc_feature (1)..(113): NCBI GI NO: 25989119 NR Description: unknown [Streptomyces aureofaciens]
  misc_feature (1)..(116): NCBI GI NO: 31239605 NR Description: ENSANGP00000009012 [Anopheles gambiae]
  misc_feature (1)..(116): NCBI GI NO: 31227421 NR Description: ENSANGP00000004917 [Anopheles gambiae]
PKYSTTAPTRVSAPHCRTSPPPPSPHHRRCPQRRRRAAATSRRSGGPSSPRSTSSGRAPTGTPSPSRSSAPPPCLGARAQAHPPPPHPARRASPSASSGTRPAPSSSPPATTKLTC

SEQ ID NO: 32176 - protein, 113 aa, Zea mays subsp. mays
  peptide (1)..(113): Ceres Seq. ID no. 12351021
QNTPPPHPLGFPHRIAEPRRLHPHHTTGDVHSGGAGRQRQAGAPEARLHQGRPAQAGHQRAHPHRQGRQRHPRAWARAPRRTRRRPIPRAAHRRVPRRGRDRRHRLHRPQRPS

SEQ ID NO: 32177 - DNA, 662 bp, Zea mays subsp. mays
  misc_feature (1)..(662): Ceres Seq. ID no. 12400556
aattctctctcgaccgcggcatggccgccggcctctcattcccccgcgccggggccccgttcatcctcctccgcacctcctgtttctctccgtgggcagctctggtgccccgccgtcgacttctctctgggcctcccactgccggtgatcccccgcccccggcgctcccgccaacttcgaagctcgccgccccgccggttgtgggaacgccggagcccccgctgccgtttagggccgtggaggcggagatccttcgcgatattgaccccgtcgtcctgctcatcaaggatatcctccactccgatagatacggggatggcgaatgtctctgcccaagggacgaaaatgtcgtcgtggagaagctcctctcctaccatccacgcgcgcaggacaaaattgggtgtggacttgacgctataatggttgataggcaccctgagttcagaaagtcaagatgcctcttcgttgttcgaacagacggtgtttggattgatttctcataccagaagtgcctccgtgcatacatccgggaaaagtacccgtctcatgccgacagatttatacgagaacatttcaagcgaacatgaagcaaacccaaaagtaatttgaatacattgtatttttatgagttttggcatagtttatgtacatcattgaccctc

SEQ ID NO: 32178 - protein, 194 aa, Zea mays subsp. mays
  peptide (1)..(194): Ceres Seq. ID no. 12400557
  misc_feature (8)..(194): NCBI GI NO: 34015211 NR Description: putative defective chloroplasts and leaves
  misc_feature (76)..(193): NCBI GI NO: 15232596 NR Description: putative protein; protein id: At3g46630
  misc_feature (80)..(193): NCBI GI NO: 22330069 NR Description: defective chloroplasts and leaves
  misc_feature (80)..(193): NCBI GI NO: 18650724 NR Description: DCL protein [Coffea arabica]
  misc_feature (80)..(193): NCBI GI NO: 6014934 NR Description: DCL PROTEIN, CHLOROPLAST PRECURSOR
  misc_feature (56)..(194): NCBI GI NO: 15225617 NR Description: unknown protein; protein id: At2g40040.1
  misc_feature (76)..(192): NCBI GI NO: 34905864 NR Description: similar to DNA-directed RNA polymerase subunit A'
FSLDRGMAAGLSFPRAGAPFILLRTSCFSPWAALVPRRRLLSGPPTAGDPPPPALPPTSKLAAPPVVGTPEPPLPFRAVEAEILRDIDPVVLLIKDILHSDRYGDGECLCPRDENVVVEKLLSYHPRAQDKIGCGLDAIMVDRHPEFRKSRCLFVVRTDGVWIDFSYQKCLRAYIREKYPSHADRFIREHFKRT

SEQ ID NO: 32179 - protein, 188 aa, Zea mays subsp. mays
  peptide (1)..(188): Ceres Seq. ID no. 12400558
  misc_feature (2)..(188): NCBI GI NO: 34015211 NR Description: putative defective chloroplasts and leaves
  misc_feature (70)..(187): NCBI GI NO: 15232596 NR Description: putative protein; protein id: At3g46630
  misc_feature (74)..(187): NCBI GI NO: 22330069 NR Description: defective chloroplasts and leaves
  misc_feature (74)..(187): NCBI GI NO: 18650724 NR Description: DCL protein [Coffea arabica]
  misc_feature (74)..(187): NCBI GI NO: 6014934 NR Description: DCL PROTEIN, CHLOROPLAST PRECURSOR
  misc_feature (50)..(188): NCBI GI NO: 15225617 NR Description: unknown protein; protein id: At2g40040.1
  misc_feature (70)..(186): NCBI GI NO: 34905864 NR Description: similar to DNA-directed RNA polymerase subunit A'
MAAGLSFPRAGAPFILLRTSCFSPWAALVPRRRLLSGPPTAGDPPPPALPPTSKLAAPPVVGTPEPPLPFRAVEAEILRDIDPVVLLIKDILHSDRYGDGECLCPRDENVVVEKLLSYHPRAQDKIGCGLDAIMVDRHPEFRKSRCLFVVRTDGVWIDFSYQKCLRAYIREKYPSHADRFIREHFKRT

SEQ ID NO: 32180 - protein, 139 aa, Zea mays subsp. mays
  peptide (1)..(139): Ceres Seq. ID no. 12400559
NSLSTAAWPPASHSPAPGPRSSSSAPPVSLRGQLWCPAVDFSLGLPLPVIPRPRRSRQLRSSPPRRLWERRSPRCRLGPWRRRSFAILTPSSCSSRISSTPIDTGMANVSAQGTKMSSWRSSSPTIHARRTKLGVDLTL

SEQ ID NO: 32181 - DNA, 638 bp, Zea mays subsp. mays
  misc_feature (1)..(638): Ceres Seq. ID no. 12400466
atgtgtggttgtgttcttataacagatgagagtgtggttgctcttgccaacggatgtccgcacctgcgctcgctgggcctctacttctgccagaacatcacggaccgcgccatgtactccctcgcaaacagccgcgtgaagagcaagcgtgggaggtgggatgcagtgaaagacgggctcgcgaacctcaacatcagccagtgcaccgccctgacgcccccggcggtgcaggccgtctgcgactccttcccggcgctgcacacctgccccgagaggcactccctcatcatcagtggctgcctcagcctcacgtcagtccactgcgcctgcgccctccacccacaccgtgccgggagagccctgatggccaaccatgcgtactaataagcatgttgggtggctttgcgctgatagttctcgtgaatggggacgcatgcctgggggtgatggcgtcgtccaggtgtagaggaagctccctgtgtacataaactcgaaacttggcggtgtgataagacactgctgtggtaggactttgtgtgataatcatggagtggcgaatttctggagagtggcatgtactccagtgctacctggacattgaccagaaaaaaaatgtggtatctagtggccttctgtgt

SEQ ID NO: 32182 - protein, 144 aa, Zea mays subsp. mays
  peptide (1)..(144): Ceres Seq. ID no. 12400467
MSAPALAGPLLLPEHHGPRHVLPRKQPREEQAWEVGCSERRAREPQHQPVHRPDAPGGAGRLRLLPGAAHLPREALPHHQWLPQPHVSPLRLRPPPTPCRESPDGQPCVLISMLGGFALIVLVNGDACLGVMASSRCRGSSLCT

SEQ ID NO: 32183 - protein, 127 aa, Zea mays subsp. mays
  peptide (1)..(127): Ceres Seq. ID no. 12400468
  misc_feature (1)..(127): NCBI GI NO: 34907434 NR Description: P0018C10.44
  misc_feature (1)..(121): NCBI GI NO: 18394987 NR Description: F-box protein family; protein id: At1g21410
  misc_feature (1)..(121): NCBI GI NO: 21554029 NR Description: F-box protein AtFBL5 [Arabidopsis thaliana]
  misc_feature (1)..(116): NCBI GI NO: 18411319 NR Description: F-box protein family, AtFBL5; protein id:At1g77000
  misc_feature (1)..(116): NCBI GI NO: 26450797 NR Description: unknown protein [Arabidopsis thaliana]
MCGCVLITDESVVALANGCPHLRSLGLYFCQNITDRAMYSLANSRVKSKRGRWDAVKDGLANLNISQCTALTPPAVQAVCDSFPALHTCPERHSLIISGCLSLTSVHCACALHPHRAGRALMANHAY

SEQ ID NO: 32184 - protein, 90 aa, Zea mays subsp. mays
  peptide (1)..(90): Ceres Seq. ID no. 12400469
  misc_feature (1)..(90): NCBI GI NO: 34907434 NR Description: P0018C10.44
  misc_feature (1)..(84): NCBI GI NO: 18394987 NR Description: F-box protein family; protein id: At1g21410
  misc_feature (1)..(84): NCBI GI NO: 21554029 NR Description: F-box protein AtFBL5 [Arabidopsis thaliana]
  misc_feature (1)..(79): NCBI GI NO: 18411319 NR Description: F-box protein family, AtFBL5; protein id:At1g77000
  misc_feature (1)..(79): NCBI GI NO: 26450797 NR Description: unknown protein [Arabidopsis thaliana]
MYSLANSRVKSKRGRWDAVKDGLANLNISQCTALTPPAVQAVCDSFPALHTCPERHSLIISGCLSLTSVHCACALHPHRAGRALMANHAY

SEQ ID NO: 32185 - DNA, 764 bp, Zea mays subsp. mays
  misc_feature (1)..(764): Ceres Seq. ID no. 12380968
gcacgagaccattacctagaacatcctaatcgaaaactcttcttcgcattgcctttcccttcagttgcaccgacctccagacgaaaccacccaagacgcgtgcttccattcctagcccaacagaagcgaagcacgccaccgaccaccggcctcgaagggatcatcttctctacaactcgtcctcgtggccttgttcctcctcttgtataggggactgcggcggagtggagatccgtgccgacatagtccgacttcttcgctcgctgcctacgattgatggcctcaccttcaccaaccgaagagttcagcagggaagcagctcgtcagtctctgatcgcgatctccgagtccactccggagacaccttcaccgcagacggtgaggacaccgccgatctccagcgcagagaacgggaagccgggcgatggggcggacaagttcagatcgaagctgatgtccatcacagacctgtcttctgatgcccaacctgcgcagtgccctcccgaggatgtcgctgcttaatcaatcgtgtgattctctgctcgacttgcggacacgatgtatcagtgcttgccgatcctctgaactggacatttggctgtcgtgctttaaactggacgtccttatggcttatgttattactggtcgtttttatttgataaataaatattcaggggaacgggtggaaatatactgtacaagtttcctgacttgttgatgaggaaccggtttgtctgaacatgctgccatgcactcatgctcgg

SEQ ID NO: 32186 - protein, 81 aa, Zea mays subsp. mays
  peptide (1)..(81): Ceres Seq. ID no. 12380969
  misc_feature (1)..(81): NCBI GI NO: 38346711 NR Description: OSJNBa0086O06.9
MASPSPTEEFSREAARQSLIAISESTPETPSPQTVRTPPISSAENGKPGDGADKFRSKLMSITDLSSDAQPAQCPPEDVAA

SEQ ID NO: 32187 - protein, 79 aa, Zea mays subsp. mays
  peptide (1)..(79): Ceres Seq. ID no. 12380970
MPNLRSALPRMSLLNQSCDSLLDLRTRCISACRSSELDIWLSCFKLDVLMAYVITGRFYLINKYSGERVEIYCTSFLTC

SEQ ID NO: 32188 - protein, 69 aa, Zea mays subsp. mays
  peptide (1)..(69): Ceres Seq. ID no. 12380971
MSLLNQSCDSLLDLRTRCISACRSSELDIWLSCFKLDVLMAYVITGRFYLINKYSGERVEIYCTSFLTC

SEQ ID NO: 32189 - DNA, 718 bp, Zea mays subsp. mays
  misc_feature (1)..(718): Ceres Seq. ID no. 12390515
  misc_feature (416)..(416): n is a, c, t, g, unknown, or other
cgcccccgcatcgtcgccaaagatgcagatctttgtgaagactctgacggggaagaccatcactttaggaggtggagtcctcggacaccatcgacaatgtgaaggccaagatccaggacaaggagggaatccccccggaccagcagcggctcatcttcgccggcaagcagctcgaggacggtcgcaccctcgccgactacaacatccagaaggagtccaccctccacctggtgctccgcctccgaggtggcgccaagaagcgcaagaagaagacgtacaccaagcccaagaagatcaagcacaagcacaagaaggtaaagctcgcagtgctgcagttctacaaggtggacgacgccaccggcaaggtgacccgcctccgcaaggagtgccccaacaccgagtgcggtgcgggtgtnttcatggccaaccacttcgaccgccactactgcggcaagtgcggcctcacctacgtctacaatcagaaggcgtaatcccatgcgccgctttgcttcacccgcctacctatcacgcattcacctgttggttactcgatttgaatatcatttagatcggtttgaggttggaacataaatgcagcagtagtttctgtcttattatattggtacctctgttactgagttgatgtggtcctggctcctgagcttaattttgttttcgtgttctatccttagagacgattgtaccttttggccgtttc

SEQ ID NO: 32190 - protein, 188 aa, Zea mays subsp. mays
  peptide (1)..(188): Ceres Seq. ID no. 12390516
  misc_feature (7)..(22): NCBI GI NO: 1076678 NR Description: ubiquitin / ribosomal protein S27a - potato
  misc_feature (4)..(22): NCBI GI NO: 28189917 NR Description: similar to polyubiquitin [Bos taurus]
  misc_feature (7)..(22): NCBI GI NO: 323230 NR Description: polyprotein
  misc_feature (7)..(22): NCBI GI NO: 2149467 NR Description: predicted to encode 4983 amino acids with apredicted molecular mass of 558 kDa
  misc_feature (139)..(139): Xaa is any aa, unknown or other
APASSPKMQIFVKTLTGKTITLGGGVLGHHRQCEGQDPGQGGNPPGPAAAHLRRQAARGRSHPRRLQHPEGVHPPPGAPPPRWRQEAQEEDVHQAQEDQAQAQEGKARSAAVLQGGRRHRQGDPPPQGVPQHRVRCGCXHGQPLRPPLLRQVRPHLRLQSEGVIPCAALLHPPTYHAFTCWLLDLNII

SEQ ID NO: 32191 - protein, 181 aa, Zea mays subsp. mays
  peptide (1)..(181): Ceres Seq. ID no. 12390517
  misc_feature (1)..(15): NCBI GI NO: 1076678 NR Description: ubiquitin / ribosomal protein S27a - potato
  misc_feature (1)..(15): NCBI GI NO: 28189917 NR Description: similar to polyubiquitin [Bos taurus]
  misc_feature (1)..(15): NCBI GI NO: 323230 NR Description: polyprotein
  misc_feature (1)..(15): NCBI GI NO: 2149467 NR Description: predicted to encode 4983 amino acids with apredicted molecular mass of 558 kDa
  misc_feature (132)..(132): Xaa is any aa, unknown or other
MQIFVKTLTGKTITLGGGVLGHHRQCEGQDPGQGGNPPGPAAAHLRRQAARGRSHPRRLQHPEGVHPPPGAPPPRWRQEAQEEDVHQAQEDQAQAQEGKARSAAVLQGGRRHRQGDPPPQGVPQHRVRCGCXHGQPLRPPLLRQVRPHLRLQSEGVIPCAALLHPPTYHAFTCWLLDLNII

SEQ ID NO: 32192 - DNA, 1181 bp, Zea mays subsp. mays; identical to SEQ ID NO: 31997
  misc_feature (1)..(1181): Ceres Seq. ID no. 12364890
  misc_feature (934)..(934): n is a, c, t, g, unknown, or other
  misc_feature (428)..(428): n is a, c, t, g, unknown, or other
  misc_feature (839)..(839): n is a, c, t, g, unknown, or other
  misc_feature (831)..(831): n is a, c, t, g, unknown, or other
  misc_feature (842)..(842): n is a, c, t, g, unknown, or other
  misc_feature (435)..(435): n is a, c, t, g, unknown, or other
  misc_feature (427)..(427): n is a, c, t, g, unknown, or other
  misc_feature (830)..(830): n is a, c, t, g, unknown, or other
  misc_feature (958)..(958): n is a, c, t, g, unknown, or other
  misc_feature (837)..(837): n is a, c, t, g, unknown, or other
  misc_feature (838)..(838): n is a, c, t, g, unknown, or other
  misc_feature (935)..(935): n is a, c, t, g, unknown, or other
  misc_feature (840)..(840): n is a, c, t, g, unknown, or other
  misc_feature (356)..(356): n is a, c, t, g, unknown, or other

SEQ ID NO: 32193 - protein, 161 aa, Zea mays subsp. mays; identical to SEQ ID NO: 31998
  peptide (1)..(161): Ceres Seq. ID no. 12364891
  misc_feature (92)..(92): Xaa is any aa, unknown or other
  misc_feature (115)..(115): Xaa is any aa, unknown or other
  misc_feature (116)..(116): Xaa is any aa, unknown or other
  misc_feature (118)..(118): Xaa is any aa, unknown or other

SEQ ID NO: 32194 - protein, 147 aa, Zea mays subsp. mays; identical to SEQ ID NO: 31999
  peptide (1)..(147): Ceres Seq. ID no. 12364892
  misc_feature (78)..(78): Xaa is any aa, unknown or other
  misc_feature (101)..(101): Xaa is any aa, unknown or other
  misc_feature (102)..(102): Xaa is any aa, unknown or other
  misc_feature (104)..(104): Xaa is any aa, unknown or other

SEQ ID NO: 32195 - protein, 99 aa, Zea mays subsp. mays; identical to SEQ ID NO: 32000
  peptide (1)..(99): Ceres Seq. ID no. 12364893
  misc_feature (55)..(99): NCBI GI NO: 29247944 NR Description: GLP_26_54603_52153 [Giardia lamblia ATCC 50803]
  misc_feature (49)..(99): NCBI GI NO: 29829093 NR Description: putative translation initiation factor IF-2
  misc_feature (47)..(99): NCBI GI NO: 29247944 NR Description: GLP_26_54603_52153 [Giardia lamblia ATCC 50803]
  misc_feature (52)..(99): NCBI GI NO: 23106243 NR Description: hypothetical protein [Azotobacter vinelandii]
  misc_feature (43)..(99): NCBI GI NO: 22960029 NR Description: hypothetical protein [Rhodobacter sphaeroides]
  misc_feature (31)..(99): NCBI GI NO: 6690017 NR Description: NTR [Herpesvirus papio]
  misc_feature (49)..(99): NCBI GI NO: 22957039 NR Description: hypothetical protein [Rhodobacter sphaeroides]
  misc_feature (47)..(99): NCBI GI NO: 13559031 NR Description: bA11M20
  misc_feature (56)..(99): NCBI GI NO: 2498095 NR Description: 5E5 ANTIGEN
  misc_feature (31)..(67): NCBI GI NO: 93144 NR Description: hypothetical protein - suid herpesvirus 1

SEQ ID NO: 32196 - DNA, 1166 bp, Zea mays subsp. mays
  misc_feature (1)..(1166): Ceres Seq. ID no. 12400815
aacgccgccgccgccatggccactgccggagccttccacgccggcggcttcctcctcctcccggtccgacgaagtctccgcgggcccagcccctcaccatggtcccacttccgcacccacttcatctcctccaagccgccgccctccacccctctcccgccgcccgtgccgccagctcgcctgtcccccgtgggttctgccttcgggcctcctagcagaaagaccggcgcggttggagccggggctggcgcgggtgtcgtcgggtggtaccttggcctcttggacgcgcggcccgtgctgaccaagagcgtcaccgccgctgtcatcttcaccgccgcggacgtctcctcccagatgctcacacttggtcctgaggattcacttgattttcttaggaccatgcgtatggctagttatgggtttctgatctcaggacctagcctccatctttggttcaattttatctcaaaattgttccccaaaaaagatgtagtgaacacattgaagaagatgtttatagggcaagcagtctatggaccaattattaactcagttttcttctcatacaatgcaggattacaaggcgagactgttgctgagattattgcaagattgaagagggatctagttcccaccatcaaaagcgggcttttatactggccaacttgtgatttcattactttcaagtttgttccagttcatttacagccgctagtgagcaattcattctcatttctgtggaccatctacataacatatatggccagcttaaagaaagcagatgtggaggtggccccgagtacctaggtgttgtcgagtgactcaacatggctgttatctgtcgattcttcgtacaaggcagacttcatgtatgcctcctggatcgcggatgttatcgaccggcgattttaggctttagagagatggattgcttacgatgcatccttcacttttggttagggcatagtgtccacagggattctacttgcttatgtttttggctgaagaccattttgtttggatgatcgaattatactaggttcattgggtgggtcttctacgacgtctttcttacggtcttttgatcctatggctaagaagtacatttacttcaactaaattttctgtatctagttatggagatgcaagtgaacctgttctttgcc

SEQ ID NO: 32197 - protein, 268 aa, Zea mays subsp. mays
  peptide (1)..(268): Ceres Seq. ID no. 12400816
  misc_feature (193)..(256): Pfam Name: Pfam Description:  Mpv17 / PMP22 family
  misc_feature (84)..(256): NCBI GI NO: 18418319 NR Description: Expressed protein; protein id: At4g33905
  misc_feature (89)..(261): NCBI GI NO: 18422298 NR Description: putative protein; protein id: At5g43140
  misc_feature (89)..(261): NCBI GI NO: 21553640 NR Description: contains similarity to 22 kDa peroxisomal membraneprotein
  misc_feature (71)..(259): NCBI GI NO: 15226016 NR Description: 22 kDa peroxisomal membrane protein
  misc_feature (84)..(238): NCBI GI NO: 7485624 NR Description: hypothetical protein F17I5
  misc_feature (89)..(236): NCBI GI NO: 9757841 NR Description: contains similarity to 22 kDa peroxisomal membraneprotein~gene_id:MMG4
  misc_feature (76)..(255): NCBI GI NO: 21594286 NR Description: unknown [Arabidopsis thaliana]
  misc_feature (76)..(255): NCBI GI NO: 15241166 NR Description: putative protein; protein id: At5g19750
  misc_feature (76)..(255): NCBI GI NO: 16648746 NR Description: AT5g19750/T29J13_170 [Arabidopsis thaliana]
  misc_feature (90)..(268): NCBI GI NO: 30695366 NR Description: expressed protein [Arabidopsis thaliana]
NAAAAMATAGAFHAGGFLLLPVRRSLRGPSPSPWSHFRTHFISSKPPPSTPLPPPVPPARLSPVGSAFGPPSRKTGAVGAGAGAGVVGWYLGLLDARPVLTKSVTAAVIFTAADVSSQMLTLGPEDSLDFLRTMRMASYGFLISGPSLHLWFNFISKLFPKKDVVNTLKKMFIGQAVYGPIINSVFFSYNAGLQGETVAEIIARLKRDLVPTIKSGLLYWPTCDFITFKFVPVHLQPLVSNSFSFLWTIYITYMASLKKADVEVAPST

SEQ ID NO: 32198 - protein, 263 aa, Zea mays subsp. mays
  peptide (1)..(263): Ceres Seq. ID no. 12400817
  misc_feature (188)..(251): Pfam Name: Pfam Description:  Mpv17 / PMP22 family
  misc_feature (79)..(251): NCBI GI NO: 18418319 NR Description: Expressed protein; protein id: At4g33905
  misc_feature (84)..(256): NCBI GI NO: 18422298 NR Description: putative protein; protein id: At5g43140
  misc_feature (84)..(256): NCBI GI NO: 21553640 NR Description: contains similarity to 22 kDa peroxisomal membraneprotein
  misc_feature (66)..(254): NCBI GI NO: 15226016 NR Description: 22 kDa peroxisomal membrane protein
  misc_feature (79)..(233): NCBI GI NO: 7485624 NR Description: hypothetical protein F17I5
  misc_feature (84)..(231): NCBI GI NO: 9757841 NR Description: contains similarity to 22 kDa peroxisomal membraneprotein~gene_id:MMG4
  misc_feature (71)..(250): NCBI GI NO: 21594286 NR Description: unknown [Arabidopsis thaliana]
  misc_feature (71)..(250): NCBI GI NO: 15241166 NR Description: putative protein; protein id: At5g19750
  misc_feature (71)..(250): NCBI GI NO: 16648746 NR Description: AT5g19750/T29J13_170 [Arabidopsis thaliana]
  misc_feature (85)..(263): NCBI GI NO: 30695366 NR Description: expressed protein [Arabidopsis thaliana]
MATAGAFHAGGFLLLPVRRSLRGPSPSPWSHFRTHFISSKPPPSTPLPPPVPPARLSPVGSAFGPPSRKTGAVGAGAGAGVVGWYLGLLDARPVLTKSVTAAVIFTAADVSSQMLTLGPEDSLDFLRTMRMASYGFLISGPSLHLWFNFISKLFPKKDVVNTLKKMFIGQAVYGPIINSVFFSYNAGLQGETVAEIIARLKRDLVPTIKSGLLYWPTCDFITFKFVPVHLQPLVSNSFSFLWTIYITYMASLKKADVEVAPST

SEQ ID NO: 32199 - protein, 150 aa, Zea mays subsp. mays
  peptide (1)..(150): Ceres Seq. ID no. 12400818
  misc_feature (75)..(138): Pfam Name: Pfam Description:  Mpv17 / PMP22 family
  misc_feature (1)..(138): NCBI GI NO: 18418319 NR Description: Expressed protein; protein id: At4g33905
  misc_feature (1)..(143): NCBI GI NO: 18422298 NR Description: putative protein; protein id: At5g43140
  misc_feature (1)..(143): NCBI GI NO: 21553640 NR Description: contains similarity to 22 kDa peroxisomal membraneprotein
  misc_feature (1)..(141): NCBI GI NO: 15226016 NR Description: 22 kDa peroxisomal membrane protein
  misc_feature (1)..(120): NCBI GI NO: 7485624 NR Description: hypothetical protein F17I5
  misc_feature (1)..(118): NCBI GI NO: 9757841 NR Description: contains similarity to 22 kDa peroxisomal membraneprotein~gene_id:MMG4
  misc_feature (1)..(137): NCBI GI NO: 21594286 NR Description: unknown [Arabidopsis thaliana]
  misc_feature (1)..(137): NCBI GI NO: 15241166 NR Description: putative protein; protein id: At5g19750
  misc_feature (1)..(137): NCBI GI NO: 16648746 NR Description: AT5g19750/T29J13_170 [Arabidopsis thaliana]
  misc_feature (1)..(150): NCBI GI NO: 30695366 NR Description: expressed protein [Arabidopsis thaliana]
MLTLGPEDSLDFLRTMRMASYGFLISGPSLHLWFNFISKLFPKKDVVNTLKKMFIGQAVYGPIINSVFFSYNAGLQGETVAEIIARLKRDLVPTIKSGLLYWPTCDFITFKFVPVHLQPLVSNSFSFLWTIYITYMASLKKADVEVAPST

SEQ ID NO: 32200 - DNA, 599 bp, Zea mays subsp. mays
  misc_feature (1)..(599): Ceres Seq. ID no. 12400807
cgaaaaatcttctcccccagctccccagcaccagtccccaattatttggcctccgtcagagaggggagaaagacccgttcgaggcggcggcgatgtcggggcgcggcaacggcggcaagggtctgggcaagggtggagccaagcgccaccggaaggtgctccgcgacaacatccagggcatcaccaagccggcgatccggaggctggctcggaggggcggcgtgaagcgcatctcggggctcatctacgaggagacccgcggcgtgctcaagatcttcctcgagaacgtcatccgcgacgccgtcacctacaccgagcacgcgcgccgcaagaccgtcaccgccatggatgtcgtctacgcgctcaagcgccagggccgcaccctctacggcttcggaggctaggcgcctcttcgtagctggggaatgcttagggtgatacgtctctgtcgctgtgggtcgtagtgttgctgcgttcctggatgtaatccattttttttttctgcaatgaagagatgctggcaagcatactacctgcatatgttgcgcctgggtgattgttctccttagaaatggtagtaacagtgaatcttgttcacg

SEQ ID NO: 32201 - protein, 138 aa, Zea mays subsp. mays
  peptide (1)..(138): Ceres Seq. ID no. 12400808
EKSSPPAPQHQSPIIWPPSERGERPVRGGGDVGARQRRQGSGQGWSQAPPEGAPRQHPGHHQAGDPEAGSEGRREAHLGAHLRGDPRRAQDLPRERHPRRRHLHRARAPQDRHRHGCRLRAQAPGPHPLRLRRLGASS

SEQ ID NO: 32202 - protein, 133 aa, Zea mays subsp. mays
  peptide (1)..(133): Ceres Seq. ID no. 12400809
  misc_feature (31)..(133): NCBI GI NO: 15226944 NR Description: histone H4; protein id: At2g28740
  misc_feature (31)..(133): NCBI GI NO: 462243 NR Description: Histone H4
  misc_feature (31)..(133): NCBI GI NO: 1806283 NR Description: Histone H4 homologue [Sesbania rostrata]
  misc_feature (31)..(133): NCBI GI NO: 4504301 NR Description: H4 histone family, member A [Homo sapiens]
  misc_feature (31)..(133): NCBI GI NO: 27692935 NR Description: Similar to germinal histone H4 gene [Mus musculus]
  misc_feature (31)..(133): NCBI GI NO: 27692960 NR Description: Similar to germinal histone H4 gene [Mus musculus]
  misc_feature (31)..(133): NCBI GI NO: 34858262 NR Description: similar to germinal histone H4 gene
  misc_feature (31)..(133): NCBI GI NO: 34876368 NR Description: similar to germinal histone H4 gene
  misc_feature (31)..(133): NCBI GI NO: 37590121 NR Description: Hist1h4h protein [Mus musculus]
  misc_feature (31)..(133): NCBI GI NO: 462242 NR Description: Histone H4
KNLLPQLPSTSPQLFGLRQRGEKDPFEAAAMSGRGNGGKGLGKGGAKRHRKVLRDNIQGITKPAIRRLARRGGVKRISGLIYEETRGVLKIFLENVIRDAVTYTEHARRKTVTAMDVVYALKRQGRTLYGFGG

SEQ ID NO: 32203 - protein, 103 aa, Zea mays subsp. mays
  peptide (1)..(103): Ceres Seq. ID no. 12400810
  misc_feature (1)..(103): NCBI GI NO: 15226944 NR Description: histone H4; protein id: At2g28740
  misc_feature (1)..(103): NCBI GI NO: 462243 NR Description: Histone H4
  misc_feature (1)..(103): NCBI GI NO: 1806283 NR Description: Histone H4 homologue [Sesbania rostrata]
  misc_feature (1)..(103): NCBI GI NO: 4504301 NR Description: H4 histone family, member A [Homo sapiens]
  misc_feature (1)..(103): NCBI GI NO: 27692935 NR Description: Similar to germinal histone H4 gene [Mus musculus]
  misc_feature (1)..(103): NCBI GI NO: 27692960 NR Description: Similar to germinal histone H4 gene [Mus musculus]
  misc_feature (1)..(103): NCBI GI NO: 34858262 NR Description: similar to germinal histone H4 gene
  misc_feature (1)..(103): NCBI GI NO: 34876368 NR Description: similar to germinal histone H4 gene
  misc_feature (1)..(103): NCBI GI NO: 37590121 NR Description: Hist1h4h protein [Mus musculus]
  misc_feature (1)..(103): NCBI GI NO: 462242 NR Description: Histone H4
MSGRGNGGKGLGKGGAKRHRKVLRDNIQGITKPAIRRLARRGGVKRISGLIYEETRGVLKIFLENVIRDAVTYTEHARRKTVTAMDVVYALKRQGRTLYGFGG

SEQ ID NO: 32204 - DNA, 1630 bp, Zea mays subsp. mays
  misc_feature (1)..(1630): Ceres Seq. ID no. 13498060
  misc_feature (61)..(61): n is a, c, t, g, unknown, or other
  misc_feature (60)..(60): n is a, c, t, g, unknown, or other
aataatggccggcgcccaagaagctggcgacgccctggtcatcagccgtgcgcgcggcgnntgctggtgttcccgctgcccttccagggccacatcgacccgatgctgcacctggcgggcgtgctccacgcgcggggcctcgcggtgaccgtgctccacacgcgcttcaacgcgttggaccccgcgcggcacccggagttccagttcgtggccgtccccgacggcacgcccgccgacgtcgccgccatggggaggatcatcgacatcatcctggccatgaacgccgccatggaggcgtcgccggccgtcggggaggcgctgcgggcgtccgcggtcgcggggcaggacgggcggccccgcgcctcgtgcctcttcgtcgacgccaacctcctcgccgtgcacagggcggccagggcgctcggactgcccacgctggtgctgcgcaccgggagcgccgcctgcctcggctgcttcctggcctaccccatgctccacgaaaagggctatctgcctccgcaagagtcgcagctgtgcacgccggtgccggagctgccaccactccgagtgaaggacctgatctactcgaagcacagcgaccacgagctgatgcgcaaagtcctcgcccggggcagcgaaacagtgagagattgctccggcgtcgtcatcaacacagccgaggcactggaggcagccgagctagggaggctccgcgacgagctggtccacctcccggtggtgctcgccgccggcccactccacaagctctcctcctccaggggcgccgggagcagcttgctcgccccggaccacagctgcatcgagtggctggacgcgcagcggcccgggtcggtgctgtacgtgagcttcgggagcctggcggccatggactcgagcgagctccgggaggtggcatggggtctggcggagtgcggccaccccttcctatgggtcgtccggcccaacatggtacgaggctgcgacgtcgacagcgcgcggcagctgccggatggtttcgaggacgccgtcaagggcagaggcgtggtggtccgctgggccccgcagcaggaggtgctggcccaccgcgcagtgggtgggttctggagccactgcgggtggaactcgactctggaggcggtcagcgagggggtcccgatgatctgcaggccggacgccgtggaccagatgatgaacacgaggtacttgcaggacgtctggggcgtcggcttcgagctccaaggggagctggagagggggaagatcaaggacgcggttaggaagttgatgggtgagcgggagggagctgagatgagaagagcagcgcaagagctttgcgcgaaactagcaggctgcttggagagcactgggtcttctcaggttgccattgacaagttggttagctacattctgtctctgtgaatcttctgttctatggcgtatgtgtgttccgctgggttagcattggcagcagcttaacagctggtactcttatatggacaattattcctgtcaattatatgtagtgttctctttctctagctattttttaatttctctacacaccagcttctgatttcgttttaccgccttccatatcggagatattataaacctgactccctttcaagctctc

SEQ ID NO: 32205 - protein, 471 aa, Zea mays subsp. mays
  peptide (1)..(471): Ceres Seq. ID no. 13498061
  misc_feature (19)..(471): NCBI GI NO: 33146633 NR Description: putative UDP-glucosyltransferase
  misc_feature (19)..(462): NCBI GI NO: 34900678 NR Description: glucuronosyl transferase-like protein
  misc_feature (13)..(471): NCBI GI NO: 34897378 NR Description: putative UDP-glucosyltransferase
  misc_feature (10)..(471): NCBI GI NO: 34900682 NR Description: glucuronosyl transferase-like protein
  misc_feature (19)..(264): NCBI GI NO: 34900680 NR Description: contains ESTsAU095171
  misc_feature (295)..(471): NCBI GI NO: 34900680 NR Description: contains ESTsAU095171
  misc_feature (19)..(470): NCBI GI NO: 34395172 NR Description: putative UDP-glucosyltransferase
  misc_feature (13)..(471): NCBI GI NO: 34900662 NR Description: glucuronosyl transferase-like protein
  misc_feature (10)..(471): NCBI GI NO: 33146634 NR Description: putative UDP-glucosyltransferase
  misc_feature (17)..(467): NCBI GI NO: 18033228 NR Description: UDP-glucosyltransferase BX8 [Zea mays]
  misc_feature (20)..(20): Xaa is any aa, unknown or other
  misc_feature (21)..(21): Xaa is any aa, unknown or other
NNGRRPRSWRRPGHQPCARXXLVFPLPFQGHIDPMLHLAGVLHARGLAVTVLHTRFNALDPARHPEFQFVAVPDGTPADVAAMGRIIDIILAMNAAMEASPAVGEALRASAVAGQDGRPRASCLFVDANLLAVHRAARALGLPTLVLRTGSAACLGCFLAYPMLHEKGYLPPQESQLCTPVPELPPLRVKDLIYSKHSDHELMRKVLARGSETVRDCSGVVINTAEALEAAELGRLRDELVHLPVVLAAGPLHKLSSSRGAGSSLLAPDHSCIEWLDAQRPGSVLYVSFGSLAAMDSSELREVAWGLAECGHPFLWVVRPNMVRGCDVDSARQLPDGFEDAVKGRGVVVRWAPQQEVLAHRAVGGFWSHCGWNSTLEAVSEGVPMICRPDAVDQMMNTRYLQDVWGVGFELQGELERGKIKDAVRKLMGEREGAEMRRAAQELCAKLAGCLESTGSSQVAIDKLVSYILSL

SEQ ID NO: 32206 - protein, 437 aa, Zea mays subsp. mays
  peptide (1)..(437): Ceres Seq. ID no. 13498062
  misc_feature (1)..(437): NCBI GI NO: 33146633 NR Description: putative UDP-glucosyltransferase
  misc_feature (1)..(428): NCBI GI NO: 34900678 NR Description: glucuronosyl transferase-like protein
  misc_feature (1)..(437): NCBI GI NO: 34897378 NR Description: putative UDP-glucosyltransferase
  misc_feature (1)..(437): NCBI GI NO: 34900682 NR Description: glucuronosyl transferase-like protein
  misc_feature (1)..(230): NCBI GI NO: 34900680 NR Description: contains ESTsAU095171
  misc_feature (261)..(437): NCBI GI NO: 34900680 NR Description: contains ESTsAU095171
  misc_feature (1)..(436): NCBI GI NO: 34395172 NR Description: putative UDP-glucosyltransferase
  misc_feature (1)..(437): NCBI GI NO: 34900662 NR Description: glucuronosyl transferase-like protein
  misc_feature (1)..(437): NCBI GI NO: 33146634 NR Description: putative UDP-glucosyltransferase
  misc_feature (1)..(433): NCBI GI NO: 18033228 NR Description: UDP-glucosyltransferase BX8 [Zea mays]
MLHLAGVLHARGLAVTVLHTRFNALDPARHPEFQFVAVPDGTPADVAAMGRIIDIILAMNAAMEASPAVGEALRASAVAGQDGRPRASCLFVDANLLAVHRAARALGLPTLVLRTGSAACLGCFLAYPMLHEKGYLPPQESQLCTPVPELPPLRVKDLIYSKHSDHELMRKVLARGSETVRDCSGVVINTAEALEAAELGRLRDELVHLPVVLAAGPLHKLSSSRGAGSSLLAPDHSCIEWLDAQRPGSVLYVSFGSLAAMDSSELREVAWGLAECGHPFLWVVRPNMVRGCDVDSARQLPDGFEDAVKGRGVVVRWAPQQEVLAHRAVGGFWSHCGWNSTLEAVSEGVPMICRPDAVDQMMNTRYLQDVWGVGFELQGELERGKIKDAVRKLMGEREGAEMRRAAQELCAKLAGCLESTGSSQVAIDKLVSYILSL

SEQ ID NO: 32207 - protein, 389 aa, Zea mays subsp. mays
  peptide (1)..(389): Ceres Seq. ID no. 13498063
  misc_feature (1)..(389): NCBI GI NO: 33146633 NR Description: putative UDP-glucosyltransferase
  misc_feature (1)..(380): NCBI GI NO: 34900678 NR Description: glucuronosyl transferase-like protein
  misc_feature (1)..(389): NCBI GI NO: 34897378 NR Description: putative UDP-glucosyltransferase
  misc_feature (1)..(389): NCBI GI NO: 34900682 NR Description: glucuronosyl transferase-like protein
  misc_feature (1)..(182): NCBI GI NO: 34900680 NR Description: contains ESTsAU095171
  misc_feature (213)..(389): NCBI GI NO: 34900680 NR Description: contains ESTsAU095171
  misc_feature (1)..(388): NCBI GI NO: 34395172 NR Description: putative UDP-glucosyltransferase
  misc_feature (1)..(389): NCBI GI NO: 34900662 NR Description: glucuronosyl transferase-like protein
  misc_feature (1)..(389): NCBI GI NO: 33146634 NR Description: putative UDP-glucosyltransferase
  misc_feature (1)..(385): NCBI GI NO: 18033228 NR Description: UDP-glucosyltransferase BX8 [Zea mays]
MGRIIDIILAMNAAMEASPAVGEALRASAVAGQDGRPRASCLFVDANLLAVHRAARALGLPTLVLRTGSAACLGCFLAYPMLHEKGYLPPQESQLCTPVPELPPLRVKDLIYSKHSDHELMRKVLARGSETVRDCSGVVINTAEALEAAELGRLRDELVHLPVVLAAGPLHKLSSSRGAGSSLLAPDHSCIEWLDAQRPGSVLYVSFGSLAAMDSSELREVAWGLAECGHPFLWVVRPNMVRGCDVDSARQLPDGFEDAVKGRGVVVRWAPQQEVLAHRAVGGFWSHCGWNSTLEAVSEGVPMICRPDAVDQMMNTRYLQDVWGVGFELQGELERGKIKDAVRKLMGEREGAEMRRAAQELCAKLAGCLESTGSSQVAIDKLVSYILSL

SEQ ID NO: 32208 - DNA, 1311 bp, Zea mays subsp. mays
  misc_feature (1)..(1311): Ceres Seq. ID no. 12400884
actggataattcgctcgctccgctcgatgcccgcttgtttgcggtgaagcctccggcgaacagccgtagcggaaacgccgcccgagatgtctgctccctccgccccaccccgcacggtgatctgtgtgggcgacgtccacggctacatcacgaagctggagagcctctggtccaacctccaggctgcactccccgccgacgccttcgccaccgcgctggtcatcttcctcggcgactacaacgatcgcggcccgcacacccgcagggtcctcgacttcctcctcgcgctcccgacgcgctaccccgcgcagcgccacgtcttcctctgcggcaaccacgacctcgccttcgcggcgttcgtcggggcgctgccgccgccgcccgacggctccccgttctcggccacctgggacgagtacatccacaacgaggagcacgaggggtggttccgcgggccgggattcgagggcatgcacgtgcaggggaggcggtggggcggggtcatcaaggagaggtggaaccccaagaaggggctcccgtacaagggctccatctacgacgcgcagcccaccttcgaatcctatggcgtcgcccatggttcccctgatcttgcaaaggctgtgccagaggagcacaagaggtttctgcatgatttggtttggatacatgaagaggaaaatgtgccaattgatatggatggaggacaaatcatctgcaatctgattgctgtccatgctggcctagagaggactatagatttgaatgagcaacttagagttttaagaactagagacacaagggtgccaaaggttcaaatgcttagtgggaggcaagatgtttgggacacacccaagggtctggccggcaagcagactattattgtaagtggccaccacgggaagctccacatcgacggcctccgatttataatcgacgaaggtggtggttatgaagacaaacctattgctgcaatagtttttccttcaaagacattgatcagaagtaccgaggaagcgggaaccacatcagagaggtgatctagagttctagacatcatcaggagcagtgaacacggaggcacagttttctctctctcttgaagttactgcttgtagtcatgtactcatgtcaaacgacaataggaagttaggaacaacgtccaaaggcaataagttggtgaaccggacctgcgttttctcattttagtcactaatgactatatgtctatatatattgtaccttgatgctgtcaatttagacgagaccgtacatcctcttttttagggcaataaactttactccctgtcctct

SEQ ID NO: 32209 - protein, 316 aa, Zea mays subsp. mays
  peptide (1)..(316): Ceres Seq. ID no. 12400885
  misc_feature (9)..(273): Pfam Name: Pfam Description:  Calcineurin-like phosphoesterase
  misc_feature (1)..(316): NCBI GI NO: 38347604 NR Description: OSJNBa0042I15.17
  misc_feature (8)..(308): NCBI GI NO: 18398699 NR Description: expressed protein; protein id: At3g09970
  misc_feature (8)..(308): NCBI GI NO: 21618122 NR Description: unknown [Arabidopsis thaliana]
  misc_feature (8)..(308): NCBI GI NO: 6143880 NR Description: unknown protein [Arabidopsis thaliana]
  misc_feature (8)..(308): NCBI GI NO: 18398696 NR Description: expressed protein; protein id: At3g09960
  misc_feature (162)..(308): NCBI GI NO: 19424085 NR Description: unknown protein [Arabidopsis thaliana]
  misc_feature (14)..(101): NCBI GI NO: 13475753 NR Description: serine/threonine protein phosphatase
MSAPSAPPRTVICVGDVHGYITKLESLWSNLQAALPADAFATALVIFLGDYNDRGPHTRRVLDFLLALPTRYPAQRHVFLCGNHDLAFAAFVGALPPPPDGSPFSATWDEYIHNEEHEGWFRGPGFEGMHVQGRRWGGVIKERWNPKKGLPYKGSIYDAQPTFESYGVAHGSPDLAKAVPEEHKRFLHDLVWIHEEENVPIDMDGGQIICNLIAVHAGLERTIDLNEQLRVLRTRDTRVPKVQMLSGRQDVWDTPKGLAGKQTIIVSGHHGKLHIDGLRFIIDEGGGYEDKPIAAIVFPSKTLIRSTEEAGTTSER

SEQ ID NO: 32210 - protein, 201 aa, Zea mays subsp. mays
  peptide (1)..(201): Ceres Seq. ID no. 12400886
LDNSLAPLDARLFAVKPPANSRSGNAARDVCSLRPTPHGDLCGRRPRLHHEAGEPLVQPPGCTPRRRLRHRAGHLPRRLQRSRPAHPQGPRLPPRAPDALPRAAPRLPLRQPRPRLRGVRRGAAAAARRLPVLGHLGRVHPQRGARGVVPRAGIRGHARAGEAVGRGHQGEVEPQEGAPVQGLHLRRAAHLRILWRRPWFP

SEQ ID NO: 32211 - protein, 188 aa, Zea mays subsp. mays
  peptide (1)..(188): Ceres Seq. ID no. 12400887
  misc_feature (1)..(145): Pfam Name: Pfam Description:  Calcineurin-like phosphoesterase
  misc_feature (1)..(188): NCBI GI NO: 38347604 NR Description: OSJNBa0042I15.17
  misc_feature (1)..(180): NCBI GI NO: 18398699 NR Description: expressed protein; protein id: At3g09970
  misc_feature (1)..(180): NCBI GI NO: 21618122 NR Description: unknown [Arabidopsis thaliana]
  misc_feature (1)..(180): NCBI GI NO: 6143880 NR Description: unknown protein [Arabidopsis thaliana]
  misc_feature (1)..(180): NCBI GI NO: 18398696 NR Description: expressed protein; protein id: At3g09960
  misc_feature (34)..(180): NCBI GI NO: 19424085 NR Description: unknown protein [Arabidopsis thaliana]
MHVQGRRWGGVIKERWNPKKGLPYKGSIYDAQPTFESYGVAHGSPDLAKAVPEEHKRFLHDLVWIHEEENVPIDMDGGQIICNLIAVHAGLERTIDLNEQLRVLRTRDTRVPKVQMLSGRQDVWDTPKGLAGKQTIIVSGHHGKLHIDGLRFIIDEGGGYEDKPIAAIVFPSKTLIRSTEEAGTTSER

SEQ ID NO: 32212 - DNA, 1072 bp, Zea mays subsp. mays
  misc_feature (1)..(1072): Ceres Seq. ID no. 12340576
acgtgccgtcgccacaatttaagcacggcttcctccgccacgacctccacacatcaccagcgcacagctctcctcatcggcgcacccgagctcgccctctccttcctcatcgaggcccgagtcctgctctgatggcgaccgacgtggctgagactcccgcgccgttggtggatgcggcccctgaggcgcccgcggacaccccggcggcgcctgctgttgacgcgaagccggccaaggccaagaaggccacagcgccgaagaagcgcgccagcccgacccatccgccgtacgccgagatggtctcggaggcgatcgcgtcgctcaaggagaggacggggtccagcagctttgctattgccaagttcttggaggacaagcacaaggacaagctcccgcccaacttccgcaagcttctgaacgttcagctcaagaagctcgtcgccggcggcaagctgaccaaggtgaagaactcgtacaagctgtcgtccgccaccaagccaaaggccgccccgaagaagaccaagaccggcgtgaagaagcccaaggccgctgccaaaccgaaggccaagtcccccgcgaagcccaagcccgccacaaagcccaaggcggccgcgaagcccgcttccaagcccgaaagcagcagcaaaacccaaggcaccagccaagcccaaggccaagcctgctgccaaggcgaagcccaaggctgccggcgctaagccgaagccagctgccaagaaggccggccgccccgccaaggcggccaagacgtcggccaaggccacgccaggaaagaaggcgccggtggccaagaagcccgcggccgccgcgaagaaggcgccggtagccaagaaggccgctccggcgaagaaggcggctgcccctgcccgaaaagcgccgtctcggaaggcgaagaagtagaggaggggtaggcgtcggagaaatgtagggtttggttctcgtattacgctagatgtttgctctccctttagcctaggtggtgtctgtgtgtgcaatgttgtaaatttgatatcggatgctgggaacactaagtcaatctttcagtagctgttgt

SEQ ID NO: 32213 - protein, 237 aa, Zea mays subsp. mays
  peptide (1)..(237): Ceres Seq. ID no. 12340577
  misc_feature (92)..(162): Pfam Name: Pfam Description:  linker histone H1 and H5 family
  misc_feature (44)..(225): NCBI GI NO: 121950 NR Description: HISTONE H1
  misc_feature (44)..(233): NCBI GI NO: 34897182 NR Description: histone-like protein
  misc_feature (44)..(237): NCBI GI NO: 11558848 NR Description: histone H1 [Triticum aestivum]
  misc_feature (44)..(237): NCBI GI NO: 5230781 NR Description: histone H1 WH1A.1 [Triticum aestivum]
  misc_feature (44)..(237): NCBI GI NO: 5230785 NR Description: histone H1 WH1B.1 [Triticum aestivum]
  misc_feature (44)..(237): NCBI GI NO: 5230790 NR Description: histone H1 WH1A.4 [Triticum aestivum]
  misc_feature (44)..(237): NCBI GI NO: 5230783 NR Description: histone H1 WH1A.2 [Triticum aestivum]
  misc_feature (44)..(237): NCBI GI NO: 14916992 NR Description: HISTONE H1
  misc_feature (52)..(237): NCBI GI NO: 5230788 NR Description: histone H1 WH1A.3 [Triticum aestivum]
  misc_feature (44)..(237): NCBI GI NO: 283024 NR Description: histone H1 - wheat
VPSPQFKHGFLRHDLHTSPAHSSPHRRTRARPLLPHRGPSPALMATDVAETPAPLVDAAPEAPADTPAAPAVDAKPAKAKKATAPKKRASPTHPPYAEMVSEAIASLKERTGSSSFAIAKFLEDKHKDKLPPNFRKLLNVQLKKLVAGGKLTKVKNSYKLSSATKPKAAPKKTKTGVKKPKAAAKPKAKSPAKPKPATKPKAAAKPASKPESSSKTQGTSQAQGQACCQGEAQGCRR

SEQ ID NO: 32214 - protein, 194 aa, Zea mays subsp. mays
  peptide (1)..(194): Ceres Seq. ID no. 12340578
  misc_feature (49)..(119): Pfam Name: Pfam Description:  linker histone H1 and H5 family
  misc_feature (1)..(182): NCBI GI NO: 121950 NR Description: HISTONE H1
  misc_feature (1)..(190): NCBI GI NO: 34897182 NR Description: histone-like protein
  misc_feature (1)..(194): NCBI GI NO: 11558848 NR Description: histone H1 [Triticum aestivum]
  misc_feature (1)..(194): NCBI GI NO: 5230781 NR Description: histone H1 WH1A.1 [Triticum aestivum]
  misc_feature (1)..(194): NCBI GI NO: 5230785 NR Description: histone H1 WH1B.1 [Triticum aestivum]
  misc_feature (1)..(194): NCBI GI NO: 5230790 NR Description: histone H1 WH1A.4 [Triticum aestivum]
  misc_feature (1)..(194): NCBI GI NO: 5230783 NR Description: histone H1 WH1A.2 [Triticum aestivum]
  misc_feature (1)..(194): NCBI GI NO: 14916992 NR Description: HISTONE H1
  misc_feature (9)..(194): NCBI GI NO: 5230788 NR Description: histone H1 WH1A.3 [Triticum aestivum]
  misc_feature (1)..(194): NCBI GI NO: 283024 NR Description: histone H1 - wheat
MATDVAETPAPLVDAAPEAPADTPAAPAVDAKPAKAKKATAPKKRASPTHPPYAEMVSEAIASLKERTGSSSFAIAKFLEDKHKDKLPPNFRKLLNVQLKKLVAGGKLTKVKNSYKLSSATKPKAAPKKTKTGVKKPKAAAKPKAKSPAKPKPATKPKAAAKPASKPESSSKTQGTSQAQGQACCQGEAQGCRR

SEQ ID NO: 32215 - protein, 139 aa, Zea mays subsp. mays
  peptide (1)..(139): Ceres Seq. ID no. 12340579
  misc_feature (1)..(64): Pfam Name: Pfam Description:  linker histone H1 and H5 family
  misc_feature (1)..(127): NCBI GI NO: 121950 NR Description: HISTONE H1
  misc_feature (1)..(135): NCBI GI NO: 34897182 NR Description: histone-like protein
  misc_feature (1)..(139): NCBI GI NO: 11558848 NR Description: histone H1 [Triticum aestivum]
  misc_feature (1)..(139): NCBI GI NO: 5230781 NR Description: histone H1 WH1A.1 [Triticum aestivum]
  misc_feature (1)..(139): NCBI GI NO: 5230785 NR Description: histone H1 WH1B.1 [Triticum aestivum]
  misc_feature (1)..(139): NCBI GI NO: 5230790 NR Description: histone H1 WH1A.4 [Triticum aestivum]
  misc_feature (1)..(139): NCBI GI NO: 5230783 NR Description: histone H1 WH1A.2 [Triticum aestivum]
  misc_feature (1)..(139): NCBI GI NO: 14916992 NR Description: HISTONE H1
  misc_feature (1)..(139): NCBI GI NO: 5230788 NR Description: histone H1 WH1A.3 [Triticum aestivum]
  misc_feature (1)..(139): NCBI GI NO: 283024 NR Description: histone H1 - wheat
MVSEAIASLKERTGSSSFAIAKFLEDKHKDKLPPNFRKLLNVQLKKLVAGGKLTKVKNSYKLSSATKPKAAPKKTKTGVKKPKAAAKPKAKSPAKPKPATKPKAAAKPASKPESSSKTQGTSQAQGQACCQGEAQGCRR

SEQ ID NO: 32216 - DNA, 1245 bp, Zea mays subsp. mays
  misc_feature (1)..(1245): Ceres Seq. ID no. 12372214
attgattccagcgatttggccggggtcagtagctaacgttccatcccagaaaaccccatcttatcataggaagtctaccagttttgccaccaaggtcacaccatccaccacggccatggagtccggcgcagacgaggtggcgttcgagtccccggcacatttccgcatctacaagagcgggaggatcgagcgcctgaaccggcccccggtccttcccgccggcctcgacgaggccaccggtgtcacctcaaaggacgtcgtcctggacgccggcaccggcctttccgtacgcatctacctccccaagctccaggaaccatccaagaagctcccggtcctcgtctacttccacggcggcgcgttcctcctcgagtcggccggctctgccacgtaccacacctacgtcaacccactcgcagccgccgcgggcgtcctggtggtgtccgtggactaccgcctggcaccggagcacccggtcccggcggcctacgaggactcgtgggccgcgctccagtgggtgacgtcggcgcaggacgagtggatcgtcgagcacggcgacacggcgcggctcttcctcgccggcgacagcgccggcgcaaacatcgtgcacgacatgctgatgcgggcgtccggcgccggcgggccgcgcgtcgagggcgccatcctgctccacccgtggttcggcgggaacgcgcccatcgagggcgagccggagggtgccgcagcggccaccgctgggctctggacctacgcgtgcccgggcgcggtcggcggcgccgacgacccgaggatgaaccctctcgcgccgggcgcgccgccgctggagaggctcgggtgcgcgaggatgctggtgtgcgccgggaagaaggacgcgctctacgtgagggaccgcgcgtactatgaagccgtggcggccagcgcgtggcccggggacgtggcgtggctcgagtccgaaggagaggagcacgtcttcttcctcccgaagcccgagtgcgagaacgccaagctgctcatggaccgcgtcgtggccttcattgccggggcctgacttgctctcttgtggccttgttggcgcggcaccgcgcgacgcagcatcaggtcgccattgaagatttaagttgtggacttgtgggcaagtttctctcgctgaatattggtcttgtctaaatttttttctggtacaagtgtggtactgaagtcttgaaactgattttttaataagcaaactataagtccacattattc

SEQ ID NO: 32217 - protein, 348 aa, Zea mays subsp. mays
  peptide (1)..(348): Ceres Seq. ID no. 12372215
  misc_feature (98)..(155): Pfam Name: Pfam Description:  Carboxylesterase
  misc_feature (44)..(346): NCBI GI NO: 38344841 NR Description: OSJNBa0064H22.22
  misc_feature (45)..(347): NCBI GI NO: 18086341 NR Description: AT3g48690/T8P19_200 [Arabidopsis thaliana]
  misc_feature (45)..(347): NCBI GI NO: 15228425 NR Description: putative protein; protein id: At3g48690
  misc_feature (39)..(345): NCBI GI NO: 18401743 NR Description: expressed protein; protein id: At1g47480
  misc_feature (39)..(345): NCBI GI NO: 21536771 NR Description: unknown [Arabidopsis thaliana]
  misc_feature (45)..(347): NCBI GI NO: 15228426 NR Description: putative protein; protein id: At3g48700.1
  misc_feature (33)..(347): NCBI GI NO: 21537287 NR Description: putative esterase [Arabidopsis thaliana]
  misc_feature (33)..(347): NCBI GI NO: 18402731 NR Description: expressed protein; protein id: At1g49650
  misc_feature (46)..(345): NCBI GI NO: 15227669 NR Description: putative esterase; protein id: At2g03550.1
  misc_feature (46)..(345): NCBI GI NO: 28393060 NR Description: putative esterase [Arabidopsis thaliana]
LIPAIWPGSVANVPSQKTPSYHRKSTSFATKVTPSTTAMESGADEVAFESPAHFRIYKSGRIERLNRPPVLPAGLDEATGVTSKDVVLDAGTGLSVRIYLPKLQEPSKKLPVLVYFHGGAFLLESAGSATYHTYVNPLAAAAGVLVVSVDYRLAPEHPVPAAYEDSWAALQWVTSAQDEWIVEHGDTARLFLAGDSAGANIVHDMLMRASGAGGPRVEGAILLHPWFGGNAPIEGEPEGAAAATAGLWTYACPGAVGGADDPRMNPLAPGAPPLERLGCARMLVCAGKKDALYVRDRAYYEAVAASAWPGDVAWLESEGEEHVFFLPKPECENAKLLMDRVVAFIAGA

SEQ ID NO: 32218 - protein, 310 aa, Zea mays subsp. mays
  peptide (1)..(310): Ceres Seq. ID no. 12372216
  misc_feature (60)..(117): Pfam Name: Pfam Description:  Carboxylesterase
  misc_feature (6)..(308): NCBI GI NO: 38344841 NR Description: OSJNBa0064H22.22
  misc_feature (7)..(309): NCBI GI NO: 18086341 NR Description: AT3g48690/T8P19_200 [Arabidopsis thaliana]
  misc_feature (7)..(309): NCBI GI NO: 15228425 NR Description: putative protein; protein id: At3g48690
  misc_feature (1)..(307): NCBI GI NO: 18401743 NR Description: expressed protein; protein id: At1g47480
  misc_feature (1)..(307): NCBI GI NO: 21536771 NR Description: unknown [Arabidopsis thaliana]
  misc_feature (7)..(309): NCBI GI NO: 15228426 NR Description: putative protein; protein id: At3g48700.1
  misc_feature (1)..(309): NCBI GI NO: 21537287 NR Description: putative esterase [Arabidopsis thaliana]
  misc_feature (1)..(309): NCBI GI NO: 18402731 NR Description: expressed protein; protein id: At1g49650
  misc_feature (8)..(307): NCBI GI NO: 15227669 NR Description: putative esterase; protein id: At2g03550.1
  misc_feature (8)..(307): NCBI GI NO: 28393060 NR Description: putative esterase [Arabidopsis thaliana]
MESGADEVAFESPAHFRIYKSGRIERLNRPPVLPAGLDEATGVTSKDVVLDAGTGLSVRIYLPKLQEPSKKLPVLVYFHGGAFLLESAGSATYHTYVNPLAAAAGVLVVSVDYRLAPEHPVPAAYEDSWAALQWVTSAQDEWIVEHGDTARLFLAGDSAGANIVHDMLMRASGAGGPRVEGAILLHPWFGGNAPIEGEPEGAAAATAGLWTYACPGAVGGADDPRMNPLAPGAPPLERLGCARMLVCAGKKDALYVRDRAYYEAVAASAWPGDVAWLESEGEEHVFFLPKPECENAKLLMDRVVAFIAGA

SEQ ID NO: 32219 - DNA, 1049 bp, Zea mays subsp. mays; identical to SEQ ID NO: 31969
  misc_feature (1)..(1049): Ceres Seq. ID no. 12345528

SEQ ID NO: 32220 - protein, 192 aa, Zea mays subsp. mays; identical to SEQ ID NO: 31970
  peptide (1)..(192): Ceres Seq. ID no. 12345529
  misc_feature (54)..(185): Pfam Name: Pfam Description:  Tim17/Tim22/Tim23 family
  misc_feature (1)..(192): NCBI GI NO: 37536126 NR Description: putaive mitochondrial inner membrane protein
  misc_feature (1)..(189): NCBI GI NO: 34902184 NR Description: Putative mitochondrial inner membrane protein
  misc_feature (11)..(191): NCBI GI NO: 15218593 NR Description: inner mitochondrial membrane protein
  misc_feature (11)..(191): NCBI GI NO: 18394498 NR Description: inner mitochondrial membrane protein, putative
  misc_feature (11)..(191): NCBI GI NO: 13641346 NR Description: translocase of inner mitochondrial membrane TIM23
  misc_feature (1)..(191): NCBI GI NO: 15229350 NR Description: putative inner mitochondrial membrane protein
  misc_feature (8)..(99): NCBI GI NO: 38344267 NR Description: OSJNBa0005N02.5
  misc_feature (23)..(187): NCBI GI NO: 19075496 NR Description: putative mitochondrial import inner membranetranslocase subunit
  misc_feature (127)..(189): NCBI GI NO: 12039278 NR Description: putative inner mitochondrial membrane protein
  misc_feature (90)..(188): NCBI GI NO: 34394286 NR Description: hypothetical protein

SEQ ID NO: 32221 - protein, 187 aa, Zea mays subsp. mays; identical to SEQ ID NO: 31971
  peptide (1)..(187): Ceres Seq. ID no. 12345530
  misc_feature (49)..(180): Pfam Name: Pfam Description:  Tim17/Tim22/Tim23 family
  misc_feature (1)..(187): NCBI GI NO: 37536126 NR Description: putaive mitochondrial inner membrane protein
  misc_feature (1)..(184): NCBI GI NO: 34902184 NR Description: Putative mitochondrial inner membrane protein
  misc_feature (6)..(186): NCBI GI NO: 15218593 NR Description: inner mitochondrial membrane protein
  misc_feature (6)..(186): NCBI GI NO: 18394498 NR Description: inner mitochondrial membrane protein, putative
  misc_feature (6)..(186): NCBI GI NO: 13641346 NR Description: translocase of inner mitochondrial membrane TIM23
  misc_feature (1)..(186): NCBI GI NO: 15229350 NR Description: putative inner mitochondrial membrane protein
  misc_feature (3)..(94): NCBI GI NO: 38344267 NR Description: OSJNBa0005N02.5
  misc_feature (18)..(182): NCBI GI NO: 19075496 NR Description: putative mitochondrial import inner membranetranslocase subunit
  misc_feature (122)..(184): NCBI GI NO: 12039278 NR Description: putative inner mitochondrial membrane protein
  misc_feature (85)..(183): NCBI GI NO: 34394286 NR Description: hypothetical protein

SEQ ID NO: 32222 - protein, 177 aa, Zea mays subsp. mays; identical to SEQ ID NO: 31972
  peptide (1)..(177): Ceres Seq. ID no. 12345531
  misc_feature (21)..(121): Pfam Name: Pfam Description:  Mucin-like glycoprotein
  misc_feature (3)..(177): NCBI GI NO: 27375632 NR Description: blr0521 [Bradyrhizobium japonicum]
  misc_feature (9)..(177): NCBI GI NO: 188864 NR Description: mucin
  misc_feature (9)..(177): NCBI GI NO: 186396 NR Description: mucin

SEQ ID NO: 32223 - DNA, 1097 bp, Zea mays subsp. mays
  misc_feature (1)..(1097): Ceres Seq. ID no. 12400951
aatttcccattccatcctagggctcgcgagtcgcgtcccccaaagtgaatacagaaacctccagccccaggccaattcctcgaccgcatcgccacccaccccatctccatggctacctccgccctcgctgctctgtccgccaccgcggccgccgccggtaagcgcatcctcctgtcgcgccccgcctcctcctcctccctctccttcgcctcccgccgcctggccgccggggcacccctccgggggttccttggcgagccaatccgggccgtggcgtcgtcggcgtcggcggcccccgcggcggcggccaagaccatcgcggtcggggaccggctccctgacgcgacgctctcctacttcgacacgtcctcccccgacggcgagctgaagacggtgacggtccgcgacctcaccgcggggaagaaggtggtgctcttcgccgtgcccggcgcgttcacgcccacctgcacccagaagcacctcccggggttcgtggccaaggccggggagctccgcgccaagggcgtcgacaccgtggcctgcgtctccgtcaacgacgccttcgtgatgcgcgcgtggaaggagagtctggggatcggggacgaggtgctgctcctgtcggacggcaacggcgagctggcgcgcgccatgggcgtcgagctcgacctctccgacaagcccgtggggctcggcgtccggtcccgccgctacgcgctgctcgcggaggacggcgtggtcaaggtgatcaacctcgaggagggcggcgcgttcaccaacagcagcgccgaggacatgctcaacgcgctctgaactcgcgacgccatggttggttcgtctcttccggcaagagttggtttcttttccctgaaaataatcgtgacggcaacggtggcttgtgttactgccgccactgttgtgaccggcgctgttactagtgcactgcagagatgcaagtttcttgcgaacatggctttataggtctagcttcatgcaattgttgacgccctctgtttcatgacttgtcatggtatgcaactcttgtctgagaattgatcatctgcatagtaccactactatcacaggcgttctctattatt

SEQ ID NO: 32224 - protein, 233 aa, Zea mays subsp. mays
  peptide (1)..(233): Ceres Seq. ID no. 12400952
  misc_feature (72)..(230): Pfam Name: Pfam Description:  AhpC/TSA family
  misc_feature (4)..(233): NCBI GI NO: 5441879 NR Description: ESTs AU070372
  misc_feature (1)..(233): NCBI GI NO: 15231718 NR Description: peroxiredoxin - like protein; protein id:At3g52960
  misc_feature (1)..(233): NCBI GI NO: 15292893 NR Description: putative peroxiredoxin protein
  misc_feature (70)..(233): NCBI GI NO: 30841938 NR Description: thioredoxin peroxidase 1 [Lycopersicon esculentum]
  misc_feature (70)..(233): NCBI GI NO: 15218877 NR Description: type 2 peroxiredoxin, putative
  misc_feature (70)..(233): NCBI GI NO: 18654477 NR Description: thioredoxin peroxidase [Capsicum annuum]
  misc_feature (70)..(233): NCBI GI NO: 21593881 NR Description: type 2 peroxiredoxin, putative
  misc_feature (70)..(233): NCBI GI NO: 4928472 NR Description: type 2 peroxiredoxin
  misc_feature (70)..(233): NCBI GI NO: 19548660 NR Description: peroxiredoxin
  misc_feature (70)..(233): NCBI GI NO: 15218876 NR Description: type 2 peroxiredoxin, putative
MATSALAALSATAAAAGKRILLSRPASSSSLSFASRRLAAGAPLRGFLGEPIRAVASSASAAPAAAAKTIAVGDRLPDATLSYFDTSSPDGELKTVTVRDLTAGKKVVLFAVPGAFTPTCTQKHLPGFVAKAGELRAKGVDTVACVSVNDAFVMRAWKESLGIGDEVLLLSDGNGELARAMGVELDLSDKPVGLGVRSRRYALLAEDGVVKVINLEEGGAFTNSSAEDMLNAL

SEQ ID NO: 32225 - protein, 128 aa, Zea mays subsp. mays
  peptide (1)..(128): Ceres Seq. ID no. 12400953
  misc_feature (31)..(128): Pfam Name: Pfam Description:  Formin Homology 2 Domain
  misc_feature (31)..(128): NCBI GI NO: 6523547 NR Description: hydroxyproline-rich glycoprotein DZ-HRGP
  misc_feature (21)..(128): NCBI GI NO: 6523547 NR Description: hydroxyproline-rich glycoprotein DZ-HRGP
  misc_feature (13)..(128): NCBI GI NO: 23017082 NR Description: hypothetical protein [Thermobifida fusca]
  misc_feature (9)..(128): NCBI GI NO: 81286 NR Description: extensin - Volvox carteri (fragment)
  misc_feature (12)..(128): NCBI GI NO: 20138131 NR Description: Vegetative cell wall protein gp1 precursor
  misc_feature (11)..(128): NCBI GI NO: 6523547 NR Description: hydroxyproline-rich glycoprotein DZ-HRGP
  misc_feature (22)..(128): NCBI GI NO: 23017082 NR Description: hypothetical protein [Thermobifida fusca]
  misc_feature (31)..(128): NCBI GI NO: 14017929 NR Description: KIAA1856 protein [Homo sapiens]
  misc_feature (21)..(128): NCBI GI NO: 27375632 NR Description: blr0521 [Bradyrhizobium japonicum]
  misc_feature (5)..(128): NCBI GI NO: 7441829 NR Description: proline-rich cell wall protein - upland cotton
ISHSILGLASRVPQSEYRNLQPQANSSTASPPTPSPWLPPPSLLCPPPRPPPVSASSCRAPPPPPPSPSPPAAWPPGHPSGGSLASQSGPWRRRRRRPPRRRPRPSRSGTGSLTRRSPTSTRPPPTAS

SEQ ID NO: 32226 - DNA, 1187 bp, Zea mays subsp. mays
  misc_feature (1)..(1187): Ceres Seq. ID no. 12341028
agtctggtaccgccggcaaagcagtcgttttcgtcctcttccttgattaaaccttccgtacccatatccacctgctgctccgaccttccagtcttctccgtaggggcttcgctccatagatttcgccgcaaggggcaacggcacacccaccaactgacctgacccacgagggatccgcagatgaagatcattccggtcccttgcctggatgacaactatgcctacttaatcgtggacgagagcaccaagaaggcagcggccgttgaccctgtggaaccggagaaggttctcaaggcggccggcgaggtcggcgcctacgtcgactgcgttctcaccacccatcaccactgggatcatgctggtggcaatgagaagatgaggctgcaggtgccagggataaaggtatttggaggatccctggacaatgtgaaaggctgcactgatcaggtggagaatggaatgaagttgtcacttgggaaggacattgagatactatgcctacacacgccttgccacactaaaggtcatatcagctactatgttactagtaaggagggtgaagatccagcggtcttcaccggagataccttgttcattgctgggtgtgggaagttttttgagggttctgcagagcaaatgtatcagtcccttattgttacactgggttcgctgccaaagtcaacccgagtttactgtgggcatgagtacactgtgaagaacctaaaattcatgctgacactggagccagagaatgagaagacgaaacagaaactggaatgggctgaaaagcagcgcgaagcgaatcagccaacagtgccctcgactataggagatgagtttgagataaatactttcatgcgtgttgatctaccagaaatacaggcgaaattcagtgtcaactctccagttgaagcaatgatagaggtcaggaagaccaaggataattggagaggttgaggacacccatggccgccactagtctgttgaaccagcattccaaagtgaactaatgcagaaaccttgccctgtaggtgggaatgaggtttactgccgtgcaatgctttgagaaatgtgttgttgtgaaggagaagactcctacaataagctccgcgttaatgagtagtaacaatacgctccttgtaacttgtggtctgtttgccaataataatgtacgaactgtagtgcct

SEQ ID NO: 32227 - protein, 258 aa, Zea mays subsp. mays
  peptide (1)..(258): Ceres Seq. ID no. 12341029
  misc_feature (11)..(174): Pfam Name: Pfam Description:  Metallo-beta-lactamase superfamily
  misc_feature (1)..(258): NCBI GI NO: 15228389 NR Description: glyoxalase II
  misc_feature (1)..(258): NCBI GI NO: 2570342 NR Description: glyoxalase II cytoplasmic isozyme
  misc_feature (1)..(257): NCBI GI NO: 21729786 NR Description: hydroxyacyl glutathione hydrolase
  misc_feature (1)..(257): NCBI GI NO: 4885389 NR Description: hydroxyacyl glutathione hydrolase
  misc_feature (1)..(257): NCBI GI NO: 2494848 NR Description: Hydroxyacylglutathione hydrolase
  misc_feature (1)..(257): NCBI GI NO: 15375320 NR Description: hydroxyacyl glutathione hydrolase
  misc_feature (1)..(256): NCBI GI NO: 29841459 NR Description: similar to probable hydroxyacylglutathionehydrolase
  misc_feature (1)..(257): NCBI GI NO: 24667703 NR Description: CG4365-PC [Drosophila melanogaster]
  misc_feature (1)..(257): NCBI GI NO: 21356335 NR Description: CG4365-PA [Drosophila melanogaster]
  misc_feature (1)..(257): NCBI GI NO: 24667711 NR Description: CG4365-PB [Drosophila melanogaster]
MKIIPVPCLDDNYAYLIVDESTKKAAAVDPVEPEKVLKAAGEVGAYVDCVLTTHHHWDHAGGNEKMRLQVPGIKVFGGSLDNVKGCTDQVENGMKLSLGKDIEILCLHTPCHTKGHISYYVTSKEGEDPAVFTGDTLFIAGCGKFFEGSAEQMYQSLIVTLGSLPKSTRVYCGHEYTVKNLKFMLTLEPENEKTKQKLEWAEKQREANQPTVPSTIGDEFEINTFMRVDLPEIQAKFSVNSPVEAMIEVRKTKDNWRG

SEQ ID NO: 32228 - protein, 193 aa, Zea mays subsp. mays
  peptide (1)..(193): Ceres Seq. ID no. 12341030
  misc_feature (1)..(109): Pfam Name: Pfam Description:  Metallo-beta-lactamase superfamily
  misc_feature (1)..(193): NCBI GI NO: 15228389 NR Description: glyoxalase II
  misc_feature (1)..(193): NCBI GI NO: 2570342 NR Description: glyoxalase II cytoplasmic isozyme
  misc_feature (1)..(192): NCBI GI NO: 21729786 NR Description: hydroxyacyl glutathione hydrolase
  misc_feature (1)..(192): NCBI GI NO: 4885389 NR Description: hydroxyacyl glutathione hydrolase
  misc_feature (1)..(192): NCBI GI NO: 2494848 NR Description: Hydroxyacylglutathione hydrolase
  misc_feature (1)..(192): NCBI GI NO: 15375320 NR Description: hydroxyacyl glutathione hydrolase
  misc_feature (1)..(191): NCBI GI NO: 29841459 NR Description: similar to probable hydroxyacylglutathionehydrolase
  misc_feature (1)..(192): NCBI GI NO: 24667703 NR Description: CG4365-PC [Drosophila melanogaster]
  misc_feature (1)..(192): NCBI GI NO: 21356335 NR Description: CG4365-PA [Drosophila melanogaster]
  misc_feature (1)..(192): NCBI GI NO: 24667711 NR Description: CG4365-PB [Drosophila melanogaster]
MRLQVPGIKVFGGSLDNVKGCTDQVENGMKLSLGKDIEILCLHTPCHTKGHISYYVTSKEGEDPAVFTGDTLFIAGCGKFFEGSAEQMYQSLIVTLGSLPKSTRVYCGHEYTVKNLKFMLTLEPENEKTKQKLEWAEKQREANQPTVPSTIGDEFEINTFMRVDLPEIQAKFSVNSPVEAMIEVRKTKDNWRG

SEQ ID NO: 32229 - protein, 165 aa, Zea mays subsp. mays
  peptide (1)..(165): Ceres Seq. ID no. 12341031
  misc_feature (1)..(81): Pfam Name: Pfam Description:  Metallo-beta-lactamase superfamily
  misc_feature (1)..(165): NCBI GI NO: 15228389 NR Description: glyoxalase II
  misc_feature (1)..(165): NCBI GI NO: 2570342 NR Description: glyoxalase II cytoplasmic isozyme
  misc_feature (1)..(164): NCBI GI NO: 21729786 NR Description: hydroxyacyl glutathione hydrolase
  misc_feature (1)..(164): NCBI GI NO: 4885389 NR Description: hydroxyacyl glutathione hydrolase
  misc_feature (1)..(164): NCBI GI NO: 2494848 NR Description: Hydroxyacylglutathione hydrolase
  misc_feature (1)..(164): NCBI GI NO: 15375320 NR Description: hydroxyacyl glutathione hydrolase
  misc_feature (1)..(163): NCBI GI NO: 29841459 NR Description: similar to probable hydroxyacylglutathionehydrolase
  misc_feature (1)..(164): NCBI GI NO: 24667703 NR Description: CG4365-PC [Drosophila melanogaster]
  misc_feature (1)..(164): NCBI GI NO: 21356335 NR Description: CG4365-PA [Drosophila melanogaster]
  misc_feature (1)..(164): NCBI GI NO: 24667711 NR Description: CG4365-PB [Drosophila melanogaster]
MKLSLGKDIEILCLHTPCHTKGHISYYVTSKEGEDPAVFTGDTLFIAGCGKFFEGSAEQMYQSLIVTLGSLPKSTRVYCGHEYTVKNLKFMLTLEPENEKTKQKLEWAEKQREANQPTVPSTIGDEFEINTFMRVDLPEIQAKFSVNSPVEAMIEVRKTKDNWRG

SEQ ID NO: 32230 - DNA, 754 bp, Zea mays subsp. mays
  misc_feature (1)..(754): Ceres Seq. ID no. 13492727
atcgccccgcgaaccctagctcccgcaactgccgccgccactcccacgctcgcagccatgccgcccaagctcgacccgtcgcaggtggtggaggtgttcgtccgtgtgaccggcggcgaggtcggcgcagcgtcttcgctggcccccaagatcggcccgctcggtctttcccccaagaagatcggagaggacatcgccaaggagacggccaaggactggaagggcctccgcgtcaccgtcaagctcaccgtccagaaccggcaggccaaggtctccgtcgtcccctccgccgcggcgctcgtcatcaaggcgctcaaggagccagagagggaccgcaagaaggtcaagaacatcaagcacagcggcaacatcagcctcgacgacgtcatcgagatcgccaggaccatgaggcacaggtccatggccaaggaattggccggcaccgtcaaggagatcctcggtacctgcgtcagcgtcgggtgcaccgtcgacggcaaggaccccaaggacctgcagcaggagattgacgacggcgaggtggagatcccgtccgcttaagaaggattggtgtccaggactgtgttatctttgctgctgaagccattctctgcctagattttctcatatttatttgaggtgggggtggacgtggacgtggaactatggaagttatcacagcggagttttgcttagaaactttgtcatgctttaagtctgagacaatttctgtcaaattttatgaacattcctaggt

SEQ ID NO: 32231 - protein, 185 aa, Zea mays subsp. mays
  peptide (1)..(185): Ceres Seq. ID no. 13492728
  misc_feature (95)..(163): Pfam Name: Pfam Description:  Ribosomal protein L11, RNA binding domain
  misc_feature (20)..(185): NCBI GI NO: 38567975 NR Description: OSJNBa0093F12.16
  misc_feature (20)..(183): NCBI GI NO: 40287508 NR Description: 60S ribosomal protein L12 [Capsicum annuum]
  misc_feature (20)..(183): NCBI GI NO: 6094002 NR Description: 60S RIBOSOMAL PROTEIN L12
  misc_feature (20)..(183): NCBI GI NO: 15228098 NR Description: 60S ribosomal protein L12 (RPL12A)
  misc_feature (20)..(183): NCBI GI NO: 15231814 NR Description: 60S ribosomal protein L12 (RPL12B)
  misc_feature (20)..(184): NCBI GI NO: 15239409 NR Description: 60S ribosomal protein L12 (RPL12C)
  misc_feature (20)..(161): NCBI GI NO: 3986695 NR Description: ribosomal protein L12 [Cichorium intybus]
  misc_feature (20)..(183): NCBI GI NO: 19075397 NR Description: 60s ribosomal protein l12
  misc_feature (29)..(185): NCBI GI NO: 1710485 NR Description: 60S RIBOSOMAL PROTEIN L12
  misc_feature (20)..(185): NCBI GI NO: 27371046 NR Description: Similar to ribosomal protein L12 [Xenopus laevis]
IAPRTLAPATAAATPTLAAMPPKLDPSQVVEVFVRVTGGEVGAASSLAPKIGPLGLSPKKIGEDIAKETAKDWKGLRVTVKLTVQNRQAKVSVVPSAAALVIKALKEPERDRKKVKNIKHSGNISLDDVIEIARTMRHRSMAKELAGTVKEILGTCVSVGCTVDGKDPKDLQQEIDDGEVEIPSA

SEQ ID NO: 32232 - protein, 174 aa, Zea mays subsp. mays
  peptide (1)..(174): Ceres Seq. ID no. 13492729
RPANPSSRNCRRHSHARSHAAQARPVAGGGGVRPCDRRRGRRSVFAGPQDRPARSFPQEDRRGHRQGDGQGLEGPPRHRQAHRPEPAGQGLRRPLRRGARHQGAQGAREGPQEGQEHQAQRQHQPRRRHRDRQDHEAQVHGQGIGRHRQGDPRYLRQRRVHRRRQGPQGPAAGD

SEQ ID NO: 32233 - protein, 166 aa, Zea mays subsp. mays
  peptide (1)..(166): Ceres Seq. ID no. 13492730
  misc_feature (76)..(144): Pfam Name: Pfam Description:  Ribosomal protein L11, RNA binding domain
  misc_feature (1)..(166): NCBI GI NO: 38567975 NR Description: OSJNBa0093F12.16
  misc_feature (1)..(164): NCBI GI NO: 40287508 NR Description: 60S ribosomal protein L12 [Capsicum annuum]
  misc_feature (1)..(164): NCBI GI NO: 6094002 NR Description: 60S RIBOSOMAL PROTEIN L12
  misc_feature (1)..(164): NCBI GI NO: 15228098 NR Description: 60S ribosomal protein L12 (RPL12A)
  misc_feature (1)..(164): NCBI GI NO: 15231814 NR Description: 60S ribosomal protein L12 (RPL12B)
  misc_feature (1)..(165): NCBI GI NO: 15239409 NR Description: 60S ribosomal protein L12 (RPL12C)
  misc_feature (1)..(142): NCBI GI NO: 3986695 NR Description: ribosomal protein L12 [Cichorium intybus]
  misc_feature (1)..(164): NCBI GI NO: 19075397 NR Description: 60s ribosomal protein l12
  misc_feature (10)..(166): NCBI GI NO: 1710485 NR Description: 60S RIBOSOMAL PROTEIN L12
  misc_feature (1)..(166): NCBI GI NO: 27371046 NR Description: Similar to ribosomal protein L12 [Xenopus laevis]
MPPKLDPSQVVEVFVRVTGGEVGAASSLAPKIGPLGLSPKKIGEDIAKETAKDWKGLRVTVKLTVQNRQAKVSVVPSAAALVIKALKEPERDRKKVKNIKHSGNISLDDVIEIARTMRHRSMAKELAGTVKEILGTCVSVGCTVDGKDPKDLQQEIDDGEVEIPSA

SEQ ID NO: 32234 - DNA, 1020 bp, Zea mays subsp. mays
  misc_feature (1)..(1020): Ceres Seq. ID no. 12351061
  misc_feature (172)..(172): n is a, c, t, g, unknown, or other
gacacagccatcacacgcatactgcatacacaacacagagcatcagaaggagctacgatctgatcgacatggctgccgccaccatggctatcacctcccgcgcgctcgtcggcaagccggcggctggcacgagggacgtcttcggcgagggccgcatcaccatgcgcaagancgccgccaagcccaagccggcggcgtccggcagcccatggtacggtgccgaccgcgtcctgtacctgggcccgctgtccggctcgcccccgagctacctgaccggcgagttccccggcgactacgggtgggacaccgcggggctgtcggcggacccggagaccttcgccaagaaccgcgagctggaggtgatccactgccgctgggccatgctcggcgcgctcgggtgcgtgttcccggagctgctcgcccgcaacggcgtcaagttcggcgaggcggtgtggttcaaggcgggctcccagatcttcagcgagggcgggctggactacctcggcaacccgagcctggtccacgcgcagagcatcctggccatctgggcgtgccaggtggtgctcatgggcgccgtcgaggggtaccgcgtcgccggcggcccgctcggagaggtggtcgacccgctgtaccctggcggcagcttcgacccgctcgggctcgccgacgacccggaggcgttcgccgagctcaaggtgaaggagatcaagaacggccgcctcgccatgttctccatgttcggcttcttcgtgcaggctatcgtcaccggcaagggccccctcgagaacctcgccgaccacatcgccgaccccgtcaacaacaacgcctgggcttacgccaccaacttcgtccccggcaagtgagcgagggcatgatgcttgcatgcgtgtaccgtagacgtacgtattcctacgtactgcaggttgcaccagtatttgtgaagggagctttgggagccagagattgtaccgctagtgtatttgtatgcatgctgtggagctgaacaataaaatatgctgt

SEQ ID NO: 32235 - protein, 333 aa, Zea mays subsp. mays
  peptide (1)..(333): Ceres Seq. ID no. 12351062
  misc_feature (59)..(228): Pfam Name: Pfam Description:  HlyD family secretion protein
  misc_feature (57)..(57): Xaa is any aa, unknown or other
TQPSHAYCIHNTEHQKELRSDRHGCRHHGYHLPRARRQAGGWHEGRLRRGPHHHAQXRRQAQAGGVRQPMVRCRPRPVPGPAVRLAPELPDRRVPRRLRVGHRGAVGGPGDLRQEPRAGGDPLPLGHARRARVRVPGAARPQRRQVRRGGVVQGGLPDLQRGRAGLPRQPEPGPRAEHPGHLGVPGGAHGRRRGVPRRRRPARRGGRPAVPWRQLRPARARRRPGGVRRAQGEGDQERPPRHVLHVRLLRAGYRHRQGPPREPRRPHRRPRQQQRLGLRHQLRPRQVSEGMMLACVYRRRTYSYVLQVAPVFVKGALGARDCTASVFVCMLWS

SEQ ID NO: 32236 - protein, 286 aa, Zea mays subsp. mays
  peptide (1)..(286): Ceres Seq. ID no. 12351063
  misc_feature (87)..(253): Pfam Name: Pfam Description:  Chlorophyll A-B binding protein
  misc_feature (23)..(286): NCBI GI NO: 34912356 NR Description: putative chlorophyll a/b-binding protein 2
  misc_feature (23)..(286): NCBI GI NO: 34910682 NR Description: chlorophyll a/b binding protein
  misc_feature (23)..(286): NCBI GI NO: 543938 NR Description: Chlorophyll A-B binding protein 48
  misc_feature (23)..(286): NCBI GI NO: 115787 NR Description: Chlorophyll A-B binding protein 2
  misc_feature (23)..(286): NCBI GI NO: 7443224 NR Description: chlorophyll a/b-binding protein precursor kcdl895 -rice
  misc_feature (3)..(286): NCBI GI NO: 31753114 NR Description: Unknown (protein for IMAGE:5194336) [Homo sapiens]
  misc_feature (23)..(286): NCBI GI NO: 115786 NR Description: Chlorophyll A-B binding protein
  misc_feature (23)..(286): NCBI GI NO: 115815 NR Description: Chlorophyll A-B binding protein M9
  misc_feature (23)..(285): NCBI GI NO: 115771 NR Description: Chlorophyll A-B binding protein 1
  misc_feature (23)..(286): NCBI GI NO: 1657859 NR Description: chlorophyll a/b-binding protein WCAB precursor
  misc_feature (57)..(57): Xaa is any aa, unknown or other
HSHHTHTAYTTQSIRRSYDLIDMAAATMAITSRALVGKPAAGTRDVFGEGRITMRKXAAKPKPAASGSPWYGADRVLYLGPLSGSPPSYLTGEFPGDYGWDTAGLSADPETFAKNRELEVIHCRWAMLGALGCVFPELLARNGVKFGEAVWFKAGSQIFSEGGLDYLGNPSLVHAQSILAIWACQVVLMGAVEGYRVAGGPLGEVVDPLYPGGSFDPLGLADDPEAFAELKVKEIKNGRLAMFSMFGFFVQAIVTGKGPLENLADHIADPVNNNAWAYATNFVPGK

SEQ ID NO: 32237 - protein, 264 aa, Zea mays subsp. mays
  peptide (1)..(264): Ceres Seq. ID no. 12351064
  misc_feature (1)..(159): Pfam Name: Pfam Description:  HlyD family secretion protein
MVRCRPRPVPGPAVRLAPELPDRRVPRRLRVGHRGAVGGPGDLRQEPRAGGDPLPLGHARRARVRVPGAARPQRRQVRRGGVVQGGLPDLQRGRAGLPRQPEPGPRAEHPGHLGVPGGAHGRRRGVPRRRRPARRGGRPAVPWRQLRPARARRRPGGVRRAQGEGDQERPPRHVLHVRLLRAGYRHRQGPPREPRRPHRRPRQQQRLGLRHQLRPRQVSEGMMLACVYRRRTYSYVLQVAPVFVKGALGARDCTASVFVCMLWS

SEQ ID NO: 32238 - protein, 264 aa, Zea mays subsp. mays
  peptide (1)..(264): Ceres Seq. ID no. 12351065
  misc_feature (65)..(231): Pfam Name: Pfam Description:  Chlorophyll A-B binding protein
  misc_feature (1)..(264): NCBI GI NO: 34912356 NR Description: putative chlorophyll a/b-binding protein 2
  misc_feature (1)..(264): NCBI GI NO: 34910682 NR Description: chlorophyll a/b binding protein
  misc_feature (1)..(264): NCBI GI NO: 543938 NR Description: Chlorophyll A-B binding protein 48
  misc_feature (1)..(264): NCBI GI NO: 115787 NR Description: Chlorophyll A-B binding protein 2
  misc_feature (1)..(264): NCBI GI NO: 7443224 NR Description: chlorophyll a/b-binding protein precursor kcdl895 -rice
  misc_feature (1)..(264): NCBI GI NO: 31753114 NR Description: Unknown (protein for IMAGE:5194336) [Homo sapiens]
  misc_feature (1)..(264): NCBI GI NO: 115786 NR Description: Chlorophyll A-B binding protein
  misc_feature (1)..(264): NCBI GI NO: 115815 NR Description: Chlorophyll A-B binding protein M9
  misc_feature (1)..(263): NCBI GI NO: 115771 NR Description: Chlorophyll A-B binding protein 1
  misc_feature (1)..(264): NCBI GI NO: 1657859 NR Description: chlorophyll a/b-binding protein WCAB precursor
  misc_feature (35)..(35): Xaa is any aa, unknown or other
MAAATMAITSRALVGKPAAGTRDVFGEGRITMRKXAAKPKPAASGSPWYGADRVLYLGPLSGSPPSYLTGEFPGDYGWDTAGLSADPETFAKNRELEVIHCRWAMLGALGCVFPELLARNGVKFGEAVWFKAGSQIFSEGGLDYLGNPSLVHAQSILAIWACQVVLMGAVEGYRVAGGPLGEVVDPLYPGGSFDPLGLADDPEAFAELKVKEIKNGRLAMFSMFGFFVQAIVTGKGPLENLADHIADPVNNNAWAYATNFVPGK

SEQ ID NO: 32239 - DNA, 1233 bp, Zea mays subsp. mays
  misc_feature (1)..(1233): Ceres Seq. ID no. 12462338
aagctacacacacaggcagacaccgttccgcgggggaaaggtgcggacgcttgaatcctctccaactccggcaccgcattcgcacgcccgcgccgccccgaatcggagaggacagaggagtcatggacgcggcggcggcggctgcgagccccacgagcaagaggatcgcgctggtgacgggagggaacaagggcatcgggctcgagacgtgccggcagctggcgtccaggggcgtcagggtcgtcctgacggcgaggaacgaggcgaggggtttggaagcggtcgagcgcgtcaggtgcgcccgcggcgacgccgaggtttacttccaccagctcgatgtcaccgacccctgcagcgccgcccggctcgcggatttcgtcagggatcagttcggtaggctggacatcctgatcaacaatgcgggaatttcaggtgttcaccgtgatccagttttgtctgctgcggtcaaggataaggtcgatggcatggatgtaaatcagagagtcgaatggatgaaggaaaattcgaaagaaacatacgaggaggctgtacaatgtatgaaaacaaactattatggtgccaaacttgtcacagaggcactacttcctcttcttcagttatcctcctctggaaggattgtcaacgtatcgtcaggctttggactactgagaaatttcaacagcgaagaccttaggaaggagtttgaagacatcgacaatcttactgaaagtagactggaggaactgatggataagtttctagaggattttaaggccaacttagtagaggagcatgggtggccgacaggtggatcttcagcctacaaagtcgtcaaagcggcgctcaatgcgtacacgaggattcttgccaagaagtatcctacactgcgtatcaattgtttgacgcctggttatgtcaagaccgacatttctatgcacatgggggtactgacacttgaggaaggcgctcgcaaccccgtgaaggttgctctcttgcctgacgacggaccgactggtgcttattttgatctgaatggcgaggcgtcctttgtgtgatggtatttctcctttttcagcttcagaataaaagaaagagctatgaagtagttagtgccaatcagtattgtagttcgacttgaatacttaaactagcacgttgagcaaaccgtagagctcaacaccagggatttcctcgtcttctgtataatatctctggtgatgattgtatatttcc

SEQ ID NO: 32240 - protein, 350 aa, Zea mays subsp. mays
  peptide (1)..(350): Ceres Seq. ID no. 12462339
  misc_feature (44)..(350): NCBI GI NO: 38346767 NR Description: OSJNBa0081C01.18
  misc_feature (41)..(350): NCBI GI NO: 38346774 NR Description: OSJNBa0081C01.25
  misc_feature (50)..(350): NCBI GI NO: 38346768 NR Description: OSJNBa0081C01.19
  misc_feature (50)..(350): NCBI GI NO: 38346769 NR Description: OSJNBa0081C01.20
  misc_feature (49)..(350): NCBI GI NO: 38346772 NR Description: OSJNBa0081C01.23
  misc_feature (15)..(347): NCBI GI NO: 33146492 NR Description: carbonyl reductase -like protein
  misc_feature (52)..(349): NCBI GI NO: 15224100 NR Description: putative carbonyl reductase; protein id:At2g24190
  misc_feature (54)..(349): NCBI GI NO: 15233062 NR Description: putative protein; protein id: At3g61220
  misc_feature (53)..(341): NCBI GI NO: 34559416 NR Description: (-)-isopiperitenone reductase [Mentha x piperita]
  misc_feature (54)..(349): NCBI GI NO: 18378884 NR Description: carbonyl reductase, putative; protein id:At1g01800
ATHTGRHRSAGERCGRLNPLQLRHRIRTPAPPRIGEDRGVMDAAAAAASPTSKRIALVTGGNKGIGLETCRQLASRGVRVVLTARNEARGLEAVERVRCARGDAEVYFHQLDVTDPCSAARLADFVRDQFGRLDILINNAGISGVHRDPVLSAAVKDKVDGMDVNQRVEWMKENSKETYEEAVQCMKTNYYGAKLVTEALLPLLQLSSSGRIVNVSSGFGLLRNFNSEDLRKEFEDIDNLTESRLEELMDKFLEDFKANLVEEHGWPTGGSSAYKVVKAALNAYTRILAKKYPTLRINCLTPGYVKTDISMHMGVLTLEEGARNPVKVALLPDDGPTGAYFDLNGEASFV

SEQ ID NO: 32241 - protein, 310 aa, Zea mays subsp. mays
  peptide (1)..(310): Ceres Seq. ID no. 12462340
  misc_feature (4)..(310): NCBI GI NO: 38346767 NR Description: OSJNBa0081C01.18
  misc_feature (1)..(310): NCBI GI NO: 38346774 NR Description: OSJNBa0081C01.25
  misc_feature (10)..(310): NCBI GI NO: 38346768 NR Description: OSJNBa0081C01.19
  misc_feature (10)..(310): NCBI GI NO: 38346769 NR Description: OSJNBa0081C01.20
  misc_feature (9)..(310): NCBI GI NO: 38346772 NR Description: OSJNBa0081C01.23
  misc_feature (1)..(307): NCBI GI NO: 33146492 NR Description: carbonyl reductase -like protein
  misc_feature (12)..(309): NCBI GI NO: 15224100 NR Description: putative carbonyl reductase; protein id:At2g24190
  misc_feature (14)..(309): NCBI GI NO: 15233062 NR Description: putative protein; protein id: At3g61220
  misc_feature (13)..(301): NCBI GI NO: 34559416 NR Description: (-)-isopiperitenone reductase [Mentha x piperita]
  misc_feature (14)..(309): NCBI GI NO: 18378884 NR Description: carbonyl reductase, putative; protein id:At1g01800
MDAAAAAASPTSKRIALVTGGNKGIGLETCRQLASRGVRVVLTARNEARGLEAVERVRCARGDAEVYFHQLDVTDPCSAARLADFVRDQFGRLDILINNAGISGVHRDPVLSAAVKDKVDGMDVNQRVEWMKENSKETYEEAVQCMKTNYYGAKLVTEALLPLLQLSSSGRIVNVSSGFGLLRNFNSEDLRKEFEDIDNLTESRLEELMDKFLEDFKANLVEEHGWPTGGSSAYKVVKAALNAYTRILAKKYPTLRINCLTPGYVKTDISMHMGVLTLEEGARNPVKVALLPDDGPTGAYFDLNGEASFV

SEQ ID NO: 32242 - protein, 189 aa, Zea mays subsp. mays
  peptide (1)..(189): Ceres Seq. ID no. 12462341
  misc_feature (1)..(189): NCBI GI NO: 38346767 NR Description: OSJNBa0081C01.18
  misc_feature (1)..(189): NCBI GI NO: 38346774 NR Description: OSJNBa0081C01.25
  misc_feature (1)..(189): NCBI GI NO: 38346768 NR Description: OSJNBa0081C01.19
  misc_feature (1)..(189): NCBI GI NO: 38346769 NR Description: OSJNBa0081C01.20
  misc_feature (1)..(189): NCBI GI NO: 38346772 NR Description: OSJNBa0081C01.23
  misc_feature (1)..(186): NCBI GI NO: 33146492 NR Description: carbonyl reductase -like protein
  misc_feature (1)..(188): NCBI GI NO: 15224100 NR Description: putative carbonyl reductase; protein id:At2g24190
  misc_feature (1)..(188): NCBI GI NO: 15233062 NR Description: putative protein; protein id: At3g61220
  misc_feature (1)..(180): NCBI GI NO: 34559416 NR Description: (-)-isopiperitenone reductase [Mentha x piperita]
  misc_feature (1)..(188): NCBI GI NO: 18378884 NR Description: carbonyl reductase, putative; protein id:At1g01800
MDVNQRVEWMKENSKETYEEAVQCMKTNYYGAKLVTEALLPLLQLSSSGRIVNVSSGFGLLRNFNSEDLRKEFEDIDNLTESRLEELMDKFLEDFKANLVEEHGWPTGGSSAYKVVKAALNAYTRILAKKYPTLRINCLTPGYVKTDISMHMGVLTLEEGARNPVKVALLPDDGPTGAYFDLNGEASFV

SEQ ID NO: 32243 - DNA, 998 bp, Zea mays subsp. mays
  misc_feature (1)..(998): Ceres Seq. ID no. 12404088
acggggagaagtcgaacagcggccgcgcgcgggaagttgctcggaggcggcggcggatctcggaggcagcgacgcgcgggtggaggagctcagtgacagcgccagtgcctatcgagctagcgaatcgaggagattttccccactgtttctttcctgctgattccgatttcacgttgaaacaccggggggagaagaattgcgggcgaccataactcggcaagaagcggctccaaaaagggcatctacctttgccgattccggcaccgatggataccgcggcgtcggggaggttcgacaagctccagagctcgttcaagctctccatccagtgcctcctcacggcctgctcccgcgaggatgtcaatgacgctttctcgtccttcactgatgctgagaaggagcgtttgcaccggatgctcacccttgtgatgaagaatctgcatgccaacgtagtggatgagtttgacgacttctgccaagaaacacaggtggctgctgcccttgaaaagatagatgactttgttgaaaagcagaatcttgatgcattatcttcagagaagactactgttgaagaaatcgaagaaaaggtatcaagagcaaaaaaggatgaaattgaatatttgactggtttactgaaaaaggttgaagaaagtaacaatgctatgaaagctcgaattgacctcctaaagaaaggggaggatctaactgctgcaagagatgtcctcaataagatgacgcagtggaactctgcactcgtggagaacattaacccttgaatctgtgtgatgacgattcattggcgtcaaaggacatctttgtataggggtgtgttagattggatgacatgtgaatgtgattcatggatcagcctggatgttctgttatgattaagaactgctatgtatcgtgcaatagacacatcgtctgtacttttgatgttattatcaggtcccaaacttctttatatccaatatgttacaatatcattttggtgactc

SEQ ID NO: 32244 - protein, 169 aa, Zea mays subsp. mays
  peptide (1)..(169): Ceres Seq. ID no. 12404089
  misc_feature (4)..(167): NCBI GI NO: 34905298 NR Description: P0577B11.20
  misc_feature (2)..(165): NCBI GI NO: 18415295 NR Description: putative protein; protein id: At4g19350
  misc_feature (44)..(165): NCBI GI NO: 7487713 NR Description: hypothetical protein T5K18
MDTAASGRFDKLQSSFKLSIQCLLTACSREDVNDAFSSFTDAEKERLHRMLTLVMKNLHANVVDEFDDFCQETQVAAALEKIDDFVEKQNLDALSSEKTTVEEIEEKVSRAKKDEIEYLTGLLKKVEESNNAMKARIDLLKKGEDLTAARDVLNKMTQWNSALVENINP

SEQ ID NO: 32245 - protein, 120 aa, Zea mays subsp. mays
  peptide (1)..(120): Ceres Seq. ID no. 12404090
  misc_feature (1)..(118): NCBI GI NO: 34905298 NR Description: P0577B11.20
  misc_feature (1)..(116): NCBI GI NO: 18415295 NR Description: putative protein; protein id: At4g19350
  misc_feature (1)..(116): NCBI GI NO: 7487713 NR Description: hypothetical protein T5K18
MLTLVMKNLHANVVDEFDDFCQETQVAAALEKIDDFVEKQNLDALSSEKTTVEEIEEKVSRAKKDEIEYLTGLLKKVEESNNAMKARIDLLKKGEDLTAARDVLNKMTQWNSALVENINP

SEQ ID NO: 32246 - protein, 115 aa, Zea mays subsp. mays
  peptide (1)..(115): Ceres Seq. ID no. 12404091
  misc_feature (1)..(113): NCBI GI NO: 34905298 NR Description: P0577B11.20
  misc_feature (1)..(111): NCBI GI NO: 18415295 NR Description: putative protein; protein id: At4g19350
  misc_feature (1)..(111): NCBI GI NO: 7487713 NR Description: hypothetical protein T5K18
MKNLHANVVDEFDDFCQETQVAAALEKIDDFVEKQNLDALSSEKTTVEEIEEKVSRAKKDEIEYLTGLLKKVEESNNAMKARIDLLKKGEDLTAARDVLNKMTQWNSALVENINP

SEQ ID NO: 32247 - DNA, 1517 bp, Zea mays subsp. mays; identical to SEQ ID NO: 28139
  misc_feature (1)..(1517): Ceres Seq. ID no. 12404731

SEQ ID NO: 32248 - protein, 406 aa, Zea mays subsp. mays; identical to SEQ ID NO: 28140
  peptide (1)..(406): Ceres Seq. ID no. 12404732
  misc_feature (177)..(219): Pfam Name: Pfam Description:  LysM domain
  misc_feature (10)..(396): NCBI GI NO: 18395044 NR Description: expressed protein; protein id: At1g21880
  misc_feature (1)..(375): NCBI GI NO: 30699276 NR Description: expressed protein [Arabidopsis thaliana]
  misc_feature (10)..(314): NCBI GI NO: 30687570 NR Description: expressed protein [Arabidopsis thaliana]
  misc_feature (1)..(375): NCBI GI NO: 25406518 NR Description: unknown protein T5M16.22
  misc_feature (30)..(325): NCBI GI NO: 28207683 NR Description: Erwinia induced protein 1 [Solanum tuberosum]
  misc_feature (1)..(324): NCBI GI NO: 22758281 NR Description: Unknown protein
  misc_feature (1)..(330): NCBI GI NO: 18398317 NR Description: expressed protein; protein id: At2g17120
  misc_feature (1)..(330): NCBI GI NO: 21593990 NR Description: unknown [Arabidopsis thaliana]
  misc_feature (323)..(380): NCBI GI NO: 1084362 NR Description: extensin-like protein S3 - alfalfa
  misc_feature (187)..(385): NCBI GI NO: 13592175 NR Description: ppg3 [Leishmania major]

SEQ ID NO: 32249 - protein, 359 aa, Zea mays subsp. mays; identical to SEQ ID NO: 28141
  peptide (1)..(359): Ceres Seq. ID no. 12404733
  misc_feature (130)..(172): Pfam Name: Pfam Description:  LysM domain
  misc_feature (1)..(349): NCBI GI NO: 18395044 NR Description: expressed protein; protein id: At1g21880
  misc_feature (1)..(328): NCBI GI NO: 30699276 NR Description: expressed protein [Arabidopsis thaliana]
  misc_feature (1)..(267): NCBI GI NO: 30687570 NR Description: expressed protein [Arabidopsis thaliana]
  misc_feature (1)..(328): NCBI GI NO: 25406518 NR Description: unknown protein T5M16.22
  misc_feature (1)..(278): NCBI GI NO: 28207683 NR Description: Erwinia induced protein 1 [Solanum tuberosum]
  misc_feature (1)..(277): NCBI GI NO: 22758281 NR Description: Unknown protein
  misc_feature (1)..(283): NCBI GI NO: 18398317 NR Description: expressed protein; protein id: At2g17120
  misc_feature (1)..(283): NCBI GI NO: 21593990 NR Description: unknown [Arabidopsis thaliana]
  misc_feature (276)..(333): NCBI GI NO: 1084362 NR Description: extensin-like protein S3 - alfalfa
  misc_feature (140)..(338): NCBI GI NO: 13592175 NR Description: ppg3 [Leishmania major]

SEQ ID NO: 32250 - DNA, 882 bp, Zea mays subsp. mays
  misc_feature (1)..(882): Ceres Seq. ID no. 12595582
gaatctatcgcactcgtagtcgtagctcaagcatcagcggcaggagctctgggcagcgtgcgcacgtggggtacctagctcgctctgctagcctaccatggctgatcaccaccggggcgcgacgggaggtggcgggggctacggcgacctccagcgcgggggcggcatgcacggcgaggcgcagcagcagcagaagcagggcgccatgatgacggcgctcaaggccgcgacggccgcgaccttcggcgggtcgatgctggtgctgtccgggctgatcctggccggcaccgtgatcgcgctcacggtggccacccccgtgctggtgatcttcagcccggtgctggtgccagccgccatcgcgctggcgctcatggcggccgggttcgtcacctccggcggcctcggcgtcgctgcgctgtccgtgttctcctggatgtacaagtacctgacgggcaagcacccgccgggcgccgaccagctggaccacgccaaggcgaggctggcgtccaaggcccgcgacatcaaggatgcagcacagcaccgcatcgaccaggcgcaggggtcttgagagaagaaccacactcgagcggaccgcgcgcgcgtcctccttgaaccactgccggcgcggcggcatatggcccttaaaggcggtggctgctgctacgtacgctgccgtagagtctcggtcgccgcgatagctctagctagtcgtttatgtgttgtgctttgtgtgtgcatgcatgtgtctgggggcatgcagtgcagtgcagtactatatgctgtatgcgtctctctttgatcggagaggcggatgtacagcatgctcgatatgtctagtttggatgtcatgtttatgatgaggaataaaatgcaggtcaggtg

SEQ ID NO: 32251 - protein, 156 aa, Zea mays subsp. mays
  peptide (1)..(156): Ceres Seq. ID no. 12595583
  misc_feature (36)..(146): Pfam Name: Pfam Description:  Oleosin
  misc_feature (1)..(156): NCBI GI NO: 3334474 NR Description: OLEOSIN ZM-I
  misc_feature (11)..(156): NCBI GI NO: 82705 NR Description: lipid body-associated major protein L3 - maize
  misc_feature (1)..(156): NCBI GI NO: 3334280 NR Description: OLEOSIN 16 KD (OSE701)
  misc_feature (1)..(156): NCBI GI NO: 38346165 NR Description: OSJNBa0079A21.12
  misc_feature (2)..(156): NCBI GI NO: 1362168 NR Description: oleosin 2 - barley
  misc_feature (1)..(156): NCBI GI NO: 3334281 NR Description: Oleosin 16 kDa
  misc_feature (1)..(156): NCBI GI NO: 7442012 NR Description: oleosin isoform R16 - rice
  misc_feature (1)..(132): NCBI GI NO: 4096177 NR Description: early embryogenesis protein [Oryza sativa]
  misc_feature (26)..(156): NCBI GI NO: 8515912 NR Description: oleosin [Elaeis guineensis]
  misc_feature (24)..(147): NCBI GI NO: 2119749 NR Description: oleosin - almond
MADHHRGATGGGGGYGDLQRGGGMHGEAQQQQKQGAMMTALKAATAATFGGSMLVLSGLILAGTVIALTVATPVLVIFSPVLVPAAIALALMAAGFVTSGGLGVAALSVFSWMYKYLTGKHPPGADQLDHAKARLASKARDIKDAAQHRIDQAQGS

SEQ ID NO: 32252 - protein, 133 aa, Zea mays subsp. mays
  peptide (1)..(133): Ceres Seq. ID no. 12595584
  misc_feature (13)..(123): Pfam Name: Pfam Description:  Oleosin
  misc_feature (1)..(133): NCBI GI NO: 3334474 NR Description: OLEOSIN ZM-I
  misc_feature (1)..(133): NCBI GI NO: 82705 NR Description: lipid body-associated major protein L3 - maize
  misc_feature (1)..(133): NCBI GI NO: 3334280 NR Description: OLEOSIN 16 KD (OSE701)
  misc_feature (1)..(133): NCBI GI NO: 38346165 NR Description: OSJNBa0079A21.12
  misc_feature (1)..(133): NCBI GI NO: 1362168 NR Description: oleosin 2 - barley
  misc_feature (1)..(133): NCBI GI NO: 3334281 NR Description: Oleosin 16 kDa
  misc_feature (1)..(133): NCBI GI NO: 7442012 NR Description: oleosin isoform R16 - rice
  misc_feature (1)..(109): NCBI GI NO: 4096177 NR Description: early embryogenesis protein [Oryza sativa]
  misc_feature (3)..(133): NCBI GI NO: 8515912 NR Description: oleosin [Elaeis guineensis]
  misc_feature (1)..(124): NCBI GI NO: 2119749 NR Description: oleosin - almond
MHGEAQQQQKQGAMMTALKAATAATFGGSMLVLSGLILAGTVIALTVATPVLVIFSPVLVPAAIALALMAAGFVTSGGLGVAALSVFSWMYKYLTGKHPPGADQLDHAKARLASKARDIKDAAQHRIDQAQGS

SEQ ID NO: 32253 - protein, 120 aa, Zea mays subsp. mays
  peptide (1)..(120): Ceres Seq. ID no. 12595585
  misc_feature (1)..(110): Pfam Name: Pfam Description:  Oleosin
  misc_feature (1)..(120): NCBI GI NO: 3334474 NR Description: OLEOSIN ZM-I
  misc_feature (1)..(120): NCBI GI NO: 82705 NR Description: lipid body-associated major protein L3 - maize
  misc_feature (1)..(120): NCBI GI NO: 3334280 NR Description: OLEOSIN 16 KD (OSE701)
  misc_feature (1)..(120): NCBI GI NO: 38346165 NR Description: OSJNBa0079A21.12
  misc_feature (1)..(120): NCBI GI NO: 1362168 NR Description: oleosin 2 - barley
  misc_feature (1)..(120): NCBI GI NO: 3334281 NR Description: Oleosin 16 kDa
  misc_feature (1)..(120): NCBI GI NO: 7442012 NR Description: oleosin isoform R16 - rice
  misc_feature (1)..(96): NCBI GI NO: 4096177 NR Description: early embryogenesis protein [Oryza sativa]
  misc_feature (1)..(120): NCBI GI NO: 8515912 NR Description: oleosin [Elaeis guineensis]
  misc_feature (1)..(111): NCBI GI NO: 2119749 NR Description: oleosin - almond
MMTALKAATAATFGGSMLVLSGLILAGTVIALTVATPVLVIFSPVLVPAAIALALMAAGFVTSGGLGVAALSVFSWMYKYLTGKHPPGADQLDHAKARLASKARDIKDAAQHRIDQAQGS

SEQ ID NO: 32254 - DNA, 834 bp, Zea mays subsp. mays
  misc_feature (1)..(834): Ceres Seq. ID no. 12376239
agctttgaacctggttctcctgtcgctcttcgtgcgggcgtgcggcacaccaccagaagagcggccgagcggcgcagagaagagagaaccagccgagcggagcggctgcgcttccggagggaggaaggaggatggagaaggctctcaccaagctcggcagcttcacaatctcccgcaaggccaagcaggagctctccgccatcggtgacgacatctcccgtttttcgagcacggtggaggagaaggcaaaatgggtgttcgagaaactcaaagggcacaagaagtcgctccctgatctactgcgcgagcacaacctccctccaggtctcttccctcgtaacatcatctgctacgagtacgacgaatcgacctcgaagctggtggtgcacctgtccaagccctgcgaggtgagcttcaaggattcctccaccgtaaggtatgctcctcgtgtcaaggcgactctgtcccgaggcaagctttccggggttgaaggcatgaagaccaaggtggtggtatgggtgaaggtggccagcgtgagcatcgagagctacaagtctgacaagatatgcttcatcgccggtgtgaagaagctgagaccgaaggatgcttatgaggtccctcgtgaagccatctctgtcgaggagttctgagctcaactcaactccattggtttgcctacgtagtatcattcattcgtagcatttttcgggtcccatgtgatcggcgattgatgtgctgtgatttggtagctttgtactgatattggaagcatgtggatctgttctgcctggcagaagataacccgtgcatgttatctgacgtgacgagtccttc

SEQ ID NO: 32255 - protein, 172 aa, Zea mays subsp. mays
  peptide (1)..(172): Ceres Seq. ID no. 12376240
  misc_feature (32)..(169): Pfam Name: Pfam Description:  Protein of unknown function, DUF538
  misc_feature (1)..(169): NCBI GI NO: 18395537 NR Description: expressed protein; protein id: At2g03350
  misc_feature (1)..(169): NCBI GI NO: 21553803 NR Description: unknown [Arabidopsis thaliana]
  misc_feature (1)..(172): NCBI GI NO: 18398279 NR Description: expressed protein; protein id: At3g08890
  misc_feature (1)..(172): NCBI GI NO: 15240103 NR Description: putative protein; protein id: At5g37070.1
  misc_feature (1)..(172): NCBI GI NO: 34914210 NR Description: OSJNBb0049O23.18
  misc_feature (1)..(172): NCBI GI NO: 15241019 NR Description: putative protein; protein id: At5g01610
  misc_feature (1)..(172): NCBI GI NO: 40642817 NR Description: cp protein [Celosia cristata]
  misc_feature (1)..(172): NCBI GI NO: 28466909 NR Description: At5g01610 [Arabidopsis thaliana]
  misc_feature (50)..(163): NCBI GI NO: 18407279 NR Description: Expressed protein; protein id: At1g61667
  misc_feature (50)..(163): NCBI GI NO: 21553956 NR Description: unknown [Arabidopsis thaliana]
MEKALTKLGSFTISRKAKQELSAIGDDISRFSSTVEEKAKWVFEKLKGHKKSLPDLLREHNLPPGLFPRNIICYEYDESTSKLVVHLSKPCEVSFKDSSTVRYAPRVKATLSRGKLSGVEGMKTKVVVWVKVASVSIESYKSDKICFIAGVKKLRPKDAYEVPREAISVEEF

SEQ ID NO: 32256 - protein, 136 aa, Zea mays subsp. mays
  peptide (1)..(136): Ceres Seq. ID no. 12376241
SFEPGSPVALRAGVRHTTRRAAERRREERTSRAERLRFRREEGGWRRLSPSSAASQSPARPSRSSPPSVTTSPVFRARWRRRQNGCSRNSKGTRSRSLIYCASTTSLQVSSLVTSSATSTTNRPRSWWCTCPSPAR

SEQ ID NO: 32257 - DNA, 799 bp, Zea mays subsp. mays
  misc_feature (1)..(799): Ceres Seq. ID no. 13498294
acgcagggcgtagcaaatcaggtaggcgaaatcggagcagaggccagggacgcgccagcgcgagcgataaggcacactgacatggccgccacggcgtactccaccgcgctccccggcggggcgcgcctccccgctgccggagccgccgcaccgccctctgccctcctcctcccgcggcgtaataaactgtctccgctccctctccggctccaagatgcgccgaggctgtcgttgctccgggtgaaggcctcctccgacgactcctcggccgcgagcggggacgagctcatcgccgacttgaaagccaagtgggacgccgtcgagaacaagagcactgtcctcacctacgccggcggcgctgtcgtcgctctctggctgacgtccgtcatcgtcggcgccatcaactccgtgcctctgctccccaagatcatggagcttgtcggcctcggctacaccggatggttcgtctaccgctaccttctcttcaaggaaagcaggaaagagctcgccgacgacatcgagtcgctcaagaaaaaaattgctgggacagagtaaaacatgttgttctcgtgaaactttttttggacgattctttcgggaacacgttgcctcttgtctagactccagatcagtgctacatgtctttgcactttttttttttgttgcataccttatgtcctcgtctctctggagagctttgtacgacgatggagaacaacagtgtacgatcgaactggacgccatcctcggggattgttttcttaaaatgaaatagggtatgtatccgggttttcttttc

SEQ ID NO: 32258 - protein, 184 aa, Zea mays subsp. mays
  peptide (1)..(184): Ceres Seq. ID no. 13498295
  misc_feature (29)..(184): NCBI GI NO: 18411555 NR Description: expressed protein [Arabidopsis thaliana]
  misc_feature (29)..(184): NCBI GI NO: 687677 NR Description: unknown
  misc_feature (28)..(184): NCBI GI NO: 38175474 NR Description: unknown protein
  misc_feature (95)..(184): NCBI GI NO: 7485852 NR Description: hypothetical protein F20D10
  misc_feature (95)..(184): NCBI GI NO: 18420175 NR Description: expressed protein [Arabidopsis thaliana]
  misc_feature (83)..(183): NCBI GI NO: 18407178 NR Description: expressed protein [Arabidopsis thaliana]
  misc_feature (83)..(183): NCBI GI NO: 21555057 NR Description: unknown [Arabidopsis thaliana]
  misc_feature (48)..(183): NCBI GI NO: 34393236 NR Description: unknown protein
  misc_feature (61)..(181): NCBI GI NO: 18403896 NR Description: expressed protein [Arabidopsis thaliana]
  misc_feature (15)..(167): NCBI GI NO: 37536446 NR Description: hypothetical protein
TQGVANQVGEIGAEARDAPARAIRHTDMAATAYSTALPGGARLPAAGAAAPPSALLLPRRNKLSPLPLRLQDAPRLSLLRVKASSDDSSAASGDELIADLKAKWDAVENKSTVLTYAGGAVVALWLTSVIVGAINSVPLLPKIMELVGLGYTGWFVYRYLLFKESRKELADDIESLKKKIAGTE

SEQ ID NO: 32259 - protein, 157 aa, Zea mays subsp. mays
  peptide (1)..(157): Ceres Seq. ID no. 13498296
  misc_feature (2)..(157): NCBI GI NO: 18411555 NR Description: expressed protein [Arabidopsis thaliana]
  misc_feature (2)..(157): NCBI GI NO: 687677 NR Description: unknown
  misc_feature (1)..(157): NCBI GI NO: 38175474 NR Description: unknown protein
  misc_feature (68)..(157): NCBI GI NO: 7485852 NR Description: hypothetical protein F20D10
  misc_feature (68)..(157): NCBI GI NO: 18420175 NR Description: expressed protein [Arabidopsis thaliana]
  misc_feature (56)..(156): NCBI GI NO: 18407178 NR Description: expressed protein [Arabidopsis thaliana]
  misc_feature (56)..(156): NCBI GI NO: 21555057 NR Description: unknown [Arabidopsis thaliana]
  misc_feature (21)..(156): NCBI GI NO: 34393236 NR Description: unknown protein
  misc_feature (34)..(154): NCBI GI NO: 18403896 NR Description: expressed protein [Arabidopsis thaliana]
  misc_feature (1)..(140): NCBI GI NO: 37536446 NR Description: hypothetical protein
MAATAYSTALPGGARLPAAGAAAPPSALLLPRRNKLSPLPLRLQDAPRLSLLRVKASSDDSSAASGDELIADLKAKWDAVENKSTVLTYAGGAVVALWLTSVIVGAINSVPLLPKIMELVGLGYTGWFVYRYLLFKESRKELADDIESLKKKIAGTE

SEQ ID NO: 32260 - DNA, 1241 bp, Zea mays subsp. mays; identical to SEQ ID NO: 29041
  misc_feature (1)..(1241): Ceres Seq. ID no. 12344775

SEQ ID NO: 32261 - protein, 236 aa, Zea mays subsp. mays; identical to SEQ ID NO: 29042
  peptide (1)..(236): Ceres Seq. ID no. 12344776

SEQ ID NO: 32262 - protein, 222 aa, Zea mays subsp. mays; identical to SEQ ID NO: 29043
  peptide (1)..(222): Ceres Seq. ID no. 12344777
  misc_feature (1)..(222): NCBI GI NO: 34394571 NR Description: translocase inner membrane-like protein
  misc_feature (1)..(222): NCBI GI NO: 15217923 NR Description: mitochondrial inner membrane translocase component
  misc_feature (1)..(171): NCBI GI NO: 15228131 NR Description: putative protein translocase; protein id:At2g37410
  misc_feature (1)..(171): NCBI GI NO: 38678772 NR Description: mitochondrial inner membrane translocase TM17-2
  misc_feature (1)..(171): NCBI GI NO: 6103722 NR Description: TIM17 [Arabidopsis thaliana]
  misc_feature (5)..(162): NCBI GI NO: 5032181 NR Description: translocase of inner mitochondrial membrane 17 homolog B
  misc_feature (5)..(162): NCBI GI NO: 34933423 NR Description: similar to mitochondrial inner membrane translocasecomponent Tim17b
  misc_feature (5)..(162): NCBI GI NO: 33468937 NR Description: translocator of inner mitochondrial membrane b
  misc_feature (5)..(156): NCBI GI NO: 30923567 NR Description: CG40451-PA [Drosophila melanogaster]
  misc_feature (5)..(165): NCBI GI NO: 33468943 NR Description: translocator of inner mitochondrial membrane a

SEQ ID NO: 32263 - protein, 198 aa, Zea mays subsp. mays; identical to SEQ ID NO: 29044
  peptide (1)..(198): Ceres Seq. ID no. 12344778
  misc_feature (1)..(198): NCBI GI NO: 34394571 NR Description: translocase inner membrane-like protein
  misc_feature (1)..(198): NCBI GI NO: 15217923 NR Description: mitochondrial inner membrane translocase component
  misc_feature (1)..(147): NCBI GI NO: 15228131 NR Description: putative protein translocase; protein id:At2g37410
  misc_feature (1)..(147): NCBI GI NO: 38678772 NR Description: mitochondrial inner membrane translocase TM17-2
  misc_feature (1)..(147): NCBI GI NO: 6103722 NR Description: TIM17 [Arabidopsis thaliana]
  misc_feature (1)..(138): NCBI GI NO: 5032181 NR Description: translocase of inner mitochondrial membrane 17 homolog B
  misc_feature (1)..(138): NCBI GI NO: 34933423 NR Description: similar to mitochondrial inner membrane translocasecomponent Tim17b
  misc_feature (1)..(138): NCBI GI NO: 33468937 NR Description: translocator of inner mitochondrial membrane b
  misc_feature (1)..(132): NCBI GI NO: 30923567 NR Description: CG40451-PA [Drosophila melanogaster]
  misc_feature (1)..(141): NCBI GI NO: 33468943 NR Description: translocator of inner mitochondrial membrane a

SEQ ID NO: 32264 - DNA, 956 bp, Zea mays subsp. mays
  misc_feature (1)..(956): Ceres Seq. ID no. 12372548
cttcctcgccgcattgacctattcacttcctccataataactagtgctactaggtcccccacggccgaggaggaattagaaaacaaaattaaatctcaagtctagggcggagatgaatgttgcggaggaggaggtgagcatggagagggaggagaagggcggcaatgttcgcgatggcgaggtgaggacgacggcggcggcggcggcagctgtgagcctggagacgctgcggaagcggatggctgacttcgcgacggagcgggactgggagcagttccactcccccaggaacctccttctcgccctggtaggggaggtgggggagctgtctgagatattccaatggaaaggggaggtgcccaaggggctgccaggctgggacgatgccgagaaggagcacttgggcgaggagctcgccgacgtgctcctctatctggtgcgcctgtcggacatgtgcggcgtcgacctcggcaaggctgccctgcgcaagatggagatcaacgcccgcaaatacccagttggacagtgcaagggttcatccaagaagcacactcactacggctccactaacaatgttggcgacagcgacaaagctaatgccgcgaacaaggagcagcatagctgtggtgtctaaaatgactcggagctccttgaatggtaatttggatggtcgggcatgatctaggttacgtgtgctgatgaaacagggatgctctattttggtgggaaagggacaagttgcgtgggttcaagttcccctatatattagatggctaatgaaccaagtgttaaccacaaagcttcgtaggctgtagctcccctatgtctaatgtgtactggggcattctgattctgctggttcagttatgcagcttcatatgatgcgaaagcaaagctgactattgcagtagtactaatgagtactgacagtactttatgatgcaaaagctttctgt

SEQ ID NO: 32265 - protein, 173 aa, Zea mays subsp. mays
  peptide (1)..(173): Ceres Seq. ID no. 12372549
  misc_feature (34)..(136): NCBI GI NO: 30687841 NR Description: expressed protein [Arabidopsis thaliana]
  misc_feature (10)..(135): NCBI GI NO: 32482945 NR Description: OSJNBb0072M01.10
  misc_feature (35)..(149): NCBI GI NO: 33468615 NR Description: SI:zC150A22.2 (novel protein) [Danio rerio]
  misc_feature (1)..(159): NCBI GI NO: 13129100 NR Description: hypothetical protein MGC5627 [Homo sapiens]
  misc_feature (35)..(162): NCBI GI NO: 20302079 NR Description: RS21-C6 protein [Rattus norvegicus]
  misc_feature (35)..(147): NCBI GI NO: 12963573 NR Description: RIKEN cDNA 2410015N17 [Mus musculus]
  misc_feature (35)..(162): NCBI GI NO: 34864617 NR Description: similar to RS21-C6 protein [Rattus norvegicus]
  misc_feature (36)..(147): NCBI GI NO: 34877104 NR Description: similar to RS21-C6 protein [Rattus norvegicus]
  misc_feature (31)..(146): NCBI GI NO: 33593049 NR Description: conserved hypothetical protein
  misc_feature (46)..(135): NCBI GI NO: 34495748 NR Description: conserved hypothetical protein
MNVAEEEVSMEREEKGGNVRDGEVRTTAAAAAAVSLETLRKRMADFATERDWEQFHSPRNLLLALVGEVGELSEIFQWKGEVPKGLPGWDDAEKEHLGEELADVLLYLVRLSDMCGVDLGKAALRKMEINARKYPVGQCKGSSKKHTHYGSTNNVGDSDKANAANKEQHSCGV

SEQ ID NO: 32266 - protein, 164 aa, Zea mays subsp. mays
  peptide (1)..(164): Ceres Seq. ID no. 12372550
  misc_feature (25)..(127): NCBI GI NO: 30687841 NR Description: expressed protein [Arabidopsis thaliana]
  misc_feature (1)..(126): NCBI GI NO: 32482945 NR Description: OSJNBb0072M01.10
  misc_feature (26)..(140): NCBI GI NO: 33468615 NR Description: SI:zC150A22.2 (novel protein) [Danio rerio]
  misc_feature (1)..(150): NCBI GI NO: 13129100 NR Description: hypothetical protein MGC5627 [Homo sapiens]
  misc_feature (26)..(153): NCBI GI NO: 20302079 NR Description: RS21-C6 protein [Rattus norvegicus]
  misc_feature (26)..(138): NCBI GI NO: 12963573 NR Description: RIKEN cDNA 2410015N17 [Mus musculus]
  misc_feature (26)..(153): NCBI GI NO: 34864617 NR Description: similar to RS21-C6 protein [Rattus norvegicus]
  misc_feature (27)..(138): NCBI GI NO: 34877104 NR Description: similar to RS21-C6 protein [Rattus norvegicus]
  misc_feature (22)..(137): NCBI GI NO: 33593049 NR Description: conserved hypothetical protein
  misc_feature (37)..(126): NCBI GI NO: 34495748 NR Description: conserved hypothetical protein
MEREEKGGNVRDGEVRTTAAAAAAVSLETLRKRMADFATERDWEQFHSPRNLLLALVGEVGELSEIFQWKGEVPKGLPGWDDAEKEHLGEELADVLLYLVRLSDMCGVDLGKAALRKMEINARKYPVGQCKGSSKKHTHYGSTNNVGDSDKANAANKEQHSCGV

SEQ ID NO: 32267 - protein, 131 aa, Zea mays subsp. mays
  peptide (1)..(131): Ceres Seq. ID no. 12372551
  misc_feature (1)..(94): NCBI GI NO: 30687841 NR Description: expressed protein [Arabidopsis thaliana]
  misc_feature (1)..(93): NCBI GI NO: 32482945 NR Description: OSJNBb0072M01.10
  misc_feature (1)..(107): NCBI GI NO: 33468615 NR Description: SI:zC150A22.2 (novel protein) [Danio rerio]
  misc_feature (1)..(117): NCBI GI NO: 13129100 NR Description: hypothetical protein MGC5627 [Homo sapiens]
  misc_feature (1)..(120): NCBI GI NO: 20302079 NR Description: RS21-C6 protein [Rattus norvegicus]
  misc_feature (1)..(105): NCBI GI NO: 12963573 NR Description: RIKEN cDNA 2410015N17 [Mus musculus]
  misc_feature (1)..(120): NCBI GI NO: 34864617 NR Description: similar to RS21-C6 protein [Rattus norvegicus]
  misc_feature (1)..(105): NCBI GI NO: 34877104 NR Description: similar to RS21-C6 protein [Rattus norvegicus]
  misc_feature (1)..(104): NCBI GI NO: 33593049 NR Description: conserved hypothetical protein
  misc_feature (4)..(93): NCBI GI NO: 34495748 NR Description: conserved hypothetical protein
MADFATERDWEQFHSPRNLLLALVGEVGELSEIFQWKGEVPKGLPGWDDAEKEHLGEELADVLLYLVRLSDMCGVDLGKAALRKMEINARKYPVGQCKGSSKKHTHYGSTNNVGDSDKANAANKEQHSCGV

SEQ ID NO: 32268 - DNA, 907 bp, Zea mays subsp. mays
  misc_feature (1)..(907): Ceres Seq. ID no. 12404717
gcacgagaccattacctagaacatcctaatcgaaaaaaactcgtctcccgtctcctccgcgttcccgctttccacccgccgccgccgccgcccaccttaccgtcacctgctccttgcccagcatgtggggtagcaccgacggcggaacgccggaggtcaccctcgagacctccatgggcgctgtctctgttgagatgtactacaggcacgcgcccaagacttgccggaacttcgtcgagctcgcgcgacgtggctactacgacaacgttatcttccaccgcatcatcaaagatttcattgtgcaaggtggggatcctacaggaaccggcagaggtggcgagtccatctatggagcaaagtttgaggatgagataaagactgagttaaagcacactggggctggaattctgtccatggcaaacgctggcccaaacacgaatggaagccagttcttcataactcttgccccttgtcagtcacttgatgggaaacatacaatttttgggagggtatgcagaggaatggaaattgttaagcgccttggaagtgtgcagactgacaaaaatgataggcctatccatgaagtgaaaatcttgcgtgccgttgtcaaagactgaagcattatccagatgtaactccgagtgttggtttaggctttaataatggccatgttcatgtaagtggtacctttgcgaaaaggtgaaaagtgcagctagttccagcctatatgagtatggtctcaagatgtggctgacctgaaaccctacctgatgagtagattggaccttttgatcaagaaggtatttgaaacagtttatatgcgtgtgtggtttgagtttctctgcgaggtatttgaaacaaatagttccagactatgttcgcttcaatcttaaagtcagttgtttgg

SEQ ID NO: 32269 - protein, 164 aa, Zea mays subsp. mays
  peptide (1)..(164): Ceres Seq. ID no. 12404718
  misc_feature (1)..(164): NCBI GI NO: 15076665 NR Description: cyclophilin
  misc_feature (6)..(164): NCBI GI NO: 15227585 NR Description: cyclophilin-like protein; protein id: At2g36130
  misc_feature (6)..(164): NCBI GI NO: 21537220 NR Description: cyclophilin-like protein [Arabidopsis thaliana]
  misc_feature (12)..(163): NCBI GI NO: 17986117 NR Description: Cyclophilin-like CG13892-PA
  misc_feature (11)..(162): NCBI GI NO: 40740912 NR Description: hypothetical protein AN8680.2
  misc_feature (10)..(160): NCBI GI NO: 21312784 NR Description: peptidylprolyl isomerase-like 1 [Mus musculus]
  misc_feature (10)..(160): NCBI GI NO: 7706339 NR Description: peptidylprolyl isomerase-like 1
  misc_feature (10)..(164): NCBI GI NO: 17539496 NR Description: CYcloPhilin family CYP-12 (cyp-12)
  misc_feature (9)..(164): NCBI GI NO: 39593518 NR Description: Hypothetical protein CBG05777
  misc_feature (12)..(161): NCBI GI NO: 19114220 NR Description: cyclophilin-1; peptidyl-prolyl cis-trans isomerase
MWGSTDGGTPEVTLETSMGAVSVEMYYRHAPKTCRNFVELARRGYYDNVIFHRIIKDFIVQGGDPTGTGRGGESIYGAKFEDEIKTELKHTGAGILSMANAGPNTNGSQFFITLAPCQSLDGKHTIFGRVCRGMEIVKRLGSVQTDKNDRPIHEVKILRAVVKD

SEQ ID NO: 32270 - protein, 147 aa, Zea mays subsp. mays
  peptide (1)..(147): Ceres Seq. ID no. 12404719
  misc_feature (1)..(147): NCBI GI NO: 15076665 NR Description: cyclophilin
  misc_feature (1)..(147): NCBI GI NO: 15227585 NR Description: cyclophilin-like protein; protein id: At2g36130
  misc_feature (1)..(147): NCBI GI NO: 21537220 NR Description: cyclophilin-like protein [Arabidopsis thaliana]
  misc_feature (1)..(146): NCBI GI NO: 17986117 NR Description: Cyclophilin-like CG13892-PA
  misc_feature (1)..(145): NCBI GI NO: 40740912 NR Description: hypothetical protein AN8680.2
  misc_feature (1)..(143): NCBI GI NO: 21312784 NR Description: peptidylprolyl isomerase-like 1 [Mus musculus]
  misc_feature (1)..(143): NCBI GI NO: 7706339 NR Description: peptidylprolyl isomerase-like 1
  misc_feature (1)..(147): NCBI GI NO: 17539496 NR Description: CYcloPhilin family CYP-12 (cyp-12)
  misc_feature (1)..(147): NCBI GI NO: 39593518 NR Description: Hypothetical protein CBG05777
  misc_feature (1)..(144): NCBI GI NO: 19114220 NR Description: cyclophilin-1; peptidyl-prolyl cis-trans isomerase
MGAVSVEMYYRHAPKTCRNFVELARRGYYDNVIFHRIIKDFIVQGGDPTGTGRGGESIYGAKFEDEIKTELKHTGAGILSMANAGPNTNGSQFFITLAPCQSLDGKHTIFGRVCRGMEIVKRLGSVQTDKNDRPIHEVKILRAVVKD

SEQ ID NO: 32271 - protein, 140 aa, Zea mays subsp. mays
  peptide (1)..(140): Ceres Seq. ID no. 12404720
  misc_feature (1)..(140): NCBI GI NO: 15076665 NR Description: cyclophilin
  misc_feature (1)..(140): NCBI GI NO: 15227585 NR Description: cyclophilin-like protein; protein id: At2g36130
  misc_feature (1)..(140): NCBI GI NO: 21537220 NR Description: cyclophilin-like protein [Arabidopsis thaliana]
  misc_feature (1)..(139): NCBI GI NO: 17986117 NR Description: Cyclophilin-like CG13892-PA
  misc_feature (1)..(138): NCBI GI NO: 40740912 NR Description: hypothetical protein AN8680.2
  misc_feature (1)..(136): NCBI GI NO: 21312784 NR Description: peptidylprolyl isomerase-like 1 [Mus musculus]
  misc_feature (1)..(136): NCBI GI NO: 7706339 NR Description: peptidylprolyl isomerase-like 1
  misc_feature (1)..(140): NCBI GI NO: 17539496 NR Description: CYcloPhilin family CYP-12 (cyp-12)
  misc_feature (1)..(140): NCBI GI NO: 39593518 NR Description: Hypothetical protein CBG05777
  misc_feature (1)..(137): NCBI GI NO: 19114220 NR Description: cyclophilin-1; peptidyl-prolyl cis-trans isomerase
MYYRHAPKTCRNFVELARRGYYDNVIFHRIIKDFIVQGGDPTGTGRGGESIYGAKFEDEIKTELKHTGAGILSMANAGPNTNGSQFFITLAPCQSLDGKHTIFGRVCRGMEIVKRLGSVQTDKNDRPIHEVKILRAVVKD

SEQ ID NO: 32272 - DNA, 1959 bp, Zea mays subsp. mays
  misc_feature (1)..(1959): Ceres Seq. ID no. 12387609
  misc_feature (1764)..(1764): n is a, c, t, g, unknown, or other
  misc_feature (1886)..(1886): n is a, c, t, g, unknown, or other
atcctctattcctcttcccctcccactccccagctcctgccgccccgctccacgttccagaacatctgggcggtatcccattcgcatggtcaccccatagccccccgacaaaccaccccaccgacgcaccggcagcaatggcggtgggcagcggcctggccctgtaccacgtcctcggagtggccacctgcgtggcgctgctgtacttcaccttcggcgaggtggacctccgccacatctcgctcccgtccttgcccgtctccggcccgtcccccttccgcgcggctgccgtggcggcgcccttcgtggagcggcgcggcgcgcagctgttcctggccggccggcccttctacgtgaacgggtggaactcctactggctcatggaccaggccgtggagccgaggtcccgggaccgcgtctcccgcatgttccgcaccggcgccggagatgggcctcaccgtgtgccgctcctgggcgttcaatgacggcgcctacaacgccctccaggtctcccccggccacttcgacgagcgcgtcttcaaggcgctggaccgggtggtcgtggaggccgggcggcacggggtgcggctgatcctgagtctggcgaacaacctggaggcgtacggtggcaagacgcagtacgtgcggtgggcgtgggaagagggcgtcggcatgtccgcctccaacgattccttcttctacgatccagccatcctcgactacttcaaagtctacctcaagacgctgctgacgaggaagaaccacttgacaggggtggagtacagggacgaccccaccatcctcgcgtgggagctgatgaacgagccccgctgcaccacggacccctcaggcgacacgctgcagcgctggatggaggagatggcggcgtacgtcaagtccatcgacaagaagcatctgctcaccgtcggcaccgaggggttctacgggccgacgagcccccaggagaagctggacgtcaatccgggcacgtggaaggacaacaactacggttcggacttcatccgcaacgccaagatcccagacatcgacttcgcttccatccacctctaccctgacacctggctgctgcagcagcacgccacggtggacgagaagctcaagttcgtgaagcggtgggtggcgtcccacatcgaggacggggacaaggagctgggcaagccggtcctcgccaccgagttcgggctgtcgcaccgcgccaagggcttccaccactcccaccgcgacgtcttctacaaggccgtctacgacaccgtctaccggtcggccgcccgcggcggcgccggcgccggcgccttcgtgtggcagctcgccgtggaggacatggaggagttccacgacgacttctccgtcgtgcccagcgagcacccctcgctgcacaggctcatcaagtcgcaatcgtgcaggctggccaagcttaggcacggggtcggggaggaggccaagcggacgctgtcggtgtgcgccgccggctcgtcctaggaacgaccgacgagcggtgctgcgcaggcagaagccatttccacgcgtccccctttcagctttgttgcgcccagtccgagggttttgtctttgtttctgtcgtccgaatggagcgagtggtgatggtgaagtgtgtcagaaatagatcggagaaaaatgaaatagaaagcagcaacagcaacaagaaaaaaaaagtgtgttacctcgtgaggctttggtaatgctgctggttagattcgtttgtggccacagcaccgacgcctnacgcagtcacgcctgcctgtggaatggcagatcgacatagataagctacagtttccgtcctttgcaactgtacgttagatgcccttgacctttgatatgtagagtcatcgtcgggtggcatncaatggtaatagtcctccatatatagtgtatttctgcaatctggacattggacctatatttatatatagctgt

SEQ ID NO: 32273 - protein, 350 aa, Zea mays subsp. mays
  peptide (1)..(350): Ceres Seq. ID no. 12387610
  misc_feature (1)..(297): Pfam Name: glycosyl hydrolase family 5 Pfam Description: Cellulase
  misc_feature (1)..(346): NCBI GI NO: 34909462 NR Description: putative (1-4)-beta-mannan endohydrolase
  misc_feature (1)..(346): NCBI GI NO: 30681096 NR Description: glycosyl hydrolase family 5/cellulase
  misc_feature (1)..(342): NCBI GI NO: 15235255 NR Description: glycosyl hydrolase family 5/cellulase
  misc_feature (75)..(346): NCBI GI NO: 25354515 NR Description: (1-4)-beta-mannan endohydrolase
  misc_feature (1)..(46): NCBI GI NO: 25354515 NR Description: (1-4)-beta-mannan endohydrolase
  misc_feature (1)..(332): NCBI GI NO: 10129675 NR Description: (1-4)-beta-mannan endohydrolase [Coffea arabica]
  misc_feature (1)..(327): NCBI GI NO: 34912090 NR Description: putative mannan endo-1,4-beta-mannosidase
  misc_feature (1)..(331): NCBI GI NO: 15239973 NR Description: glycosyl hydrolase family 5/cellulase
  misc_feature (1)..(328): NCBI GI NO: 15241093 NR Description: glycosyl hydrolase family 5/cellulase
  misc_feature (3)..(339): NCBI GI NO: 15228393 NR Description: glycosyl hydrolase family 5/cellulase
MGLTVCRSWAFNDGAYNALQVSPGHFDERVFKALDRVVVEAGRHGVRLILSLANNLEAYGGKTQYVRWAWEEGVGMSASNDSFFYDPAILDYFKVYLKTLLTRKNHLTGVEYRDDPTILAWELMNEPRCTTDPSGDTLQRWMEEMAAYVKSIDKKHLLTVGTEGFYGPTSPQEKLDVNPGTWKDNNYGSDFIRNAKIPDIDFASIHLYPDTWLLQQHATVDEKLKFVKRWVASHIEDGDKELGKPVLATEFGLSHRAKGFHHSHRDVFYKAVYDTVYRSAARGGAGAGAFVWQLAVEDMEEFHDDFSVVPSEHPSLHRLIKSQSCRLAKLRHGVGEEAKRTLSVCAAGSS

SEQ ID NO: 32274 - protein, 275 aa, Zea mays subsp. mays
  peptide (1)..(275): Ceres Seq. ID no. 12387611
  misc_feature (1)..(222): Pfam Name: glycosyl hydrolase family 5 Pfam Description: Cellulase
  misc_feature (1)..(271): NCBI GI NO: 34909462 NR Description: putative (1-4)-beta-mannan endohydrolase
  misc_feature (1)..(271): NCBI GI NO: 30681096 NR Description: glycosyl hydrolase family 5/cellulase
  misc_feature (1)..(267): NCBI GI NO: 15235255 NR Description: glycosyl hydrolase family 5/cellulase
  misc_feature (1)..(271): NCBI GI NO: 25354515 NR Description: (1-4)-beta-mannan endohydrolase
  misc_feature (1)..(257): NCBI GI NO: 10129675 NR Description: (1-4)-beta-mannan endohydrolase [Coffea arabica]
  misc_feature (1)..(252): NCBI GI NO: 34912090 NR Description: putative mannan endo-1,4-beta-mannosidase
  misc_feature (1)..(256): NCBI GI NO: 15239973 NR Description: glycosyl hydrolase family 5/cellulase
  misc_feature (1)..(253): NCBI GI NO: 15241093 NR Description: glycosyl hydrolase family 5/cellulase
  misc_feature (1)..(264): NCBI GI NO: 15228393 NR Description: glycosyl hydrolase family 5/cellulase
  misc_feature (1)..(259): NCBI GI NO: 23477717 NR Description: endo-beta-mannanase [Daucus carota]
MSASNDSFFYDPAILDYFKVYLKTLLTRKNHLTGVEYRDDPTILAWELMNEPRCTTDPSGDTLQRWMEEMAAYVKSIDKKHLLTVGTEGFYGPTSPQEKLDVNPGTWKDNNYGSDFIRNAKIPDIDFASIHLYPDTWLLQQHATVDEKLKFVKRWVASHIEDGDKELGKPVLATEFGLSHRAKGFHHSHRDVFYKAVYDTVYRSAARGGAGAGAFVWQLAVEDMEEFHDDFSVVPSEHPSLHRLIKSQSCRLAKLRHGVGEEAKRTLSVCAAGSS

SEQ ID NO: 32275 - protein, 227 aa, Zea mays subsp. mays
  peptide (1)..(227): Ceres Seq. ID no. 12387612
  misc_feature (1)..(174): Pfam Name: glycosyl hydrolase family 5 Pfam Description: Cellulase
  misc_feature (1)..(223): NCBI GI NO: 34909462 NR Description: putative (1-4)-beta-mannan endohydrolase
  misc_feature (1)..(223): NCBI GI NO: 30681096 NR Description: glycosyl hydrolase family 5/cellulase
  misc_feature (1)..(219): NCBI GI NO: 15235255 NR Description: glycosyl hydrolase family 5/cellulase
  misc_feature (1)..(223): NCBI GI NO: 25354515 NR Description: (1-4)-beta-mannan endohydrolase
  misc_feature (1)..(209): NCBI GI NO: 10129675 NR Description: (1-4)-beta-mannan endohydrolase [Coffea arabica]
  misc_feature (1)..(204): NCBI GI NO: 34912090 NR Description: putative mannan endo-1,4-beta-mannosidase
  misc_feature (1)..(208): NCBI GI NO: 15239973 NR Description: glycosyl hydrolase family 5/cellulase
  misc_feature (1)..(205): NCBI GI NO: 15241093 NR Description: glycosyl hydrolase family 5/cellulase
  misc_feature (1)..(216): NCBI GI NO: 15228393 NR Description: glycosyl hydrolase family 5/cellulase
  misc_feature (1)..(211): NCBI GI NO: 23477717 NR Description: endo-beta-mannanase [Daucus carota]
MNEPRCTTDPSGDTLQRWMEEMAAYVKSIDKKHLLTVGTEGFYGPTSPQEKLDVNPGTWKDNNYGSDFIRNAKIPDIDFASIHLYPDTWLLQQHATVDEKLKFVKRWVASHIEDGDKELGKPVLATEFGLSHRAKGFHHSHRDVFYKAVYDTVYRSAARGGAGAGAFVWQLAVEDMEEFHDDFSVVPSEHPSLHRLIKSQSCRLAKLRHGVGEEAKRTLSVCAAGSS

SEQ ID NO: 32276 - DNA, 1102 bp, Zea mays subsp. mays
  misc_feature (1)..(1102): Ceres Seq. ID no. 12402877
aagagaccaggctggtggttgaggtgagaagctagaggagctagagcgatagagtcccatcgcaacacacaaagggaagaggaagaggaaggcgaggacgatgggcttgctcctgctgctccacgtcctcctcgtcgcggcggcggcgacagctcctgcagccgacgcatggggcaaggaggggcactacatggtgtgcaagatcgctgagagctttctgacgaaagaggcatcgacggcggtgaaggagctgctgccggggtgggccggcggcgagctcgcggagacgtgctcttgggcggacacgcagaggttccggtaccgctggtccagcccgctgcacttcgccgacacgccaggggactgcgagttcgactacgcccgggactgccacaacaccaaaggggagaagaacatgtgcgtggtcggagccatcaacaactacacggcggcgctgaaagactcatcaagtccatttgatccgacggagagcttgatgttcctggcgcacttcgtcggcgacgtccaccagcctctccactgcggccacaccgacgacctcggcggcaacaccatcgtcgtccactggtaccgaaggaagaccaacctgcaccacgtctgggacgtgaacgtcatcgagacggccatgaaggacttctacggcaacgaccagagcaccatgatacaggccatccagcagaacatcacggaggagtgggctgatgaggagaagaagtgggaggcctgccgtagccggacaaagacctgtgctgacaagtacgctgcagagagcgcgaagctggcctgcacggcgtacgagggtgtcgaccaggactccaccttggaagatgactacttcttcgccgcgctgccggtggttcagaagaggatcgcgcaaggaggcgtcaggctggccgcgatcctcaacaggatatttggtgggaacagcagatcaggcttcagagcagttgattgatcgatccataccagtagtagatatcaaacgattggacatgtggaggagtgggtggggaggggcagacatgatctgccatctgaattagaataataagaggtatcttgttgccgtctggcaatattg

SEQ ID NO: 32277 - protein, 291 aa, Zea mays subsp. mays
  peptide (1)..(291): Ceres Seq. ID no. 12402878
  misc_feature (1)..(282): NCBI GI NO: 38345900 NR Description: OSJNBa0060D06.10
  misc_feature (1)..(283): NCBI GI NO: 13274190 NR Description: putative nuclease [Hordeum vulgare subsp. vulgare]
  misc_feature (1)..(284): NCBI GI NO: 7489371 NR Description: endonuclease (EC 3.1.30.-) precursor - barley
  misc_feature (1)..(284): NCBI GI NO: 5672692 NR Description: nuclease I [Hordeum vulgare]
  misc_feature (3)..(286): NCBI GI NO: 9558456 NR Description: unnamed protein product
  misc_feature (3)..(286): NCBI GI NO: 34895514 NR Description: putative bifunctional nuclease
  misc_feature (1)..(280): NCBI GI NO: 15221343 NR Description: putative bifunctional nuclease
  misc_feature (1)..(280): NCBI GI NO: 21554516 NR Description: putative bifunctional nuclease
  misc_feature (19)..(279): NCBI GI NO: 4099835 NR Description: bifunctional nuclease [Zinnia elegans]
  misc_feature (7)..(280): NCBI GI NO: 4099833 NR Description: bifunctional nuclease [Zinnia elegans]
MGLLLLLHVLLVAAAATAPAADAWGKEGHYMVCKIAESFLTKEASTAVKELLPGWAGGELAETCSWADTQRFRYRWSSPLHFADTPGDCEFDYARDCHNTKGEKNMCVVGAINNYTAALKDSSSPFDPTESLMFLAHFVGDVHQPLHCGHTDDLGGNTIVVHWYRRKTNLHHVWDVNVIETAMKDFYGNDQSTMIQAIQQNITEEWADEEKKWEACRSRTKTCADKYAAESAKLACTAYEGVDQDSTLEDDYFFAALPVVQKRIAQGGVRLAAILNRIFGGNSRSGFRAVD

SEQ ID NO: 32278 - protein, 261 aa, Zea mays subsp. mays
  peptide (1)..(261): Ceres Seq. ID no. 12402879
  misc_feature (1)..(252): NCBI GI NO: 38345900 NR Description: OSJNBa0060D06.10
  misc_feature (1)..(253): NCBI GI NO: 13274190 NR Description: putative nuclease [Hordeum vulgare subsp. vulgare]
  misc_feature (1)..(254): NCBI GI NO: 7489371 NR Description: endonuclease (EC 3.1.30.-) precursor - barley
  misc_feature (1)..(254): NCBI GI NO: 5672692 NR Description: nuclease I [Hordeum vulgare]
  misc_feature (1)..(256): NCBI GI NO: 9558456 NR Description: unnamed protein product
  misc_feature (1)..(256): NCBI GI NO: 34895514 NR Description: putative bifunctional nuclease
  misc_feature (1)..(250): NCBI GI NO: 15221343 NR Description: putative bifunctional nuclease
  misc_feature (1)..(250): NCBI GI NO: 21554516 NR Description: putative bifunctional nuclease
  misc_feature (1)..(249): NCBI GI NO: 4099835 NR Description: bifunctional nuclease [Zinnia elegans]
  misc_feature (1)..(250): NCBI GI NO: 4099833 NR Description: bifunctional nuclease [Zinnia elegans]
MVCKIAESFLTKEASTAVKELLPGWAGGELAETCSWADTQRFRYRWSSPLHFADTPGDCEFDYARDCHNTKGEKNMCVVGAINNYTAALKDSSSPFDPTESLMFLAHFVGDVHQPLHCGHTDDLGGNTIVVHWYRRKTNLHHVWDVNVIETAMKDFYGNDQSTMIQAIQQNITEEWADEEKKWEACRSRTKTCADKYAAESAKLACTAYEGVDQDSTLEDDYFFAALPVVQKRIAQGGVRLAAILNRIFGGNSRSGFRAVD

SEQ ID NO: 32279 - protein, 186 aa, Zea mays subsp. mays
  peptide (1)..(186): Ceres Seq. ID no. 12402880
  misc_feature (1)..(177): NCBI GI NO: 38345900 NR Description: OSJNBa0060D06.10
  misc_feature (1)..(178): NCBI GI NO: 13274190 NR Description: putative nuclease [Hordeum vulgare subsp. vulgare]
  misc_feature (1)..(179): NCBI GI NO: 7489371 NR Description: endonuclease (EC 3.1.30.-) precursor - barley
  misc_feature (1)..(179): NCBI GI NO: 5672692 NR Description: nuclease I [Hordeum vulgare]
  misc_feature (1)..(181): NCBI GI NO: 9558456 NR Description: unnamed protein product
  misc_feature (1)..(181): NCBI GI NO: 34895514 NR Description: putative bifunctional nuclease
  misc_feature (1)..(175): NCBI GI NO: 15221343 NR Description: putative bifunctional nuclease
  misc_feature (1)..(175): NCBI GI NO: 21554516 NR Description: putative bifunctional nuclease
  misc_feature (1)..(174): NCBI GI NO: 4099835 NR Description: bifunctional nuclease [Zinnia elegans]
  misc_feature (1)..(175): NCBI GI NO: 4099833 NR Description: bifunctional nuclease [Zinnia elegans]
MCVVGAINNYTAALKDSSSPFDPTESLMFLAHFVGDVHQPLHCGHTDDLGGNTIVVHWYRRKTNLHHVWDVNVIETAMKDFYGNDQSTMIQAIQQNITEEWADEEKKWEACRSRTKTCADKYAAESAKLACTAYEGVDQDSTLEDDYFFAALPVVQKRIAQGGVRLAAILNRIFGGNSRSGFRAVD

SEQ ID NO: 32280 - DNA, 1552 bp, Zea mays subsp. mays
  misc_feature (1)..(1552): Ceres Seq. ID no. 12368823
ttttttttcgcctccgaattccgatcaccaaaaaaaggcctttcttttcttttcgtcgccctctcggtgctctggcttcgctgcgtcgcccgcccgtctctaaaagccttgtgtggatcgtggacgccgacgcggccgcagcagcagccacgggacgggagtagaggcgcagagagagagagagaaagagcgagagaaaggttgtgctcgctgcctgccgccgagagacggatgaagaagtgcccatcggagctggagctggaggccttcctccgcggccgggaggacgccacggcggcggcgggcggcgggcggcggtggccgagcagaagcctgcgcacgacgtcgctgcgctggcgccgttcggcgccggtggcgtgttcccctccagcgatctgtccgccttcagcttcgctgactcgaacaccctcaatggaactggaaacatccataatcacctttggtcccataaccagaacgtcaggcatcccgcagtctccacgacgatcgagtcgcagtcgtcgatctgtgcagctgcagcagcaagtccaacatcggctaccaacctgtacctgaaagagagccaggctctgggcggcacgagtggttccgactccgacagcgattcgctgctggacatcgagggtggcccgtgcgagcagagcacgaacccacaggacgtgaagaggatgcgacggatggtgtcgaaccgtgagtctgctcgacggtccaggaagaggaagcaagcccacctagctgaccttgagacacaggtcgaccagctgcgaggcgagaacgcgtcgctcttcaagcagctgacggacgccaaccagcagttcacgaccgcggtcacggacaacaggatcctcaagtcggacgtggaggccctcagagtcaaggtgaagctggcggaggacatggtggcgcgcggcgcgctgtcgtgcgggctgggcagcctggggctgtcgccagcgctgaacccgcggcaggcgtgccgcggccccgacgtgctgtccgtgtccggcctggacttccccggcgccgacgacgcctgcttcacggggctgtccccggcggagcagctgcagctccagagctcccccctgcagagcatcgccgccagcctcgagagcctggacaaccggatggccagcgaggtcaccagctgcggggggcccggcgtcgacgtctggccgtgggaccaccactccaacggcggcctgtccaagtgaagccggagacgccgggtgggagtggggtgagactcgcgccgctcgccgacggcacctatcctgtcctagtgtatgcgtatatcgatatgcatggcgggcgctagctatgaccatgagccgccgttatttctgtgttcgctggagtggtgaaagtgaacggacttgagtttttcagagtccctcgtctccgtcggtacatttactagttctgtaatagaactgactagcttaagctcgtgctactacatatatatatgtatgctgagagactgaactcgaagcataatcatgctaccatattatgtcatcattacattccg

SEQ ID NO: 32281 - protein, 191 aa, Zea mays subsp. mays
  peptide (1)..(191): Ceres Seq. ID no. 12368824
  misc_feature (94)..(191): NCBI GI NO: 28574039 NR Description: Salivary gland secretion 1 CG3047-PA
FFFASEFRSPKKGLSFLFVALSVLWLRCVARPSLKALCGSWTPTRPQQQPRDGSRGAERERERARERLCSLPAAERRMKKCPSELELEAFLRGREDATAAAGGGRRWPSRSLRTTSLRWRRSAPVACSPPAICPPSASLTRTPSMELETSIITFGPITRTSGIPQSPRRSSRSRRSVQLQQQVQHRLPTCT

SEQ ID NO: 32282 - protein, 180 aa, Zea mays subsp. mays
  peptide (1)..(180): Ceres Seq. ID no. 12368825
  misc_feature (1)..(56): Pfam Name: Pfam Description:  bZIP transcription factor
  misc_feature (1)..(134): NCBI GI NO: 13365772 NR Description: RISBZ4 [Oryza sativa]
  misc_feature (161)..(180): NCBI GI NO: 13365772 NR Description: RISBZ4 [Oryza sativa]
  misc_feature (1)..(134): NCBI GI NO: 7489562 NR Description: probable transcription activator - rice
  misc_feature (1)..(139): NCBI GI NO: 7489563 NR Description: probable transcription activator 2 - rice plasmidpBC663
  misc_feature (161)..(180): NCBI GI NO: 7489563 NR Description: probable transcription activator 2 - rice plasmidpBC663
  misc_feature (1)..(169): NCBI GI NO: 13365774 NR Description: RISBZ5 [Oryza sativa]
  misc_feature (1)..(80): NCBI GI NO: 3287204 NR Description: RITA-1 protein [Oryza sativa]
  misc_feature (1)..(169): NCBI GI NO: 18420842 NR Description: bZIP protein, G/HBF-1-related
  misc_feature (5)..(80): NCBI GI NO: 3287202 NR Description: RITA-2 protein [Oryza sativa]
  misc_feature (1)..(80): NCBI GI NO: 100163 NR Description: light-induced protein CPRF-2 - parsley
MRRMVSNRESARRSRKRKQAHLADLETQVDQLRGENASLFKQLTDANQQFTTAVTDNRILKSDVEALRVKVKLAEDMVARGALSCGLGSLGLSPALNPRQACRGPDVLSVSGLDFPGADDACFTGLSPAEQLQLQSSPLQSIAASLESLDNRMASEVTSCGGPGVDVWPWDHHSNGGLSK

SEQ ID NO: 32283 - protein, 177 aa, Zea mays subsp. mays
  peptide (1)..(177): Ceres Seq. ID no. 12368826
  misc_feature (1)..(53): Pfam Name: Pfam Description:  bZIP transcription factor
  misc_feature (1)..(131): NCBI GI NO: 13365772 NR Description: RISBZ4 [Oryza sativa]
  misc_feature (158)..(177): NCBI GI NO: 13365772 NR Description: RISBZ4 [Oryza sativa]
  misc_feature (1)..(131): NCBI GI NO: 7489562 NR Description: probable transcription activator - rice
  misc_feature (1)..(136): NCBI GI NO: 7489563 NR Description: probable transcription activator 2 - rice plasmidpBC663
  misc_feature (158)..(177): NCBI GI NO: 7489563 NR Description: probable transcription activator 2 - rice plasmidpBC663
  misc_feature (1)..(166): NCBI GI NO: 13365774 NR Description: RISBZ5 [Oryza sativa]
  misc_feature (1)..(77): NCBI GI NO: 3287204 NR Description: RITA-1 protein [Oryza sativa]
  misc_feature (1)..(166): NCBI GI NO: 18420842 NR Description: bZIP protein, G/HBF-1-related
  misc_feature (2)..(77): NCBI GI NO: 3287202 NR Description: RITA-2 protein [Oryza sativa]
  misc_feature (1)..(77): NCBI GI NO: 100163 NR Description: light-induced protein CPRF-2 - parsley
MVSNRESARRSRKRKQAHLADLETQVDQLRGENASLFKQLTDANQQFTTAVTDNRILKSDVEALRVKVKLAEDMVARGALSCGLGSLGLSPALNPRQACRGPDVLSVSGLDFPGADDACFTGLSPAEQLQLQSSPLQSIAASLESLDNRMASEVTSCGGPGVDVWPWDHHSNGGLSK

SEQ ID NO: 32284 - DNA, 714 bp, Zea mays subsp. mays
  misc_feature (1)..(714): Ceres Seq. ID no. 12350906
aactgacccagagcgatcggagctgacgacgatggccgggaaggcggcggccgcgacggcggcgaggtgggcggaggggtacccgtggaaggagaagctggcaaagtacaagggtgagctcgggaagggggtgtggggatactgggagctcggcgcgtggaagccgctcggcatcagcgctcgcaagcgcgcccgcctccgcaaggaggtgctcctcgccggcgaggactggagctacgatcctccccgcggggagatgcgtaccaagcgcaagggccacaagtgcgaccgcatctccgccgagaagcgagcaaatactgttgagctgatgaagaagatgccccagatgctgctcgactacaagaaacgtaggtgggagaagaagatgaaagcggaggagagcggcaagaattgataccacgcggctcgtccagggtgcttctcttcctaaataaggtccaaactttatccaggaggtttgcaggacggctagattctgacgcgtcatttccttgtggattccttctctcctgtgatgcgactttggacgcactatcctgattgtgatgctttccaacacttgtgccactggatcgtgatttcagtgagccccaacttctgcagcactagtattttgttgagacaaatcagctataagcatgccatctgcccaataaacttgttcatcatgtaagatcaatgctgttagttttg

SEQ ID NO: 32285 - protein, 137 aa, Zea mays subsp. mays
  peptide (1)..(137): Ceres Seq. ID no. 12350907
  misc_feature (11)..(136): NCBI GI NO: 18415817 NR Description: expressed protein; protein id: At4g22000
TDPERSELTTMAGKAAAATAARWAEGYPWKEKLAKYKGELGKGVWGYWELGAWKPLGISARKRARLRKEVLLAGEDWSYDPPRGEMRTKRKGHKCDRISAEKRANTVELMKKMPQMLLDYKKRRWEKKMKAEESGKN

SEQ ID NO: 32286 - protein, 127 aa, Zea mays subsp. mays
  peptide (1)..(127): Ceres Seq. ID no. 12350908
  misc_feature (1)..(126): NCBI GI NO: 18415817 NR Description: expressed protein; protein id: At4g22000
MAGKAAAATAARWAEGYPWKEKLAKYKGELGKGVWGYWELGAWKPLGISARKRARLRKEVLLAGEDWSYDPPRGEMRTKRKGHKCDRISAEKRANTVELMKKMPQMLLDYKKRRWEKKMKAEESGKN

SEQ ID NO: 32287 - DNA, 1486 bp, Zea mays subsp. mays
  misc_feature (1)..(1486): Ceres Seq. ID no. 12434994
gttcccgctgcccttccagggccacatcgacccgatgctgcacctggcgggcgtgctccacgcgcggggcctcggcggtgaccgtgctccacacgcgcttcaacgcgttggaccccgcgcggcacccggagttccagttcgtggccgtccccgacggcacgcccgccgacgtcgccgccacggggaggatcatcgacatcatcctggccatgaacgccgccatggaggcgtcgccggccgtcggggaggcgctgccgggcgtccgcggtcgcggggcaggaggggcggccccgcgcctcgtgcctcttcgtcgacgccaacctcctcgccgtgcacagggcggccagggcgctcggactgcccacgctggtgctgcgcaccgggagcgccgcctgcctcggctgcttcctggcctaccccatgctccacgaaaagggctatctgcctccgcaagagtcgcagctgtgcacgccggtgccggagctgccaccactccgagtgaaggacctgatctactcgaagcacagcgaccacgagctgatgcgcaaagtcctcgcccggggcagcgaaacagtgagagattgctccggcgtcgtcatcaacacagccgaggcactggaggcagccgagctagggaggctccgcgacgagctggtccacctcccggtggtgctcgcggccggcccactccacaagctctcctcctccaggggcgccgggagcagcttgctcgccccggaccacagctgcatcgagtggctggacgcgcagcagcccgggtcggtgctgtacgtgagcttcgggagcctggcggccatggacacgagcgagctccgggaggtggcatggggtctggcggagtgcggccaccccttcctatgggtcgtccggcccaacatggtacgaggctgcgacgtcgacagcgcgcggcagctgccggatggcttcgaggacgccgtcaagggcagaggcgcgtggtccgctgggccccgcagcaggaggtgctggcccaccgcgcagtgggtgggttctggagccactgcgggtggaactcgactctggaggcggtcagcgagggggtcccgatgatctgtaggccggacgccgtggaccagatgatgaacacgaggtacttgcaggacgtctggggcgtcggcttcgagctccaaggggagctggagagggggaagatcaaggacgcggttaggaagttgatgggtgagcgggagggtgctgagatgagaagagcagcgcaagagctttgcgcgaaactagcaggctgcttggagagcgctgggtcttctcaggttgccattgacaagttggttagctacatactgtctctgtgaatcttctgttctatggcgtatgtgtgttccgctggtttagcattggcagcagcttaacagctggtattctgatggacaattattcctgtcaattatatgtagtgttctctttctctaggtatttttttaatttctcc

SEQ ID NO: 32288 - protein, 448 aa, Zea mays subsp. mays
  peptide (1)..(448): Ceres Seq. ID no. 12434995
  misc_feature (320)..(448): NCBI GI NO: 33146633 NR Description: putative UDP-glucosyltransferase
  misc_feature (22)..(98): NCBI GI NO: 33146633 NR Description: putative UDP-glucosyltransferase
  misc_feature (320)..(439): NCBI GI NO: 34900678 NR Description: glucuronosyl transferase-like protein
  misc_feature (22)..(98): NCBI GI NO: 34900678 NR Description: glucuronosyl transferase-like protein
  misc_feature (320)..(448): NCBI GI NO: 34900682 NR Description: glucuronosyl transferase-like protein
  misc_feature (303)..(448): NCBI GI NO: 34900680 NR Description: contains ESTsAU095171
  misc_feature (21)..(85): NCBI GI NO: 34900680 NR Description: contains ESTsAU095171
  misc_feature (320)..(447): NCBI GI NO: 34395172 NR Description: putative UDP-glucosyltransferase
  misc_feature (324)..(448): NCBI GI NO: 33146634 NR Description: putative UDP-glucosyltransferase
  misc_feature (21)..(101): NCBI GI NO: 33146634 NR Description: putative UDP-glucosyltransferase
SRCPSRATSTRCCTWRACSTRGASAVTVLHTRFNALDPARHPEFQFVAVPDGTPADVAATGRIIDIILAMNAAMEASPAVGEALPGVRGRGAGGAAPRLVPLRRRQPPRRAQGGQGARTAHAGAAHRERRLPRLLPGLPHAPRKGLSASARVAAVHAGAGAATTPSEGPDLLEAQRPRADAQSPRPGQRNSERLLRRRHQHSRGTGGSRAREAPRRAGPPPGGARGRPTPQALLLQGRREQLARPGPQLHRVAGRAAARVGAVRELREPGGHGHERAPGGGMGSGGVRPPLPMGRPAQHGTRLRRRQRAAAAGWLRGRRQGQRRVVRWAPQQEVLAHRAVGGFWSHCGWNSTLEAVSEGVPMICRPDAVDQMMNTRYLQDVWGVGFELQGELERGKIKDAVRKLMGEREGAEMRRAAQELCAKLAGCLESAGSSQVAIDKLVSYILSL

SEQ ID NO: 32289 - protein, 379 aa, Zea mays subsp. mays
  peptide (1)..(379): Ceres Seq. ID no. 12434996
  misc_feature (251)..(379): NCBI GI NO: 33146633 NR Description: putative UDP-glucosyltransferase
  misc_feature (1)..(29): NCBI GI NO: 33146633 NR Description: putative UDP-glucosyltransferase
  misc_feature (251)..(370): NCBI GI NO: 34900678 NR Description: glucuronosyl transferase-like protein
  misc_feature (1)..(29): NCBI GI NO: 34900678 NR Description: glucuronosyl transferase-like protein
  misc_feature (251)..(379): NCBI GI NO: 34900682 NR Description: glucuronosyl transferase-like protein
  misc_feature (234)..(379): NCBI GI NO: 34900680 NR Description: contains ESTsAU095171
  misc_feature (1)..(16): NCBI GI NO: 34900680 NR Description: contains ESTsAU095171
  misc_feature (251)..(378): NCBI GI NO: 34395172 NR Description: putative UDP-glucosyltransferase
  misc_feature (255)..(379): NCBI GI NO: 33146634 NR Description: putative UDP-glucosyltransferase
  misc_feature (1)..(32): NCBI GI NO: 33146634 NR Description: putative UDP-glucosyltransferase
MNAAMEASPAVGEALPGVRGRGAGGAAPRLVPLRRRQPPRRAQGGQGARTAHAGAAHRERRLPRLLPGLPHAPRKGLSASARVAAVHAGAGAATTPSEGPDLLEAQRPRADAQSPRPGQRNSERLLRRRHQHSRGTGGSRAREAPRRAGPPPGGARGRPTPQALLLQGRREQLARPGPQLHRVAGRAAARVGAVRELREPGGHGHERAPGGGMGSGGVRPPLPMGRPAQHGTRLRRRQRAAAAGWLRGRRQGQRRVVRWAPQQEVLAHRAVGGFWSHCGWNSTLEAVSEGVPMICRPDAVDQMMNTRYLQDVWGVGFELQGELERGKIKDAVRKLMGEREGAEMRRAAQELCAKLAGCLESAGSSQVAIDKLVSYILSL

SEQ ID NO: 32290 - protein, 375 aa, Zea mays subsp. mays
  peptide (1)..(375): Ceres Seq. ID no. 12434997
  misc_feature (247)..(375): NCBI GI NO: 33146633 NR Description: putative UDP-glucosyltransferase
  misc_feature (1)..(25): NCBI GI NO: 33146633 NR Description: putative UDP-glucosyltransferase
  misc_feature (247)..(366): NCBI GI NO: 34900678 NR Description: glucuronosyl transferase-like protein
  misc_feature (1)..(25): NCBI GI NO: 34900678 NR Description: glucuronosyl transferase-like protein
  misc_feature (247)..(375): NCBI GI NO: 34900682 NR Description: glucuronosyl transferase-like protein
  misc_feature (230)..(375): NCBI GI NO: 34900680 NR Description: contains ESTsAU095171
  misc_feature (1)..(12): NCBI GI NO: 34900680 NR Description: contains ESTsAU095171
  misc_feature (247)..(374): NCBI GI NO: 34395172 NR Description: putative UDP-glucosyltransferase
  misc_feature (251)..(375): NCBI GI NO: 33146634 NR Description: putative UDP-glucosyltransferase
  misc_feature (1)..(28): NCBI GI NO: 33146634 NR Description: putative UDP-glucosyltransferase
MEASPAVGEALPGVRGRGAGGAAPRLVPLRRRQPPRRAQGGQGARTAHAGAAHRERRLPRLLPGLPHAPRKGLSASARVAAVHAGAGAATTPSEGPDLLEAQRPRADAQSPRPGQRNSERLLRRRHQHSRGTGGSRAREAPRRAGPPPGGARGRPTPQALLLQGRREQLARPGPQLHRVAGRAAARVGAVRELREPGGHGHERAPGGGMGSGGVRPPLPMGRPAQHGTRLRRRQRAAAAGWLRGRRQGQRRVVRWAPQQEVLAHRAVGGFWSHCGWNSTLEAVSEGVPMICRPDAVDQMMNTRYLQDVWGVGFELQGELERGKIKDAVRKLMGEREGAEMRRAAQELCAKLAGCLESAGSSQVAIDKLVSYILSL

SEQ ID NO: 32291 - DNA, 1446 bp, Zea mays subsp. mays
  misc_feature (1)..(1446): Ceres Seq. ID no. 12368983
accttgtgttcttgcgctttctagctaggaagctctccttccttccgcgtagcctagacgaccactgtgcctgatcctgtcagctcagaacgtccgctctgccctccacgagtaagcgtggcgtcgccgtcgccgtcggggcggcgcttcccgtcggacaccacggcgatcgcgagctggcttccgtcgcccgccggcgccggccggggggacgacctctcgctgggtttcaatgccggcgccgcctccgcctcgtctggcgcctcgctggcggcagggctctggggctccgcggcgtcgcgccaggccgcggctgctgccgctgccgccgccgccgccgcggcgctcggctacggggcgataggccccaccggcgacgtcgggatgctcgtcgtcgcgcctccgggctcgttccaccaccagcgggcagccgacgacgacgactccgtgctcccgctcgtcaccgcggcgcagcgcaccctcgtcaacgcagacgccgcctccggcggccacggcaatccgcccgtgtcgtccgctggtgccatccagttttggcaccaggagccggccccggatgggcatgggtcccacggcgagaaggccgtcgccatgctggatcacgccagcggcgggcccgggtccggcggggcgacgtgccaggactgcggcaaccaggcgaagaaaggctgcgcgcacagccgctgccgcacgtgctgcaacagccgtggcttcgagtgtgacacccatgtcaggagcacctgggtgcccgccgcgcgccgccgagagcgcctgcagctcgcgggtggcggtggcgccggcgccggagcctcccctcctccccccacgcccgccacgaccaagaaaccccgcctggcgtgcccgatccccacgacgacggcggccaactctcgcgcctccacctccaacgccaccacgcctcgcagcttcgacgcctcctccggccaccaagacgcgtctttcaaggacagcctgccgcggcatgtgcgcgggccggcggtgttccggtgcgtgcgggtgacgtccgtggacgacggcggcggcggcggcggcaccaacggcgaggtcgcgtaccaggcggcggtgaccatcaacgggcacctgttcaggggcctcctctacgaccacggcgccgaagccgtgatgcccaccgcgtccgacctcaacctcggcagcgccgcccccaacctgtacagcggcgccagcgccccgctcatcctgggtggcctgggcagctgggctacggtaacacacacaccgtgaagttctgatcggtgagaagcaacaccgatcgagcaagggtggagtggagtagttccgttgtttgtccgctcgctttctttgtttcagctcattgtgactgctagcagcagtatagcagtgcagtggctcagcttcatgttactgaaagtgttgccatgtcgtgtc

SEQ ID NO: 32292 - protein, 298 aa, Zea mays subsp. mays
  peptide (1)..(298): Ceres Seq. ID no. 12368984
  misc_feature (82)..(257): Pfam Name: DUF702 Pfam Description: Domain of unknown function
  misc_feature (15)..(275): NCBI GI NO: 34906658 NR Description: putative LRP(lateral root primordia) 1
  misc_feature (81)..(284): NCBI GI NO: 18416839 NR Description: lateral root primordia
  misc_feature (81)..(281): NCBI GI NO: 882341 NR Description: LRP1
  misc_feature (90)..(258): NCBI GI NO: 15234365 NR Description: putative protein; protein id: At4g36260.1
  misc_feature (78)..(257): NCBI GI NO: 15222285 NR Description: unknown protein; protein id: At1g75520.1
  misc_feature (159)..(257): NCBI GI NO: 15224110 NR Description: unknown protein; protein id: At2g18120.1
  misc_feature (43)..(137): NCBI GI NO: 15224110 NR Description: unknown protein; protein id: At2g18120.1
  misc_feature (204)..(282): NCBI GI NO: 33945875 NR Description: hypothetical protein
  misc_feature (88)..(136): NCBI GI NO: 33945875 NR Description: hypothetical protein
  misc_feature (87)..(255): NCBI GI NO: 15223669 NR Description: hypothetical protein; protein id: At1g19790.1
MLVVAPPGSFHHQRAADDDDSVLPLVTAAQRTLVNADAASGGHGNPPVSSAGAIQFWHQEPAPDGHGSHGEKAVAMLDHASGGPGSGGATCQDCGNQAKKGCAHSRCRTCCNSRGFECDTHVRSTWVPAARRRERLQLAGGGGAGAGASPPPPTPATTKKPRLACPIPTTTAANSRASTSNATTPRSFDASSGHQDASFKDSLPRHVRGPAVFRCVRVTSVDDGGGGGGTNGEVAYQAAVTINGHLFRGLLYDHGAEAVMPTASDLNLGSAAPNLYSGASAPLILGGLGSWATVTHTP

SEQ ID NO: 32293 - protein, 223 aa, Zea mays subsp. mays
  peptide (1)..(223): Ceres Seq. ID no. 12368985
  misc_feature (7)..(182): Pfam Name: DUF702 Pfam Description: Domain of unknown function
  misc_feature (1)..(200): NCBI GI NO: 34906658 NR Description: putative LRP(lateral root primordia) 1
  misc_feature (6)..(209): NCBI GI NO: 18416839 NR Description: lateral root primordia
  misc_feature (6)..(206): NCBI GI NO: 882341 NR Description: LRP1
  misc_feature (15)..(183): NCBI GI NO: 15234365 NR Description: putative protein; protein id: At4g36260.1
  misc_feature (3)..(182): NCBI GI NO: 15222285 NR Description: unknown protein; protein id: At1g75520.1
  misc_feature (84)..(182): NCBI GI NO: 15224110 NR Description: unknown protein; protein id: At2g18120.1
  misc_feature (1)..(62): NCBI GI NO: 15224110 NR Description: unknown protein; protein id: At2g18120.1
  misc_feature (129)..(207): NCBI GI NO: 33945875 NR Description: hypothetical protein
  misc_feature (13)..(61): NCBI GI NO: 33945875 NR Description: hypothetical protein
  misc_feature (12)..(180): NCBI GI NO: 15223669 NR Description: hypothetical protein; protein id: At1g19790.1
MLDHASGGPGSGGATCQDCGNQAKKGCAHSRCRTCCNSRGFECDTHVRSTWVPAARRRERLQLAGGGGAGAGASPPPPTPATTKKPRLACPIPTTTAANSRASTSNATTPRSFDASSGHQDASFKDSLPRHVRGPAVFRCVRVTSVDDGGGGGGTNGEVAYQAAVTINGHLFRGLLYDHGAEAVMPTASDLNLGSAAPNLYSGASAPLILGGLGSWATVTHTP

SEQ ID NO: 32294 - protein, 154 aa, Zea mays subsp. mays
  peptide (1)..(154): Ceres Seq. ID no. 12368986
  misc_feature (1)..(154): Pfam Name: Pfam Description:  Formin Homology 2 Domain
  misc_feature (1)..(154): NCBI GI NO: 11360494 NR Description: antifreeze glycopeptide AFGP polyprotein precursor
  misc_feature (1)..(154): NCBI GI NO: 27375632 NR Description: blr0521 [Bradyrhizobium japonicum]
  misc_feature (1)..(154): NCBI GI NO: 18025526 NR Description: LF3 [cercopithicine herpesvirus 15]
  misc_feature (1)..(154): NCBI GI NO: 18025526 NR Description: LF3 [cercopithicine herpesvirus 15]
  misc_feature (1)..(154): NCBI GI NO: 11360494 NR Description: antifreeze glycopeptide AFGP polyprotein precursor
  misc_feature (1)..(154): NCBI GI NO: 11360494 NR Description: antifreeze glycopeptide AFGP polyprotein precursor
  misc_feature (1)..(154): NCBI GI NO: 11360318 NR Description: probable mucin DKFZp434C196.1 - human (fragment)
  misc_feature (1)..(154): NCBI GI NO: 18025526 NR Description: LF3 [cercopithicine herpesvirus 15]
  misc_feature (1)..(154): NCBI GI NO: 186396 NR Description: mucin
  misc_feature (1)..(154): NCBI GI NO: 188864 NR Description: mucin
MGMGPTARRPSPCWITPAAGPGPAGRRARTAATRRRKAARTAAAARAATAVASSVTPMSGAPGCPPRAAESACSSRVAVAPAPEPPLLPPRPPRPRNPAWRARSPRRRRPTLAPPPPTPPRLAASTPPPATKTRLSRTACRGMCAGRRCSGACG

SEQ ID NO: 32295 - DNA, 1424 bp, Zea mays subsp. mays
  misc_feature (1)..(1424): Ceres Seq. ID no. 12340535
  misc_feature (697)..(697): n is a, c, t, g, unknown, or other
  misc_feature (266)..(266): n is a, c, t, g, unknown, or other
  misc_feature (1240)..(1240): n is a, c, t, g, unknown, or other
  misc_feature (990)..(990): n is a, c, t, g, unknown, or other
  misc_feature (264)..(264): n is a, c, t, g, unknown, or other
  misc_feature (268)..(268): n is a, c, t, g, unknown, or other
  misc_feature (215)..(215): n is a, c, t, g, unknown, or other
  misc_feature (265)..(265): n is a, c, t, g, unknown, or other
  misc_feature (132)..(132): n is a, c, t, g, unknown, or other
aaaaagagacctgggcaggacgacacaggcagagccgccggccctcgcttcttggtggggtctagtttctttctcgcctctgcctgtgcctgctggtggtaagtaataacagcgacacggtacccacgcacngcggcggcggcggcgacgacgaagacgacatgaccgtcggcgacgacgcggcggcgccggggcgggggcagacggtgtgcgtnaccggcgccggcggctacgtcgggtcgtggatcgtcaagctcctgctcnnncngggctacgccgtccgcggcaccgtgcgcaaccctgacgacgcgaagaacgcgcacctgctggcgctccccggcgcggcggagcggctggcgctgtgcaaggccgacctgctcgactacggcgcgctaagggcggccgtcgccggctgccacaagcgtcttccacgccgcgtcgccggtcaccgacgacccggaggagatggtggagccggcggtgcgggggacgcggtacgtcatcgacgcggcggccgaggccggcacggtccgccgcgtcgtcctgacgtcgtcgatcggcgcggtggccatggacccccgccgcgagccggacgccgtcgtcgacgagtcgtgctggagcgacctcgacttctgcaagaagaccaagaactggtactgctacggcaaggcggcggcggagcgggcggcgtgggagncggcggcggcgcgcggggtggacctggtggtggtggtgccggtgctggtgcagggcccggcgctgcagccgtcggtgaacgccagcctgatgcacgtgctcaagtacctgaacgggtccgccaagacgtacgccaacgcggtgcaggcgtacgtgcacgtccgcgacgccgccgacgcgcacgtccgcgtcttcgaggcgccccgcgccgccggccgctacatctgcgccgacgccgtgctccaccgcgaggacgtcgtccgcaccctccgcaagtccttcccgggctacccngtcccggagaggtgctctgacgaggtgaacccgaggaagcagccgtacaagatctccaaccagcggctgagggagctgggcctggagttcaccccggcggcgcaggcgctgtacgacaccgtcgtgtgcttccaggagaagggcatcctccctctccctgtccccgccccaacgccggcgtcaccggacgcctgagctagctgatgagctggcccagaaccaacgaagaaacatgtttggcacgcaaacngctattataacagtcgctgcttcgatcattctgccgctagagatagaatgtggagtgtgtgctactcgttgtgggcgtaagagtgtcagaagagtgcagcagtaactatatcgatgcgactttttatatgttgctatatcatgtgtgacaatctcctaataataaatatatggagtatcgtcct

SEQ ID NO: 32296 - protein, 282 aa, Zea mays subsp. mays
  peptide (1)..(282): Ceres Seq. ID no. 12340536
  misc_feature (16)..(83): Pfam Name: Pfam Description:  NAD dependent epimerase/dehydratase family
  misc_feature (1)..(86): NCBI GI NO: 25140432 NR Description: cinnamoyl CoA reductase [Hordeum vulgare]
  misc_feature (10)..(86): NCBI GI NO: 3341511 NR Description: cinnamoyl-CoA reductase [Saccharum officinarum]
  misc_feature (7)..(85): NCBI GI NO: 3242328 NR Description: cinnamoyl-CoA reductase [Zea mays]
  misc_feature (1)..(86): NCBI GI NO: 9964087 NR Description: cinnamoyl CoA reductase [Lolium perenne]
  misc_feature (8)..(85): NCBI GI NO: 7431410 NR Description: cinnamoyl CoA reductase - maize
  misc_feature (1)..(86): NCBI GI NO: 17978549 NR Description: cinnamoyl-CoA reductase [Lolium perenne]
  misc_feature (5)..(85): NCBI GI NO: 9998901 NR Description: cinnamoyl-CoA reductase
  misc_feature (5)..(85): NCBI GI NO: 40233135 NR Description: cinnamoyl CoA reductase [Populus tomentosa]
  misc_feature (5)..(85): NCBI GI NO: 2960364 NR Description: cinnamoyl CoA reductase
  misc_feature (8)..(85): NCBI GI NO: 7431407 NR Description: cinnamoyl-CoA reductase (EC 1
  misc_feature (18)..(18): Xaa is any aa, unknown or other
  misc_feature (35)..(35): Xaa is any aa, unknown or other
  misc_feature (36)..(36): Xaa is any aa, unknown or other
  misc_feature (179)..(179): Xaa is any aa, unknown or other
  misc_feature (277)..(277): Xaa is any aa, unknown or other
MTVGDDAAAPGRGQTVCXTGAGGYVGSWIVKLLLXXGYAVRGTVRNPDDAKNAHLLALPGAAERLALCKADLLDYGALRAAVAGCHKRLPRRVAGHRRPGGDGGAGGAGDAVRHRRGGRGRHGPPRRPDVVDRRGGHGPPPRAGRRRRRVVLERPRLLQEDQELVLLRQGGGGAGGVGXGGGARGGPGGGGAGAGAGPGAAAVGERQPDARAQVPERVRQDVRQRGAGVRARPRRRRRARPRLRGAPRRRPLHLRRRRAPPRGRRPHPPQVLPGLPXPGEVL

SEQ ID NO: 32297 - protein, 239 aa, Zea mays subsp. mays
  peptide (1)..(239): Ceres Seq. ID no. 12340537
  misc_feature (1)..(202): Pfam Name: Pfam Description:  NAD dependent epimerase/dehydratase family
  misc_feature (1)..(228): NCBI GI NO: 25140432 NR Description: cinnamoyl CoA reductase [Hordeum vulgare]
  misc_feature (1)..(227): NCBI GI NO: 3341511 NR Description: cinnamoyl-CoA reductase [Saccharum officinarum]
  misc_feature (1)..(227): NCBI GI NO: 3242328 NR Description: cinnamoyl-CoA reductase [Zea mays]
  misc_feature (1)..(228): NCBI GI NO: 9964087 NR Description: cinnamoyl CoA reductase [Lolium perenne]
  misc_feature (1)..(227): NCBI GI NO: 7431410 NR Description: cinnamoyl CoA reductase - maize
  misc_feature (1)..(227): NCBI GI NO: 17978549 NR Description: cinnamoyl-CoA reductase [Lolium perenne]
  misc_feature (1)..(231): NCBI GI NO: 9998901 NR Description: cinnamoyl-CoA reductase
  misc_feature (1)..(231): NCBI GI NO: 40233135 NR Description: cinnamoyl CoA reductase [Populus tomentosa]
  misc_feature (1)..(231): NCBI GI NO: 2960364 NR Description: cinnamoyl CoA reductase
  misc_feature (1)..(230): NCBI GI NO: 7431407 NR Description: cinnamoyl-CoA reductase (EC 1
  misc_feature (78)..(78): Xaa is any aa, unknown or other
  misc_feature (175)..(175): Xaa is any aa, unknown or other
MVEPAVRGTRYVIDAAAEAGTVRRVVLTSSIGAVAMDPRREPDAVVDESCWSDLDFCKKTKNWYCYGKAAAERAAWEXAAARGVDLVVVVPVLVQGPALQPSVNASLMHVLKYLNGSAKTYANAVQAYVHVRDAADAHVRVFEAPRAAGRYICADAVLHREDVVRTLRKSFPGYXVPERCSDEVNPRKQPYKISNQRLRELGLEFTPAAQALYDTVVCFQEKGILPLPVPAPTPASPDA

SEQ ID NO: 32298 - protein, 204 aa, Zea mays subsp. mays
  peptide (1)..(204): Ceres Seq. ID no. 12340538
  misc_feature (1)..(167): Pfam Name: Pfam Description:  NAD dependent epimerase/dehydratase family
  misc_feature (1)..(193): NCBI GI NO: 25140432 NR Description: cinnamoyl CoA reductase [Hordeum vulgare]
  misc_feature (1)..(192): NCBI GI NO: 3341511 NR Description: cinnamoyl-CoA reductase [Saccharum officinarum]
  misc_feature (1)..(192): NCBI GI NO: 3242328 NR Description: cinnamoyl-CoA reductase [Zea mays]
  misc_feature (1)..(193): NCBI GI NO: 9964087 NR Description: cinnamoyl CoA reductase [Lolium perenne]
  misc_feature (1)..(192): NCBI GI NO: 7431410 NR Description: cinnamoyl CoA reductase - maize
  misc_feature (1)..(192): NCBI GI NO: 17978549 NR Description: cinnamoyl-CoA reductase [Lolium perenne]
  misc_feature (1)..(196): NCBI GI NO: 9998901 NR Description: cinnamoyl-CoA reductase
  misc_feature (1)..(196): NCBI GI NO: 40233135 NR Description: cinnamoyl CoA reductase [Populus tomentosa]
  misc_feature (1)..(196): NCBI GI NO: 2960364 NR Description: cinnamoyl CoA reductase
  misc_feature (1)..(195): NCBI GI NO: 7431407 NR Description: cinnamoyl-CoA reductase (EC 1
  misc_feature (43)..(43): Xaa is any aa, unknown or other
  misc_feature (140)..(140): Xaa is any aa, unknown or other
MDPRREPDAVVDESCWSDLDFCKKTKNWYCYGKAAAERAAWEXAAARGVDLVVVVPVLVQGPALQPSVNASLMHVLKYLNGSAKTYANAVQAYVHVRDAADAHVRVFEAPRAAGRYICADAVLHREDVVRTLRKSFPGYXVPERCSDEVNPRKQPYKISNQRLRELGLEFTPAAQALYDTVVCFQEKGILPLPVPAPTPASPDA

SEQ ID NO: 32299 - DNA, 1906 bp, Zea mays subsp. mays
  misc_feature (1)..(1906): Ceres Seq. ID no. 12355602
accgctagtgctctagtcttacctagccttgctgagccccttgcagtgctgggaggagaaggacaaggtctctgatcagctcagcttgtctggtcaaagctgagagcctcgttgtgctgtgagtgcaagctcgaccgacaggacccctgccactgtgaagcacagcgtcagcggcgacaagacgaaggggcggaagctgccaagccgatagatctacgcaaatggagaccaaggacgtgtcgccgctcgccgccgccaccaccaccaccgcgggcgcccgtgcctgcaccgacctctcaaccgcctccgccggccccttcttctatggcgccgccgcagcaccagcaccagcaccatccgccgccgccgttcgcgcagcaggcggccccggttccgtcgcctgccgcgtccatgcccggcggcatgcggctctcgttcgaccagatgtccgggaaggcgcccggggagcagcaccaccactccgcgcccatgctgtacacggtgccaccaccgcagtccgccgcgggcgcgggcgcaccgggggccaatgtgctgggcatgggcgagctgatgcgcaagaagcgcggccggccgcgcaagtacgcgcccgacgggagcatggctctggcgctggcccccatctcctccgcctcagccggcggcgccgcagcccccggacagcagcagcacggcggcgggttctccatcagcagccccccgtccgaccccaacgccaagcgccgcggccggcctcccggctctggcaagaagaagcagttcgaagccttgggctcctggggcatcgccttcacccctcacatcctcaccgtcaaggccggcgaggatgttgcttcaaaaataatgacattctcacagcaaggccctcgcacagtctgcatcctttccgcgaatggtgcaattagtaatgttacacttcggcagccagccacatctggtggactagttacttatgaggggcgctttgagataatctcgctatctggttctttcctgcttgcggaggatggtgatactcgcagcaggactggtggcttgagtgtcgcacttgcaggatctgatggccgagttcttggagggtgtgttgctggaatgcttatggctgcaactcctgttcaggttgtggtggctagctttatcgcagagggaaagaaatcaaagccagcggaagcacggaaggttgaaccgatggctgctcctccaccgcagatggctacctttgttccacctccgctggccaccagccctccatcggagggaacatccagcgcatcatctgatgactctggcagcccaatccaccacagtgcgatgccgttcagcaactccagccagcatcaacaccctcaccagcaccagcaccagcacatgccgcctgcctacgcatccgggggttggtccctctcagtgcaccagcagaataggcatgattctgacatgaagatgatgtcgaactaacagtgctcaacctaggcgtcccatttgttggttgggctggagaggaaggaagctgctgatggttggtactgccgctatgaaatggtcttcttgcgccgtctgtcctgatcagtgaccccgtgttgctctggtcaatgacggtgtgtctgctatagctaagatagctaggaaggattagagtttatgggctcacttgctgttgttcccctgggtaagattaatttaatttgaattagccgctgttgtaatgctgtagccagtgtcctgaagtcgcttatcagtcagtccctgacgcgagctgtgatggttgcctgatgagatcttcacctcctagtcctaggctagttaaaatatcatttctctagtactatgaatcatgaatttacttggatgcttcggtttgattcaggaatttgatcgtattatgttt

SEQ ID NO: 32300 - protein, 383 aa, Zea mays subsp. mays
  peptide (1)..(383): Ceres Seq. ID no. 12355603
  misc_feature (1)..(63): Pfam Name: Pfam Description:  Extensin-like region
  misc_feature (1)..(383): NCBI GI NO: 37537056 NR Description: putative AT-Hook DNA-binding protein
  misc_feature (1)..(383): NCBI GI NO: 38346715 NR Description: OSJNBa0086O06.13
  misc_feature (6)..(341): NCBI GI NO: 14326504 NR Description: At2g33620/F4P9.39 [Arabidopsis thaliana]
  misc_feature (6)..(341): NCBI GI NO: 2598227 NR Description: AT-hook protein 1 [Arabidopsis thaliana]
  misc_feature (6)..(341): NCBI GI NO: 18403332 NR Description: AT-hook DNA-binding protein
  misc_feature (70)..(341): NCBI GI NO: 25408293 NR Description: AT-hook DNA-binding protein (AHP1)
  misc_feature (1)..(355): NCBI GI NO: 15237481 NR Description: putative protein; protein id: At5g46640.1
  misc_feature (83)..(344): NCBI GI NO: 18414996 NR Description: putative protein; protein id: At4g17950
  misc_feature (83)..(344): NCBI GI NO: 25456045 NR Description: probable DNA-binding protein AT-hook 2
  misc_feature (1)..(327): NCBI GI NO: 7487767 NR Description: hypothetical protein T6K21
MAPPQHQHQHHPPPPFAQQAAPVPSPAASMPGGMRLSFDQMSGKAPGEQHHHSAPMLYTVPPPQSAAGAGAPGANVLGMGELMRKKRGRPRKYAPDGSMALALAPISSASAGGAAAPGQQQHGGGFSISSPPSDPNAKRRGRPPGSGKKKQFEALGSWGIAFTPHILTVKAGEDVASKIMTFSQQGPRTVCILSANGAISNVTLRQPATSGGLVTYEGRFEIISLSGSFLLAEDGDTRSRTGGLSVALAGSDGRVLGGCVAGMLMAATPVQVVVASFIAEGKKSKPAEARKVEPMAAPPPQMATFVPPPLATSPPSEGTSSASSDDSGSPIHHSAMPFSNSSQHQHPHQHQHQHMPPAYASGGWSLSVHQQNRHDSDMKMMSN

SEQ ID NO: 32301 - protein, 354 aa, Zea mays subsp. mays
  peptide (1)..(354): Ceres Seq. ID no. 12355604
  misc_feature (257)..(334): Pfam Name: Pfam Description:  Atrophin-1 family
  misc_feature (1)..(354): NCBI GI NO: 37537056 NR Description: putative AT-Hook DNA-binding protein
  misc_feature (1)..(354): NCBI GI NO: 38346715 NR Description: OSJNBa0086O06.13
  misc_feature (1)..(312): NCBI GI NO: 14326504 NR Description: At2g33620/F4P9.39 [Arabidopsis thaliana]
  misc_feature (1)..(312): NCBI GI NO: 2598227 NR Description: AT-hook protein 1 [Arabidopsis thaliana]
  misc_feature (1)..(312): NCBI GI NO: 18403332 NR Description: AT-hook DNA-binding protein
  misc_feature (41)..(312): NCBI GI NO: 25408293 NR Description: AT-hook DNA-binding protein (AHP1)
  misc_feature (1)..(326): NCBI GI NO: 15237481 NR Description: putative protein; protein id: At5g46640.1
  misc_feature (54)..(315): NCBI GI NO: 18414996 NR Description: putative protein; protein id: At4g17950
  misc_feature (54)..(315): NCBI GI NO: 25456045 NR Description: probable DNA-binding protein AT-hook 2
  misc_feature (1)..(298): NCBI GI NO: 7487767 NR Description: hypothetical protein T6K21
MPGGMRLSFDQMSGKAPGEQHHHSAPMLYTVPPPQSAAGAGAPGANVLGMGELMRKKRGRPRKYAPDGSMALALAPISSASAGGAAAPGQQQHGGGFSISSPPSDPNAKRRGRPPGSGKKKQFEALGSWGIAFTPHILTVKAGEDVASKIMTFSQQGPRTVCILSANGAISNVTLRQPATSGGLVTYEGRFEIISLSGSFLLAEDGDTRSRTGGLSVALAGSDGRVLGGCVAGMLMAATPVQVVVASFIAEGKKSKPAEARKVEPMAAPPPQMATFVPPPLATSPPSEGTSSASSDDSGSPIHHSAMPFSNSSQHQHPHQHQHQHMPPAYASGGWSLSVHQQNRHDSDMKMMSN

SEQ ID NO: 32302 - protein, 350 aa, Zea mays subsp. mays
  peptide (1)..(350): Ceres Seq. ID no. 12355605
  misc_feature (253)..(330): Pfam Name: Pfam Description:  Atrophin-1 family
  misc_feature (1)..(350): NCBI GI NO: 37537056 NR Description: putative AT-Hook DNA-binding protein
  misc_feature (1)..(350): NCBI GI NO: 38346715 NR Description: OSJNBa0086O06.13
  misc_feature (1)..(308): NCBI GI NO: 14326504 NR Description: At2g33620/F4P9.39 [Arabidopsis thaliana]
  misc_feature (1)..(308): NCBI GI NO: 2598227 NR Description: AT-hook protein 1 [Arabidopsis thaliana]
  misc_feature (1)..(308): NCBI GI NO: 18403332 NR Description: AT-hook DNA-binding protein
  misc_feature (37)..(308): NCBI GI NO: 25408293 NR Description: AT-hook DNA-binding protein (AHP1)
  misc_feature (1)..(322): NCBI GI NO: 15237481 NR Description: putative protein; protein id: At5g46640.1
  misc_feature (50)..(311): NCBI GI NO: 18414996 NR Description: putative protein; protein id: At4g17950
  misc_feature (50)..(311): NCBI GI NO: 25456045 NR Description: probable DNA-binding protein AT-hook 2
  misc_feature (1)..(294): NCBI GI NO: 7487767 NR Description: hypothetical protein T6K21
MRLSFDQMSGKAPGEQHHHSAPMLYTVPPPQSAAGAGAPGANVLGMGELMRKKRGRPRKYAPDGSMALALAPISSASAGGAAAPGQQQHGGGFSISSPPSDPNAKRRGRPPGSGKKKQFEALGSWGIAFTPHILTVKAGEDVASKIMTFSQQGPRTVCILSANGAISNVTLRQPATSGGLVTYEGRFEIISLSGSFLLAEDGDTRSRTGGLSVALAGSDGRVLGGCVAGMLMAATPVQVVVASFIAEGKKSKPAEARKVEPMAAPPPQMATFVPPPLATSPPSEGTSSASSDDSGSPIHHSAMPFSNSSQHQHPHQHQHQHMPPAYASGGWSLSVHQQNRHDSDMKMMSN

SEQ ID NO: 32303 - DNA, 1423 bp, Zea mays subsp. mays
  misc_feature (1)..(1423): Ceres Seq. ID no. 12347695
gttatctctgtcctctcctcgtgtttgttcttcctaccagcggagcgccagctacgcgctgtgcctcgtgcctagacgaacggcataggcaccggacggtggcgtcatgtgcgtggaggagccggaggacgccgaacggtttggttttggagacccaggggtcgaggagcccgctaagtttcccttggctcagatggagagagtttgtgaaaatacaacttctgctgatttaaggcagaagttaagcaattttgtcccagtaatccgatcgggggattggtctgatattggaggtcgccaatacatggaagacacccacgtgtgcattccggaccttgctaagaactttggtttcccatcattagataatgaagttgtttcattctatggggtctttgatggtcacggtggaaaagatgctgcccatttcgtttgtgataatttaccaaggatgattgtggaagattcagatttccctcttcagcttgaaaaagttgtgagaaggtcctttatgcagattgattgccagtttgctgagacatgctctctccatagagcatcgtcctccggtacaactgcacttacagcaatggtttttggatgtctcttctggtcgctaatgccggtgactgtagggcggttctttcccggtgtggcaccgcagtcgaaatgtccatggaccacaggccttgcagtctcagcgaaaaactgcgcgtagaatcgcttggtggctacgtggacgatggctatctgaacggtctgctaggagtcaccagagcgcttggtgactggcatctcgagggcatgaaaggagctggtgagacaggtggtcccctgagtgctgacccagagctcaagatgaccacgctgacgaaggacgacgagttcttgataattggcagcgacgggatctgggacgtcttctcgaaccagaactcggtggacttcgcccggaagcgcctccaggagcacaacgatgtgaagttgtgctgcagggaaatcgtcgaggaggcgatcaggcggggggctactgataacttgactgcagtgctggtctcgttccacctggaggccccgcctcggatcagagtggaccgtcctggtagggtggagaggagcatatctgctgaagggctcaatagcctcaggatactcctgggaaggcagtagctgcgttcttgtcgcgattttaggtgctgtgccgcattgccgagttgtaattgtatgtagtcatctcggctcctcattattgttagctgttaccctttgctgcgactgcgacacgtgttacgattcttgttggtgattgaaccaacaaacctgatattattcttgttggtgattgaaccaacaaacctgatactattcttgttcgtgactgaaccaacagatttgagctccgtcctgtgagagattttaagcc

SEQ ID NO: 32304 - protein, 203 aa, Zea mays subsp. mays
  peptide (1)..(203): Ceres Seq. ID no. 12347696
  misc_feature (53)..(165): Pfam Name: Pfam Description:  Protein phosphatase 2C
  misc_feature (23)..(165): NCBI GI NO: 24413992 NR Description: putative DNA-binding protein phosphatase 2C
  misc_feature (30)..(165): NCBI GI NO: 21693562 NR Description: DNA-binding protein phosphatase 2C
  misc_feature (47)..(177): NCBI GI NO: 20146108 NR Description: protein phosphatase 2C
  misc_feature (42)..(165): NCBI GI NO: 15224766 NR Description: protein phosphatase 2C
  misc_feature (33)..(165): NCBI GI NO: 15226152 NR Description: protein phosphatase 2C
  misc_feature (49)..(165): NCBI GI NO: 10140768 NR Description: putative protein phosphatase-2C [Oryza sativa]
  misc_feature (49)..(165): NCBI GI NO: 37536524 NR Description: putative protein phosphatase-2C
  misc_feature (47)..(163): NCBI GI NO: 15230495 NR Description: protein phosphatase 2C
  misc_feature (31)..(167): NCBI GI NO: 25352221 NR Description: phosphoprotein phosphatase (EC 3.1.3.16) 2C
  misc_feature (17)..(165): NCBI GI NO: 34894410 NR Description: putative protein phosphatase
MCVEEPEDAERFGFGDPGVEEPAKFPLAQMERVCENTTSADLRQKLSNFVPVIRSGDWSDIGGRQYMEDTHVCIPDLAKNFGFPSLDNEVVSFYGVFDGHGGKDAAHFVCDNLPRMIVEDSDFPLQLEKVVRRSFMQIDCQFAETCSLHRASSSGTTALTAMVFGCLFWSLMPVTVGRFFPGVAPQSKCPWTTGLAVSAKNCA

SEQ ID NO: 32305 - protein, 189 aa, Zea mays subsp. mays
  peptide (1)..(189): Ceres Seq. ID no. 12347697
  misc_feature (1)..(147): Pfam Name: Pfam Description:  Protein phosphatase 2C
  misc_feature (1)..(189): NCBI GI NO: 24413992 NR Description: putative DNA-binding protein phosphatase 2C
  misc_feature (1)..(186): NCBI GI NO: 21693562 NR Description: DNA-binding protein phosphatase 2C
  misc_feature (2)..(186): NCBI GI NO: 20146108 NR Description: protein phosphatase 2C
  misc_feature (1)..(186): NCBI GI NO: 15224766 NR Description: protein phosphatase 2C
  misc_feature (1)..(186): NCBI GI NO: 15226152 NR Description: protein phosphatase 2C
  misc_feature (1)..(183): NCBI GI NO: 10140768 NR Description: putative protein phosphatase-2C [Oryza sativa]
  misc_feature (1)..(183): NCBI GI NO: 37536524 NR Description: putative protein phosphatase-2C
  misc_feature (2)..(186): NCBI GI NO: 15230495 NR Description: protein phosphatase 2C
  misc_feature (3)..(186): NCBI GI NO: 25352221 NR Description: phosphoprotein phosphatase (EC 3.1.3.16) 2C
  misc_feature (1)..(183): NCBI GI NO: 34894410 NR Description: putative protein phosphatase
MSLLVANAGDCRAVLSRCGTAVEMSMDHRPCSLSEKLRVESLGGYVDDGYLNGLLGVTRALGDWHLEGMKGAGETGGPLSADPELKMTTLTKDDEFLIIGSDGIWDVFSNQNSVDFARKRLQEHNDVKLCCREIVEEAIRRGATDNLTAVLVSFHLEAPPRIRVDRPGRVERSISAEGLNSLRILLGRQ

SEQ ID NO: 32306 - protein, 174 aa, Zea mays subsp. mays
  peptide (1)..(174): Ceres Seq. ID no. 12347698
  misc_feature (24)..(136): Pfam Name: Pfam Description:  Protein phosphatase 2C
  misc_feature (1)..(136): NCBI GI NO: 24413992 NR Description: putative DNA-binding protein phosphatase 2C
  misc_feature (1)..(136): NCBI GI NO: 21693562 NR Description: DNA-binding protein phosphatase 2C
  misc_feature (18)..(148): NCBI GI NO: 20146108 NR Description: protein phosphatase 2C
  misc_feature (13)..(136): NCBI GI NO: 15224766 NR Description: protein phosphatase 2C
  misc_feature (4)..(136): NCBI GI NO: 15226152 NR Description: protein phosphatase 2C
  misc_feature (20)..(136): NCBI GI NO: 10140768 NR Description: putative protein phosphatase-2C [Oryza sativa]
  misc_feature (20)..(136): NCBI GI NO: 37536524 NR Description: putative protein phosphatase-2C
  misc_feature (18)..(134): NCBI GI NO: 15230495 NR Description: protein phosphatase 2C
  misc_feature (2)..(138): NCBI GI NO: 25352221 NR Description: phosphoprotein phosphatase (EC 3.1.3.16) 2C
  misc_feature (1)..(136): NCBI GI NO: 34894410 NR Description: putative protein phosphatase
MERVCENTTSADLRQKLSNFVPVIRSGDWSDIGGRQYMEDTHVCIPDLAKNFGFPSLDNEVVSFYGVFDGHGGKDAAHFVCDNLPRMIVEDSDFPLQLEKVVRRSFMQIDCQFAETCSLHRASSSGTTALTAMVFGCLFWSLMPVTVGRFFPGVAPQSKCPWTTGLAVSAKNCA

SEQ ID NO: 32307 - DNA, 975 bp, Zea mays subsp. mays
  misc_feature (1)..(975): Ceres Seq. ID no. 12340580
actcaagtacctccccggactactagctcacaccagcggtacccagcccacaccggcagatcagctgcgagctagtagacatcgaccggaccgaccaacaggagcagcaagccgggctagctcgctcgctcgctcgcaatggcttccatcatcgtgcaggcggtggtcatcctcctggacgtcatcgccttcggcctgggcgtcgcccgccgagcagcgccgcagccgggccaccgtcaccccggacgccgccaaggagtacgactactgcgtctacgactccgacatcgccacgggctacggcgtcggcgcgctgctcctcctcgccgccgcgcaggtcgtgctcatgctcgccagccgctgcttctgctgcggccgcgggctcaagccgggaggctcccgcgcctgcgccctcatcctcttcctcttcacatgggtgaccttcctcatcgcggaggcgtgcctgctggcgggatcagtacgcaacgcgtaccacacccggtacaggggcgtattctacggcgagtccctctcatgcgagacggtgcggaagggcgtcttcgctgctggcgcggcatttaccttcttcacggccatcctgggcgaggtatactacctcagctactccaaatcccgagatgccgctggtggtgctggctccagcattggcatgggcccttacaactaaaggagcttgatcgaggcaggcaggcagcccccgtgttttcaactctgcttcgtggtggatgaatgcagtgttctttttaacattaccttagtagggacggtgtaattggttgttggatccgcggttttttcctctctctttaggttcttgtatgaggttactcggttgggccgtatactgtttggattattgggctggattctggacatggtatacacgtattcgtagtatgctatgctgtttatatgtatgtgaaagaaataatagaagcgttgcatcgtctatcc

SEQ ID NO: 32308 - protein, 228 aa, Zea mays subsp. mays
  peptide (1)..(228): Ceres Seq. ID no. 12340581
  misc_feature (67)..(228): NCBI GI NO: 34394069 NR Description: unknown protein
  misc_feature (67)..(227): NCBI GI NO: 38016521 NR Description: fiber protein Fb34 [Gossypium barbadense]
  misc_feature (67)..(214): NCBI GI NO: 18400781 NR Description: expressed protein; protein id: At3g15480
  misc_feature (67)..(213): NCBI GI NO: 18404242 NR Description: expressed protein; protein id: At1g52910
  misc_feature (67)..(215): NCBI GI NO: 18416991 NR Description: Expressed protein; protein id: At4g27435
  misc_feature (67)..(228): NCBI GI NO: 22748411 NR Description: hypothetical protein
  misc_feature (67)..(213): NCBI GI NO: 18407003 NR Description: Expressed protein; protein id: At1g61065
  misc_feature (67)..(213): NCBI GI NO: 21554630 NR Description: unknown [Arabidopsis thaliana]
  misc_feature (70)..(215): NCBI GI NO: 38344206 NR Description: OSJNBa0064G10.22
  misc_feature (70)..(227): NCBI GI NO: 18391509 NR Description: expressed protein; protein id: At1g13380
LKYLPGLLAHTSGTQPTPADQLRASRHRPDRPTGAASRASSLARSQWLPSSCRRWSSSWTSSPSAWASPAEQRRSRATVTPDAAKEYDYCVYDSDIATGYGVGALLLLAAAQVVLMLASRCFCCGRGLKPGGSRACALILFLFTWVTFLIAEACLLAGSVRNAYHTRYRGVFYGESLSCETVRKGVFAAGAAFTFFTAILGEVYYLSYSKSRDAAGGAGSSIGMGPYN

SEQ ID NO: 32309 - protein, 203 aa, Zea mays subsp. mays
  peptide (1)..(203): Ceres Seq. ID no. 12340582
  misc_feature (1)..(23): NCBI GI NO: 34394069 NR Description: unknown protein
MASIIVQAVVILLDVIAFGLGVARRAAPQPGHRHPGRRQGVRLLRLRLRHRHGLRRRRAAPPRRRAGRAHARQPLLLLRPRAQAGRLPRLRPHPLPLHMGDLPHRGGVPAGGISTQRVPHPVQGRILRRVPLMRDGAEGRLRCWRGIYLLHGHPGRGILPQLLQIPRCRWWCWLQHWHGPLQLKELDRGRQAAPVFSTLLRGG

SEQ ID NO: 32310 - DNA, 806 bp, Zea mays subsp. mays
  misc_feature (1)..(806): Ceres Seq. ID no. 12336810
  misc_feature (452)..(452): n is a, c, t, g, unknown, or other
  misc_feature (309)..(309): n is a, c, t, g, unknown, or other
  misc_feature (287)..(287): n is a, c, t, g, unknown, or other
  misc_feature (227)..(227): n is a, c, t, g, unknown, or other
  misc_feature (257)..(257): n is a, c, t, g, unknown, or other
  misc_feature (305)..(305): n is a, c, t, g, unknown, or other
  misc_feature (56)..(56): n is a, c, t, g, unknown, or other
  misc_feature (270)..(270): n is a, c, t, g, unknown, or other
agcaaccaaaaccccgaggaaaacgaaaaagctgctccctctcccggacttcagangccgaggacgctggagcacgcgtcggtccggcgcccccatggacccggcctgcgaggagctcgagcgccgcagccgttacctcagcgcgctcgtgcgccgcaccaagctcgccgacccgccccagccccagccggaggcaaggcggacgtggagcctcctcagctgaaggngccgccgcacgtcggcggtgagggtaaggnagggaaggatgangccaaggcggaggagangacggcgatgaagaaacngaanagggaagcagcggcggaggggaggaaggtggcggtgtgcgtgcgggcggcggacatgccgctgccgctgcagcggcgcgcggtgaggatcgccctcgaggccgtcgccgccatgccgcggctcgagagcaagcgcctcgcgcncgctctcaagaaggatttcgatacaacatacgggcccgcatggcactgcattgtcggcacaagctttggctcctacgtcactcactcgttggggggtttcctgtacttctccgtcgacaaagcctttctcctcttcagaactgccgtccagccacttgtccagctacaatgagacctgaaacatgttttactcgaactggtgtagatgcagcgcaaatgtaattttgaacagaatagacgacgctcagcacaccgtgtcttgccgcgtttgagtagcagaggtaatttgatctgtacacaatactgtagaacagccgtgcctctaacgttgtactgcccgaagtcctgctttgt

SEQ ID NO: 32311 - protein, 207 aa, Zea mays subsp. mays
  peptide (1)..(207): Ceres Seq. ID no. 12336811
  misc_feature (115)..(199): Pfam Name: Pfam Description:  Dynein light chain type 1
  misc_feature (58)..(203): NCBI GI NO: 38567715 NR Description: B1358B12.13
  misc_feature (100)..(205): NCBI GI NO: 15220678 NR Description: dynein light subunit lc6, flagellar outer arm
  misc_feature (81)..(202): NCBI GI NO: 15241269 NR Description: dynein light chain - like protein
  misc_feature (113)..(204): NCBI GI NO: 34913978 NR Description: dynein light chain - like protein
  misc_feature (106)..(198): NCBI GI NO: 34902908 NR Description: unnamed protein product
  misc_feature (105)..(198): NCBI GI NO: 15234756 NR Description: dynein light chain like protein
  misc_feature (105)..(198): NCBI GI NO: 18034123 NR Description: neuronal nitric oxide synthase protein inhibitor
  misc_feature (105)..(198): NCBI GI NO: 28466885 NR Description: At4g15930 [Arabidopsis thaliana]
  misc_feature (117)..(198): NCBI GI NO: 2842737 NR Description: DYNEIN LIGHT CHAIN
  misc_feature (117)..(198): NCBI GI NO: 5305389 NR Description: dynein light chain 2 [Schistosoma japonicum]
  misc_feature (19)..(19): Xaa is any aa, unknown or other
  misc_feature (76)..(76): Xaa is any aa, unknown or other
  misc_feature (86)..(86): Xaa is any aa, unknown or other
  misc_feature (90)..(90): Xaa is any aa, unknown or other
  misc_feature (96)..(96): Xaa is any aa, unknown or other
  misc_feature (102)..(102): Xaa is any aa, unknown or other
  misc_feature (103)..(103): Xaa is any aa, unknown or other
  misc_feature (151)..(151): Xaa is any aa, unknown or other
SNQNPEENEKAAPSPGLQXPRTLEHASVRRPHGPGLRGARAPQPLPQRARAPHQARRPAPAPAGGKADVEPPQLKXPPHVGGEGKXGKDXAKAEEXTAMKKXXREAAAEGRKVAVCVRAADMPLPLQRRAVRIALEAVAAMPRLESKRLAXALKKDFDTTYGPAWHCIVGTSFGSYVTHSLGGFLYFSVDKAFLLFRTAVQPLVQLQ

SEQ ID NO: 32312 - protein, 109 aa, Zea mays subsp. mays
  peptide (1)..(109): Ceres Seq. ID no. 12336812
  misc_feature (17)..(101): Pfam Name: Pfam Description:  Dynein light chain type 1
  misc_feature (1)..(105): NCBI GI NO: 38567715 NR Description: B1358B12.13
  misc_feature (2)..(107): NCBI GI NO: 15220678 NR Description: dynein light subunit lc6, flagellar outer arm
  misc_feature (1)..(104): NCBI GI NO: 15241269 NR Description: dynein light chain - like protein
  misc_feature (15)..(106): NCBI GI NO: 34913978 NR Description: dynein light chain - like protein
  misc_feature (8)..(100): NCBI GI NO: 34902908 NR Description: unnamed protein product
  misc_feature (7)..(100): NCBI GI NO: 15234756 NR Description: dynein light chain like protein
  misc_feature (7)..(100): NCBI GI NO: 28466885 NR Description: At4g15930 [Arabidopsis thaliana]
  misc_feature (7)..(100): NCBI GI NO: 18034123 NR Description: neuronal nitric oxide synthase protein inhibitor
  misc_feature (19)..(100): NCBI GI NO: 2842737 NR Description: DYNEIN LIGHT CHAIN
  misc_feature (19)..(100): NCBI GI NO: 5305389 NR Description: dynein light chain 2 [Schistosoma japonicum]
  misc_feature (4)..(4): Xaa is any aa, unknown or other
  misc_feature (5)..(5): Xaa is any aa, unknown or other
  misc_feature (53)..(53): Xaa is any aa, unknown or other
MKKXXREAAAEGRKVAVCVRAADMPLPLQRRAVRIALEAVAAMPRLESKRLAXALKKDFDTTYGPAWHCIVGTSFGSYVTHSLGGFLYFSVDKAFLLFRTAVQPLVQLQ

SEQ ID NO: 32313 - DNA, 1209 bp, Zea mays subsp. mays
  misc_feature (1)..(1209): Ceres Seq. ID no. 12364936
gaaaccgcctcccatctcatccgtctctctcgaatcccaccgtgcgctcactgcgatggacggctcatccaagcggatcggcggtggcggcgacgacatgcccagccccgaccacgaccagaacgccagccccaacgtcccgccgtccgccgctggtgacggcggcgcatcagccactgcggcggcagcgcccgccgccgggaggcggccgttcaccagcctcagccaagaggaggccgacctcgcccttgcccgcgtcctccaggagcaggagcgggcgtacatgatgctgaccggcggcgagtacgcgatctcggacgccgagagctacgactacgacgaggaggaagacggcgatgggagcgactacgaggaggaaggcgaggcgctcgacgaggacgagcaggttggggacgcggaagcggagggggctgagggggacctggacctggacccttctcagtacgaggacgacggggagggcgacgtctccgacaggctcatggcgctcgtcgggatcggtgattggcgagcaatggagcaggatgatgctggggacgaggaggacgacgaagatgctgaggttcatacacagggtgcatgggaagatgttgacccagacgaatactcttacgaggagctaattgcgctgggtgaagttgtcggtacggaaagcaaaggccttgctgctgacactattgcctcattaccttgggtgacttaccaggcacaagacaagcaagatggcaacatggaacagtgtgttatttgtcgtgtggagtttgacgagggcgagtcattagttgcactcccttgcaaacatccataccattctgagtgcataaaccagtggctgcagctaaacaaggtatgcccgatgtgcagtgctgaagttcccacttctgtgaacaagcaggcatgacttactcaaacggaagaagatagcggtggcttggtatttatctgccattgatggaatgaaagaagcgccaactgttaaattgttcagggaagcaagggaattggctgggttctgattccctgttttcttcagttcgacaggcttagtcccccccggcctgtacgcatgctaatttgtatggccataccgctggttatttatgcattccatcagacgccgatgattcattgcttgtagatgtaaatcaacaatcataccaccatagtcaatagcagttgttttaatgc

SEQ ID NO: 32314 - protein, 306 aa, Zea mays subsp. mays
  peptide (1)..(306): Ceres Seq. ID no. 12364937
  misc_feature (254)..(294): Pfam Name: RING finger Pfam Description: Zinc finger, C3HC4 type
  misc_feature (101)..(306): NCBI GI NO: 18402411 NR Description: expressed protein; protein id: At3g19910
  misc_feature (99)..(301): NCBI GI NO: 10334499 NR Description: hypothetical protein [Cicer arietinum]
  misc_feature (101)..(306): NCBI GI NO: 21536693 NR Description: unknown [Arabidopsis thaliana]
  misc_feature (157)..(298): NCBI GI NO: 22331928 NR Description: putative protein; protein id: At3g63530.1
  misc_feature (78)..(298): NCBI GI NO: 38567912 NR Description: OSJNBa0088I22.8
  misc_feature (138)..(301): NCBI GI NO: 15232746 NR Description: zinc-finger protein-like protein
  misc_feature (66)..(298): NCBI GI NO: 34898016 NR Description: ESTs C26000
  misc_feature (185)..(296): NCBI GI NO: 40253261 NR Description: DNA binding zinc finger protein-like
  misc_feature (204)..(294): NCBI GI NO: 11358785 NR Description: RING-H2 finger protein RHG1a
  misc_feature (46)..(165): NCBI GI NO: 18402411 NR Description: expressed protein; protein id: At3g19910
KPPPISSVSLESHRALTAMDGSSKRIGGGGDDMPSPDHDQNASPNVPPSAAGDGGASATAAAAPAAGRRPFTSLSQEEADLALARVLQEQERAYMMLTGGEYAISDAESYDYDEEEDGDGSDYEEEGEALDEDEQVGDAEAEGAEGDLDLDPSQYEDDGEGDVSDRLMALVGIGDWRAMEQDDAGDEEDDEDAEVHTQGAWEDVDPDEYSYEELIALGEVVGTESKGLAADTIASLPWVTYQAQDKQDGNMEQCVICRVEFDEGESLVALPCKHPYHSECINQWLQLNKVCPMCSAEVPTSVNKQA

SEQ ID NO: 32315 - protein, 288 aa, Zea mays subsp. mays
  peptide (1)..(288): Ceres Seq. ID no. 12364938
  misc_feature (236)..(276): Pfam Name: RING finger Pfam Description: Zinc finger, C3HC4 type
  misc_feature (83)..(288): NCBI GI NO: 18402411 NR Description: expressed protein; protein id: At3g19910
  misc_feature (81)..(283): NCBI GI NO: 10334499 NR Description: hypothetical protein [Cicer arietinum]
  misc_feature (83)..(288): NCBI GI NO: 21536693 NR Description: unknown [Arabidopsis thaliana]
  misc_feature (139)..(280): NCBI GI NO: 22331928 NR Description: putative protein; protein id: At3g63530.1
  misc_feature (60)..(280): NCBI GI NO: 38567912 NR Description: OSJNBa0088I22.8
  misc_feature (120)..(283): NCBI GI NO: 15232746 NR Description: zinc-finger protein-like protein
  misc_feature (48)..(280): NCBI GI NO: 34898016 NR Description: ESTs C26000
  misc_feature (167)..(278): NCBI GI NO: 40253261 NR Description: DNA binding zinc finger protein-like
  misc_feature (186)..(276): NCBI GI NO: 11358785 NR Description: RING-H2 finger protein RHG1a
  misc_feature (28)..(147): NCBI GI NO: 18402411 NR Description: expressed protein; protein id: At3g19910
MDGSSKRIGGGGDDMPSPDHDQNASPNVPPSAAGDGGASATAAAAPAAGRRPFTSLSQEEADLALARVLQEQERAYMMLTGGEYAISDAESYDYDEEEDGDGSDYEEEGEALDEDEQVGDAEAEGAEGDLDLDPSQYEDDGEGDVSDRLMALVGIGDWRAMEQDDAGDEEDDEDAEVHTQGAWEDVDPDEYSYEELIALGEVVGTESKGLAADTIASLPWVTYQAQDKQDGNMEQCVICRVEFDEGESLVALPCKHPYHSECINQWLQLNKVCPMCSAEVPTSVNKQA

SEQ ID NO: 32316 - protein, 274 aa, Zea mays subsp. mays
  peptide (1)..(274): Ceres Seq. ID no. 12364939
  misc_feature (222)..(262): Pfam Name: RING finger Pfam Description: Zinc finger, C3HC4 type
  misc_feature (69)..(274): NCBI GI NO: 18402411 NR Description: expressed protein; protein id: At3g19910
  misc_feature (67)..(269): NCBI GI NO: 10334499 NR Description: hypothetical protein [Cicer arietinum]
  misc_feature (69)..(274): NCBI GI NO: 21536693 NR Description: unknown [Arabidopsis thaliana]
  misc_feature (125)..(266): NCBI GI NO: 22331928 NR Description: putative protein; protein id: At3g63530.1
  misc_feature (46)..(266): NCBI GI NO: 38567912 NR Description: OSJNBa0088I22.8
  misc_feature (106)..(269): NCBI GI NO: 15232746 NR Description: zinc-finger protein-like protein
  misc_feature (34)..(266): NCBI GI NO: 34898016 NR Description: ESTs C26000
  misc_feature (153)..(264): NCBI GI NO: 40253261 NR Description: DNA binding zinc finger protein-like
  misc_feature (172)..(262): NCBI GI NO: 11358785 NR Description: RING-H2 finger protein RHG1a
  misc_feature (14)..(133): NCBI GI NO: 18402411 NR Description: expressed protein; protein id: At3g19910
MPSPDHDQNASPNVPPSAAGDGGASATAAAAPAAGRRPFTSLSQEEADLALARVLQEQERAYMMLTGGEYAISDAESYDYDEEEDGDGSDYEEEGEALDEDEQVGDAEAEGAEGDLDLDPSQYEDDGEGDVSDRLMALVGIGDWRAMEQDDAGDEEDDEDAEVHTQGAWEDVDPDEYSYEELIALGEVVGTESKGLAADTIASLPWVTYQAQDKQDGNMEQCVICRVEFDEGESLVALPCKHPYHSECINQWLQLNKVCPMCSAEVPTSVNKQA

SEQ ID NO: 32317 - DNA, 1547 bp, Zea mays subsp. mays
  misc_feature (1)..(1547): Ceres Seq. ID no. 12364898
gcacgagaccattacctagaacatcctaatcaaaaaaaaggaaacacaattcagcacacgcaccaccaaagaggccggagaagaggggatctcggagaagagtcttcgcctcgcggagagacgtgctctgcctagcatatatagccacacgaaagagagtgcttggcctgccggccttcatctagctagctattgctaactagccagcagcagcgtgcgtgcgttgaaggcagcagaggtagagaggtttttgagagagagaatggcaagcaggcaaggtgtagccgcctccatgttcgccacggcattgctcctcggcgtctttgcatccatcccacaaagtgctgaggccatcggggtgtgctacggcatgagcgccaacaacctgccggcggcgagcacggtggtgagcatgtacaaggcgaacggcatctcggcgatgcggctgtacgcgccggaccagggcgcgctgcaggcggtgggcggcacgggcatcagcgtggccgtgggcgcccccaacgacgtgctgtccaacatcgcggctagccccgcggcggccgcgtcgtgggtgcgcaacaacatccaggcgtacccgtccgtgtcgttccggtacgtgtgcgtgggcaacgaggtggccggcggcgcggcgcaggacctggcgccggccatggagaacgtgcacgcggcgctggcggcggccgggctgggccacatcaaggtgacgacgtcggtgtcgcaggccatcctgggcgtgtacagcccgccgtccgccgcggagttcaccggcgaggcgcgcgggtacatgggccccgtgctgcagttcctggcccgcaccgggtcgccgctcatggccaacatctacccgtacctggcctgggcatacaaccccagcgccatggacatgagctacgcggctcttcacctcctccggcaccgtcgtgcaggacggcgcctacgggtaccagaacctcttcggacaccaccgtcgacgccttctacgtcgccatgggcaagaacggcggctccggcgtgccgctcgtggtgtcggagagcgggtggccgtccggcggcggcgtccaggccacgccggccaacgcgagggtgtacaaccagtacctcatcaaccacgtcgggcgcgggacgccgcgccaccccggcgccatcgagacctacctcttctccatgttcaacgagaaccagaaggagagcggcgtggagcagaactgggggctcttctaccccaacatgcagcacgtctaccccatcagcttctgaagaaccgttaaccgtaccgatccaagctagctgctagctggccctggtggtggctccgaccgacgacggacgacgacgatcgacctgcagccgtatgtgtcgatccggccgtatacagatgatagtacgtagcatgtatgtatatatatggtatatgtgggcttgctttgcgaccgctgggagtgagtatccgatccaattggtacggtagctactcccagatgcgtacgccgtgagtgatgctgagtacgtattttatatgtatatgttac

SEQ ID NO: 32318 - protein, 349 aa, Zea mays subsp. mays
  peptide (1)..(349): Ceres Seq. ID no. 12364899
  misc_feature (31)..(217): Pfam Name: Pfam Description:  Glycosyl hydrolases family 17
  misc_feature (1)..(217): NCBI GI NO: 486849 NR Description: licheninase (EC 3.2.1.73) precursor - wheat
  misc_feature (1)..(217): NCBI GI NO: 288654 NR Description: (1-3, 1-4)-beta-glucanase [Avena sativa]
  misc_feature (5)..(217): NCBI GI NO: 100591 NR Description: licheninase (EC 3
  misc_feature (1)..(217): NCBI GI NO: 228411 NR Description: beta glucanase:ISOTYPE=II
  misc_feature (29)..(217): NCBI GI NO: 840908 NR Description: beta glucanase [Triticum aestivum]
  misc_feature (1)..(217): NCBI GI NO: 13249140 NR Description: glucanase [Oryza sativa]
  misc_feature (23)..(217): NCBI GI NO: 100592 NR Description: licheninase (EC 3
  misc_feature (1)..(217): NCBI GI NO: 854361 NR Description: beta-glucanase
  misc_feature (25)..(217): NCBI GI NO: 121773 NR Description: LICHENASE II PRECURSOR
  misc_feature (25)..(217): NCBI GI NO: 224995 NR Description: glucan glucohydrolase
MASRQGVAASMFATALLLGVFASIPQSAEAIGVCYGMSANNLPAASTVVSMYKANGISAMRLYAPDQGALQAVGGTGISVAVGAPNDVLSNIAASPAAAASWVRNNIQAYPSVSFRYVCVGNEVAGGAAQDLAPAMENVHAALAAAGLGHIKVTTSVSQAILGVYSPPSAAEFTGEARGYMGPVLQFLARTGSPLMANIYPYLAWAYNPSAMDMSYAALHLLRHRRAGRRLRVPEPLRTPPSTPSTSPWARTAAPACRSWCRRAGGRPAAASRPRRPTRGCTTSTSSTTSGAGRRATPAPSRPTSSPCSTRTRRRAAWSRTGGSSTPTCSTSTPSASEEPLTVPIQASC

SEQ ID NO: 32319 - protein, 339 aa, Zea mays subsp. mays
  peptide (1)..(339): Ceres Seq. ID no. 12364900
  misc_feature (21)..(207): Pfam Name: Pfam Description:  Glycosyl hydrolases family 17
  misc_feature (1)..(207): NCBI GI NO: 486849 NR Description: licheninase (EC 3.2.1.73) precursor - wheat
  misc_feature (1)..(207): NCBI GI NO: 288654 NR Description: (1-3, 1-4)-beta-glucanase [Avena sativa]
  misc_feature (1)..(207): NCBI GI NO: 100591 NR Description: licheninase (EC 3
  misc_feature (1)..(207): NCBI GI NO: 228411 NR Description: beta glucanase:ISOTYPE=II
  misc_feature (19)..(207): NCBI GI NO: 840908 NR Description: beta glucanase [Triticum aestivum]
  misc_feature (1)..(207): NCBI GI NO: 13249140 NR Description: glucanase [Oryza sativa]
  misc_feature (13)..(207): NCBI GI NO: 100592 NR Description: licheninase (EC 3
  misc_feature (1)..(207): NCBI GI NO: 854361 NR Description: beta-glucanase
  misc_feature (15)..(207): NCBI GI NO: 121773 NR Description: LICHENASE II PRECURSOR
  misc_feature (15)..(207): NCBI GI NO: 224995 NR Description: glucan glucohydrolase
MFATALLLGVFASIPQSAEAIGVCYGMSANNLPAASTVVSMYKANGISAMRLYAPDQGALQAVGGTGISVAVGAPNDVLSNIAASPAAAASWVRNNIQAYPSVSFRYVCVGNEVAGGAAQDLAPAMENVHAALAAAGLGHIKVTTSVSQAILGVYSPPSAAEFTGEARGYMGPVLQFLARTGSPLMANIYPYLAWAYNPSAMDMSYAALHLLRHRRAGRRLRVPEPLRTPPSTPSTSPWARTAAPACRSWCRRAGGRPAAASRPRRPTRGCTTSTSSTTSGAGRRATPAPSRPTSSPCSTRTRRRAAWSRTGGSSTPTCSTSTPSASEEPLTVPIQASC

SEQ ID NO: 32320 - protein, 313 aa, Zea mays subsp. mays
  peptide (1)..(313): Ceres Seq. ID no. 12364901
  misc_feature (1)..(181): Pfam Name: Pfam Description:  Glycosyl hydrolases family 17
  misc_feature (1)..(181): NCBI GI NO: 486849 NR Description: licheninase (EC 3.2.1.73) precursor - wheat
  misc_feature (1)..(181): NCBI GI NO: 288654 NR Description: (1-3, 1-4)-beta-glucanase [Avena sativa]
  misc_feature (1)..(181): NCBI GI NO: 100591 NR Description: licheninase (EC 3
  misc_feature (1)..(181): NCBI GI NO: 228411 NR Description: beta glucanase:ISOTYPE=II
  misc_feature (1)..(181): NCBI GI NO: 840908 NR Description: beta glucanase [Triticum aestivum]
  misc_feature (1)..(181): NCBI GI NO: 13249140 NR Description: glucanase [Oryza sativa]
  misc_feature (1)..(181): NCBI GI NO: 100592 NR Description: licheninase (EC 3
  misc_feature (1)..(181): NCBI GI NO: 854361 NR Description: beta-glucanase
  misc_feature (1)..(181): NCBI GI NO: 121773 NR Description: LICHENASE II PRECURSOR
  misc_feature (1)..(181): NCBI GI NO: 224995 NR Description: glucan glucohydrolase
MSANNLPAASTVVSMYKANGISAMRLYAPDQGALQAVGGTGISVAVGAPNDVLSNIAASPAAAASWVRNNIQAYPSVSFRYVCVGNEVAGGAAQDLAPAMENVHAALAAAGLGHIKVTTSVSQAILGVYSPPSAAEFTGEARGYMGPVLQFLARTGSPLMANIYPYLAWAYNPSAMDMSYAALHLLRHRRAGRRLRVPEPLRTPPSTPSTSPWARTAAPACRSWCRRAGGRPAAASRPRRPTRGCTTSTSSTTSGAGRRATPAPSRPTSSPCSTRTRRRAAWSRTGGSSTPTCSTSTPSASEEPLTVPIQASC

SEQ ID NO: 32321 - DNA, 1717 bp, Zea mays subsp. mays
  misc_feature (1)..(1717): Ceres Seq. ID no. 12341036
caaacgaccgcaccagccagtccacttcgccagtgatctgtctcagctcgtcgcgtctccggcgccgacagacacggggcgagtgggcaacgcggctccgagatcggcgggcaggatgatgatgctgatcgactgctcgaggtgccgtaccccgctgcagctgccgcacggggctccctgtatccgatgcgccatctgtggggctatcacgcacgtcgcccccgcccctcctgtcgagcccaaccgcggtgccgtacagccgccgccggggtggggtccaccgccgccgccggtgcacgggcgaaagcgagccgtggtgtgcgggatatcgtatcggcactcgcggtatgagctgaagggctgcatcaacgacgtcaagtgcatgcgccacgtcctcatgacgcgcttcaacttccccgacgactccatcattatgctcaacgaagaacaaaccgacccctacaaaatcccaacaaagcataacatagggatggccatgtattggcttgtgcaaggttgtcaacctggagactcattggtgttccattattctgggcatggagcacagcaaagaaactacaatggagatgaggttgatgggtttgatgaaaccctctgcccattggattttgagacacaaggaatgattgtggatgatgacataaatacagcactagttcgaccacttcctcgtggagttaaacttcatgcattcattgatgcttgtcatagtggaactgcacttgatttgccttacctctgcagaatgaacaggagtgggcaatatgtatgggaagatcaccgaccaccatctggtgtctggaaaggcactagtggtggggaggctatttcatttagtggttgtgatgatgatcagacctctgcagatacctctgctttatcaaaggtcacttcgactggtgcaatgacatttggcttcatccaagctattgaacgtggacagggcaccacctacggtagtatcctgaactccatgcgttcgacaatacgcaacacagatgactcagcaggtgtaggtggcggtgctgttacatcactaattacaatgcttcttactggagggagcctatctgctggtggtctgagacaggagccacaactgacggcatgcgagccatttgatgtctatgcgaagcccttctccctatgacgcgttcatggtgctgctgctgcccacccatttcacgttatcaacttatcatcgtgtacatttcaccatcccgattgttaacagcgcgtggaattacaatccgtataaggaagctatgcatatatatcgtttgtttcacaggtacaatccgtatatgcatagcttccttatacggatgtaattaggcctggaacaactgttgaactgaggaacgcaaagatcgacatgttcaagggttcgatgcggcttgcagtggacaagtggggaattgtcaaagctgctgaaagctcagctgagtggacagtcaaggaggacaacaacctgtccttaattgagtttgagctggtgaccgtgacggagtgaaaaccgccattgcttaggagtattgttggttttctgtgttgttgaacctaatcatcatcgccaatcaataaggactcgtggttgatgttctcggcatcggagttgcgtattgctgtaccgttgcttgcttactgtgcgttgtggctacttttgactgctatcgaataataataaattggtgtc

SEQ ID NO: 32322 - protein, 389 aa, Zea mays subsp. mays
  peptide (1)..(389): Ceres Seq. ID no. 12341037
  misc_feature (102)..(389): Pfam Name: Pfam Description:  Caspase domain
  misc_feature (33)..(389): NCBI GI NO: 30678252 NR Description: expressed protein [Arabidopsis thaliana]
  misc_feature (89)..(389): NCBI GI NO: 37536924 NR Description: hypothetical protein
  misc_feature (70)..(389): NCBI GI NO: 32482814 NR Description: metacaspase 2 [Arabidopsis thaliana]
  misc_feature (39)..(95): NCBI GI NO: 32482814 NR Description: metacaspase 2 [Arabidopsis thaliana]
  misc_feature (33)..(298): NCBI GI NO: 3258570 NR Description: Unknown protein [Arabidopsis thaliana]
  misc_feature (70)..(389): NCBI GI NO: 30686772 NR Description: expressed protein [Arabidopsis thaliana]
  misc_feature (39)..(95): NCBI GI NO: 30686772 NR Description: expressed protein [Arabidopsis thaliana]
  misc_feature (70)..(375): NCBI GI NO: 7485453 NR Description: hypothetical protein F13M23
  misc_feature (39)..(95): NCBI GI NO: 7485453 NR Description: hypothetical protein F13M23
  misc_feature (86)..(389): NCBI GI NO: 15237654 NR Description: expressed protein; protein id: At5g64240
KRPHQPVHFASDLSQLVASPAPTDTGRVGNAAPRSAGRMMMLIDCSRCRTPLQLPHGAPCIRCAICGAITHVAPAPPVEPNRGAVQPPPGWGPPPPPVHGRKRAVVCGISYRHSRYELKGCINDVKCMRHVLMTRFNFPDDSIIMLNEEQTDPYKIPTKHNIGMAMYWLVQGCQPGDSLVFHYSGHGAQQRNYNGDEVDGFDETLCPLDFETQGMIVDDDINTALVRPLPRGVKLHAFIDACHSGTALDLPYLCRMNRSGQYVWEDHRPPSGVWKGTSGGEAISFSGCDDDQTSADTSALSKVTSTGAMTFGFIQAIERGQGTTYGSILNSMRSTIRNTDDSAGVGGGAVTSLITMLLTGGSLSAGGLRQEPQLTACEPFDVYAKPFSL

SEQ ID NO: 32323 - protein, 351 aa, Zea mays subsp. mays
  peptide (1)..(351): Ceres Seq. ID no. 12341038
  misc_feature (64)..(351): Pfam Name: Pfam Description:  Caspase domain
  misc_feature (1)..(351): NCBI GI NO: 30678252 NR Description: expressed protein [Arabidopsis thaliana]
  misc_feature (51)..(351): NCBI GI NO: 37536924 NR Description: hypothetical protein
  misc_feature (32)..(351): NCBI GI NO: 32482814 NR Description: metacaspase 2 [Arabidopsis thaliana]
  misc_feature (1)..(57): NCBI GI NO: 32482814 NR Description: metacaspase 2 [Arabidopsis thaliana]
  misc_feature (1)..(260): NCBI GI NO: 3258570 NR Description: Unknown protein [Arabidopsis thaliana]
  misc_feature (32)..(351): NCBI GI NO: 30686772 NR Description: expressed protein [Arabidopsis thaliana]
  misc_feature (1)..(57): NCBI GI NO: 30686772 NR Description: expressed protein [Arabidopsis thaliana]
  misc_feature (32)..(337): NCBI GI NO: 7485453 NR Description: hypothetical protein F13M23
  misc_feature (1)..(57): NCBI GI NO: 7485453 NR Description: hypothetical protein F13M23
  misc_feature (48)..(351): NCBI GI NO: 15237654 NR Description: expressed protein; protein id: At5g64240
MMMLIDCSRCRTPLQLPHGAPCIRCAICGAITHVAPAPPVEPNRGAVQPPPGWGPPPPPVHGRKRAVVCGISYRHSRYELKGCINDVKCMRHVLMTRFNFPDDSIIMLNEEQTDPYKIPTKHNIGMAMYWLVQGCQPGDSLVFHYSGHGAQQRNYNGDEVDGFDETLCPLDFETQGMIVDDDINTALVRPLPRGVKLHAFIDACHSGTALDLPYLCRMNRSGQYVWEDHRPPSGVWKGTSGGEAISFSGCDDDQTSADTSALSKVTSTGAMTFGFIQAIERGQGTTYGSILNSMRSTIRNTDDSAGVGGGAVTSLITMLLTGGSLSAGGLRQEPQLTACEPFDVYAKPFSL

SEQ ID NO: 32324 - protein, 350 aa, Zea mays subsp. mays
  peptide (1)..(350): Ceres Seq. ID no. 12341039
  misc_feature (63)..(350): Pfam Name: Pfam Description:  Caspase domain
  misc_feature (1)..(350): NCBI GI NO: 30678252 NR Description: expressed protein [Arabidopsis thaliana]
  misc_feature (50)..(350): NCBI GI NO: 37536924 NR Description: hypothetical protein
  misc_feature (31)..(350): NCBI GI NO: 32482814 NR Description: metacaspase 2 [Arabidopsis thaliana]
  misc_feature (1)..(56): NCBI GI NO: 32482814 NR Description: metacaspase 2 [Arabidopsis thaliana]
  misc_feature (1)..(259): NCBI GI NO: 3258570 NR Description: Unknown protein [Arabidopsis thaliana]
  misc_feature (31)..(350): NCBI GI NO: 30686772 NR Description: expressed protein [Arabidopsis thaliana]
  misc_feature (1)..(56): NCBI GI NO: 30686772 NR Description: expressed protein [Arabidopsis thaliana]
  misc_feature (31)..(336): NCBI GI NO: 7485453 NR Description: hypothetical protein F13M23
  misc_feature (1)..(56): NCBI GI NO: 7485453 NR Description: hypothetical protein F13M23
  misc_feature (47)..(350): NCBI GI NO: 15237654 NR Description: expressed protein; protein id: At5g64240
MMLIDCSRCRTPLQLPHGAPCIRCAICGAITHVAPAPPVEPNRGAVQPPPGWGPPPPPVHGRKRAVVCGISYRHSRYELKGCINDVKCMRHVLMTRFNFPDDSIIMLNEEQTDPYKIPTKHNIGMAMYWLVQGCQPGDSLVFHYSGHGAQQRNYNGDEVDGFDETLCPLDFETQGMIVDDDINTALVRPLPRGVKLHAFIDACHSGTALDLPYLCRMNRSGQYVWEDHRPPSGVWKGTSGGEAISFSGCDDDQTSADTSALSKVTSTGAMTFGFIQAIERGQGTTYGSILNSMRSTIRNTDDSAGVGGGAVTSLITMLLTGGSLSAGGLRQEPQLTACEPFDVYAKPFSL

SEQ ID NO: 32325 - DNA, 1453 bp, Zea mays subsp. mays
  misc_feature (1)..(1453): Ceres Seq. ID no. 12364902
tcctaatcgaaaaattagccagcgagctgaggcctgaggagcgagcacagccgagtcacccggccggccgcccgcacgcacggacaccaacaactcccttggacgcacccgatcgaccctgctgcctgctagccgtgcgcagtagtgggagcgagcacgagtgagagtgggcagcgagaacatacgccgcccccggccggtgtgactggtggtggcgtcgcgcgcgcgatggggagggcgccgtgctgcgagaaggtggggctcaagcgcgggaggtggacgaaggaggaggaccagatactcgccaactacatcgcagagcacggcgagggatcctggaggtcgctgcccaagaatgcagggctgctccgctgcggcaagagctgccgcctgcggtggatcaactaccttcgggccgacgtcaagagggggaacatctccaaggaggaagaggacgtcatcatcaagctccacgccacccttggaaacaggtggtccctgatcgccagccacctccccggccgaacagacaacgagatcaagaactactggaactcgcacctcagccgccagatccacacgtaccgccggaaatacaccgccggcccggacacggcgcccatcgccatcgccatcgccatcgacatgagcaagctgcacagcgccgagaggcggcgcggtggcaggaccccgggccggtcgccgaagagcgccaccagcagcagcagcatgaccaagagcaagcagccggacgaccctgagccagaaccggaggccggcggcgcgtccagcccgcggcacagcgacggggcgcgaagcgccgtggtggacccggacccggacccgaaccagcccaacagcagcagcggcagcggcagcacgggcgagggggaggacgcgacggggccgtgggtgctggatccgatcgagctcggggacctctgggaggccgagagcgagatggacgccctcatgtctatcgggggggctgcccacgactcggccaccgcggaaggattcgacgcggcccaggcccaggtggacgacctgttcgacgacatggactgggataacttcgcggcccatctgtggggggagccggagcagcagaacgaccacagcgcgcagccgcagccccagcaggccgccgagccgcaggctgctgctgctgctgatgtggcggcggcgggggcggaggcctgcgacccggacgaacacgaactggaggcgttggaaacttggctcctgtccgactcgttctgacagttcccgtcatcagataccgatcaggtcgacgcagctagctagggcctaggtgttgctccgtgcgtgcagtttcgtgtaaatttcgtttctagttcgtaaataggtgctggttcgtgcatggtatattggtatgggccttcgagttcgaatagagagagagaggagacttgcgtcatgcatggcatgg

SEQ ID NO: 32326 - protein, 344 aa, Zea mays subsp. mays
  peptide (1)..(344): Ceres Seq. ID no. 12364903
  misc_feature (14)..(61): Pfam Name: Pfam Description:  Myb-like DNA-binding domain
  misc_feature (1)..(344): NCBI GI NO: 11526779 NR Description: P-like protein [Zea mays subsp. parviglumis]
  misc_feature (1)..(344): NCBI GI NO: 11526773 NR Description: P2 protein [Zea mays]
  misc_feature (1)..(344): NCBI GI NO: 11526775 NR Description: P2-t protein [Zea mays subsp. parviglumis]
  misc_feature (1)..(344): NCBI GI NO: 16507120 NR Description: myb-like transcription factor [Zea mays]
  misc_feature (1)..(252): NCBI GI NO: 7438327 NR Description: Myb-like transcription regulator P - maize
  misc_feature (1)..(270): NCBI GI NO: 127588 NR Description: Myb-related protein P
  misc_feature (1)..(343): NCBI GI NO: 19072772 NR Description: typical A-type R2R3 Myb protein [Oryza sativa]
  misc_feature (1)..(281): NCBI GI NO: 34905688 NR Description: putative myb-related protein P
  misc_feature (1)..(281): NCBI GI NO: 28610110 NR Description: R2R3 Myb transcription factor MYB-IF35 [Zea mays]
  misc_feature (1)..(239): NCBI GI NO: 11358528 NR Description: myb-related transcription factor MYB12
MGRAPCCEKVGLKRGRWTKEEDQILANYIAEHGEGSWRSLPKNAGLLRCGKSCRLRWINYLRADVKRGNISKEEEDVIIKLHATLGNRWSLIASHLPGRTDNEIKNYWNSHLSRQIHTYRRKYTAGPDTAPIAIAIAIDMSKLHSAERRRGGRTPGRSPKSATSSSSMTKSKQPDDPEPEPEAGGASSPRHSDGARSAVVDPDPDPNQPNSSSGSGSTGEGEDATGPWVLDPIELGDLWEAESEMDALMSIGGAAHDSATAEGFDAAQAQVDDLFDDMDWDNFAAHLWGEPEQQNDHSAQPQPQQAAEPQAAAAADVAAAGAEACDPDEHELEALETWLLSDSF

SEQ ID NO: 32327 - protein, 205 aa, Zea mays subsp. mays
  peptide (1)..(205): Ceres Seq. ID no. 12364904
  misc_feature (1)..(205): NCBI GI NO: 11526779 NR Description: P-like protein [Zea mays subsp. parviglumis]
  misc_feature (1)..(205): NCBI GI NO: 11526773 NR Description: P2 protein [Zea mays]
  misc_feature (1)..(205): NCBI GI NO: 11526775 NR Description: P2-t protein [Zea mays subsp. parviglumis]
  misc_feature (1)..(205): NCBI GI NO: 16507120 NR Description: myb-like transcription factor [Zea mays]
  misc_feature (1)..(113): NCBI GI NO: 7438327 NR Description: Myb-like transcription regulator P - maize
  misc_feature (1)..(131): NCBI GI NO: 127588 NR Description: Myb-related protein P
  misc_feature (1)..(204): NCBI GI NO: 19072772 NR Description: typical A-type R2R3 Myb protein [Oryza sativa]
  misc_feature (1)..(142): NCBI GI NO: 34905688 NR Description: putative myb-related protein P
  misc_feature (1)..(142): NCBI GI NO: 28610110 NR Description: R2R3 Myb transcription factor MYB-IF35 [Zea mays]
  misc_feature (1)..(100): NCBI GI NO: 11358528 NR Description: myb-related transcription factor MYB12
MSKLHSAERRRGGRTPGRSPKSATSSSSMTKSKQPDDPEPEPEAGGASSPRHSDGARSAVVDPDPDPNQPNSSSGSGSTGEGEDATGPWVLDPIELGDLWEAESEMDALMSIGGAAHDSATAEGFDAAQAQVDDLFDDMDWDNFAAHLWGEPEQQNDHSAQPQPQQAAEPQAAAAADVAAAGAEACDPDEHELEALETWLLSDSF

SEQ ID NO: 32328 - protein, 177 aa, Zea mays subsp. mays
  peptide (1)..(177): Ceres Seq. ID no. 12364905
  misc_feature (1)..(177): NCBI GI NO: 11526779 NR Description: P-like protein [Zea mays subsp. parviglumis]
  misc_feature (1)..(177): NCBI GI NO: 11526773 NR Description: P2 protein [Zea mays]
  misc_feature (1)..(177): NCBI GI NO: 11526775 NR Description: P2-t protein [Zea mays subsp. parviglumis]
  misc_feature (1)..(177): NCBI GI NO: 16507120 NR Description: myb-like transcription factor [Zea mays]
  misc_feature (1)..(85): NCBI GI NO: 7438327 NR Description: Myb-like transcription regulator P - maize
  misc_feature (1)..(103): NCBI GI NO: 127588 NR Description: Myb-related protein P
  misc_feature (1)..(176): NCBI GI NO: 19072772 NR Description: typical A-type R2R3 Myb protein [Oryza sativa]
  misc_feature (1)..(114): NCBI GI NO: 34905688 NR Description: putative myb-related protein P
  misc_feature (1)..(114): NCBI GI NO: 28610110 NR Description: R2R3 Myb transcription factor MYB-IF35 [Zea mays]
  misc_feature (1)..(72): NCBI GI NO: 11358528 NR Description: myb-related transcription factor MYB12
MTKSKQPDDPEPEPEAGGASSPRHSDGARSAVVDPDPDPNQPNSSSGSGSTGEGEDATGPWVLDPIELGDLWEAESEMDALMSIGGAAHDSATAEGFDAAQAQVDDLFDDMDWDNFAAHLWGEPEQQNDHSAQPQPQQAAEPQAAAAADVAAAGAEACDPDEHELEALETWLLSDSF

SEQ ID NO: 32329 - DNA, 1087 bp, Zea mays subsp. mays
  misc_feature (1)..(1087): Ceres Seq. ID no. 12342079
aaaaacccacaccacacttcgttccccttgtcccaattgctcctccacttcccccaccgcccaccagtgatctcgccgccgcgacgcgaggcaccacggccggcgccggccgccttcctccagaaagtatcccccgtgcgcccgaatcacctcttaatttcgttcttagccgctgcgtttcacagaggtcgcgacatgcccgcctcggcggctcctcctgcccagcccgcggcaccgccccctcctcctcctcccgcttctcctgcccctccggaggatgtggaggcgactgccggttcaccttcgagggcttcagcagtggggacggtgaactggggaacggccaccctcgttggcgtcttcgctgggctgctatacggggggagcagggaggcctccgcttccgtcagtaaggatgccgaggtgatgctgaagatgggaagcacaactgacaagcgtgaacagtatagattgatgagagatgctatggagaaaaggttcattcgggttgccaaaggttcactagtcgggggtgttcggctggggatgtttactgcgactttctttggcatacagaaccttcttatcgatactcgtggagtacatgatgtattcaacattgccgctgctggctctgctactgcagctgcttttggccttatattgccagggtcaatgatgtggcgtgcaaggaatgtattggtgggatctgctcttggtgctggcatctgctatccacttggctgggtacagttaaagctggcagaaaaggccaatcttgagattgcaaattcaaaaccatcatccgatttgacagagggaaaagaaaatcaaagccgtgtgggtgctgctatcgaacgacttgagggtagtctgaagaagtgagtgaagcctacgcatcgatggcatttttctcgttgtcttggttccataaatgtagcagctacaaggactgggctgcactgactattgcttcttttctcgcatgttatggacttttatttcgagtttgcagtaggtatcgccgtaccgcactggtaacttgtatctttcaagtcacaagttattgagttcgcagttgctattc

SEQ ID NO: 32330 - protein, 294 aa, Zea mays subsp. mays
  peptide (1)..(294): Ceres Seq. ID no. 12342080
  misc_feature (66)..(294): NCBI GI NO: 34903198 NR Description: unnamed protein product
  misc_feature (91)..(294): NCBI GI NO: 15242587 NR Description: putative protein; protein id: At5g63000.1
  misc_feature (91)..(259): NCBI GI NO: 9758300 NR Description: contains similarity to unknownprotein~dbj|BAA89593
KNPHHTSFPLSQLLLHFPHRPPVISPPRREAPRPAPAAFLQKVSPVRPNHLLISFLAAAFHRGRDMPASAAPPAQPAAPPPPPPPASPAPPEDVEATAGSPSRASAVGTVNWGTATLVGVFAGLLYGGSREASASVSKDAEVMLKMGSTTDKREQYRLMRDAMEKRFIRVAKGSLVGGVRLGMFTATFFGIQNLLIDTRGVHDVFNIAAAGSATAAAFGLILPGSMMWRARNVLVGSALGAGICYPLGWVQLKLAEKANLEIANSKPSSDLTEGKENQSRVGAAIERLEGSLKK

SEQ ID NO: 32331 - protein, 229 aa, Zea mays subsp. mays
  peptide (1)..(229): Ceres Seq. ID no. 12342081
  misc_feature (1)..(229): NCBI GI NO: 34903198 NR Description: unnamed protein product
  misc_feature (26)..(229): NCBI GI NO: 15242587 NR Description: putative protein; protein id: At5g63000.1
  misc_feature (26)..(194): NCBI GI NO: 9758300 NR Description: contains similarity to unknownprotein~dbj|BAA89593
MPASAAPPAQPAAPPPPPPPASPAPPEDVEATAGSPSRASAVGTVNWGTATLVGVFAGLLYGGSREASASVSKDAEVMLKMGSTTDKREQYRLMRDAMEKRFIRVAKGSLVGGVRLGMFTATFFGIQNLLIDTRGVHDVFNIAAAGSATAAAFGLILPGSMMWRARNVLVGSALGAGICYPLGWVQLKLAEKANLEIANSKPSSDLTEGKENQSRVGAAIERLEGSLKK

SEQ ID NO: 32332 - protein, 152 aa, Zea mays subsp. mays
  peptide (1)..(152): Ceres Seq. ID no. 12342082
  misc_feature (1)..(152): NCBI GI NO: 34903198 NR Description: unnamed protein product
  misc_feature (1)..(152): NCBI GI NO: 15242587 NR Description: putative protein; protein id: At5g63000.1
  misc_feature (1)..(117): NCBI GI NO: 9758300 NR Description: contains similarity to unknownprotein~dbj|BAA89593
MLKMGSTTDKREQYRLMRDAMEKRFIRVAKGSLVGGVRLGMFTATFFGIQNLLIDTRGVHDVFNIAAAGSATAAAFGLILPGSMMWRARNVLVGSALGAGICYPLGWVQLKLAEKANLEIANSKPSSDLTEGKENQSRVGAAIERLEGSLKK

SEQ ID NO: 32333 - DNA, 1201 bp, Zea mays subsp. mays
  misc_feature (1)..(1201): Ceres Seq. ID no. 12374495
cttcacgatacgcacccaccagaggaaaagggcaaaagccaaaaggcatcaccgccgcgacgacgatggcagcctcgctccaagccgcggccaccctgatgcagccggccaagatcggcggccgggcgccctttgcctcgctgccgtcccgcccgtcgtcgcaactcgcctgcagggcgttcggcgtcgacgccggcgccgccaggatcacgtgctccctgcaggacgtcgccagcaggtgcgtcgacgccgcgaagctcgccggcttcgcgctcgccacctcggcgctcctcgtctcgggcgcgagcgcggagggcacgcccaagaggctgacctacgacgagatccagagcaaaacgtacatggaggtgaagggcacgggcacggcgaaccagtgcccgaccatcgacggcggcgtggagtcgttcccgttcaaggccggcaagtaccagatgaagaagctgtgcctggagccgacgtccttcaccgtcaaggcggagggcatcgccaagaacgccccgcccgagttccagaagaccaagctcatgacccgcctcacgtacacgctggacgagatcgagggcccgctcgaggtcggctccgacggcacgctcaagttcgaggagaaggacggcatcgactacgccgccgtcaccgtgcagctcccggggggcgagcgcgtgccgttcctcttcaccgtcaagcagctcgtcgccaccggcaagcccgagagcttcggcgggcccttcctcgtgcccagctaccgcggctcctccttcctcgaccccaagggccgcggcggctccaccggctacgacaacgccgtcgcgctccccgccgggggcagaggtgacgaggaggagctccagaaggagaacatcaagaacgccgcctcctccaccggcaacatcacgttgagcgtcaccaagagcaacccggagaccggcgaggtcatcggcgtcttcgagagcgtgcagccgtccgacaccgacctcggggccaaggcgcccaaggatgtcaagatccagggggtctggtacgctcagctcgagtgattcgagtgtctaactgctaggtgtccgaccgccgtcatggatcttgggaaggtgtatgtataccatggaaaactttggagagcagaggaggaatcgtgtatgtaatgtacttgttaatgcaaattcgggctgtcgcttttttactc

SEQ ID NO: 32334 - protein, 350 aa, Zea mays subsp. mays
  peptide (1)..(350): Ceres Seq. ID no. 12374496
  misc_feature (114)..(350): Pfam Name: Pfam Description:  Manganese-stabilising protein / photosystem II polypeptide
  misc_feature (22)..(350): NCBI GI NO: 131388 NR Description: Oxygen-evolving enhancer protein 1
  misc_feature (22)..(350): NCBI GI NO: 11134054 NR Description: Oxygen-evolving enhancer protein 1
  misc_feature (22)..(350): NCBI GI NO: 9229957 NR Description: oxygen evolving enhancer protein 1 precursor
  misc_feature (22)..(350): NCBI GI NO: 131385 NR Description: OXYGEN-EVOLVING ENHANCER PROTEIN 1
  misc_feature (22)..(350): NCBI GI NO: 12644171 NR Description: Oxygen-evolving enhancer protein 1
  misc_feature (23)..(350): NCBI GI NO: 100454 NR Description: photosystem II oxygen-evolving complex protein 1 -potato
  misc_feature (22)..(350): NCBI GI NO: 11133881 NR Description: Oxygen-evolving enhancer protein 1
  misc_feature (22)..(350): NCBI GI NO: 15230324 NR Description: photosystem II oxygen-evolving complex 33
  misc_feature (22)..(350): NCBI GI NO: 131384 NR Description: Oxygen-evolving enhancer protein 1
  misc_feature (17)..(349): NCBI GI NO: 7008029 NR Description: oxygen-evolving enhancer protein 1 precursor
SRYAPTRGKGQKPKGITAATTMAASLQAAATLMQPAKIGGRAPFASLPSRPSSQLACRAFGVDAGAARITCSLQDVASRCVDAAKLAGFALATSALLVSGASAEGTPKRLTYDEIQSKTYMEVKGTGTANQCPTIDGGVESFPFKAGKYQMKKLCLEPTSFTVKAEGIAKNAPPEFQKTKLMTRLTYTLDEIEGPLEVGSDGTLKFEEKDGIDYAAVTVQLPGGERVPFLFTVKQLVATGKPESFGGPFLVPSYRGSSFLDPKGRGGSTGYDNAVALPAGGRGDEEELQKENIKNAASSTGNITLSVTKSNPETGEVIGVFESVQPSDTDLGAKAPKDVKIQGVWYAQLE

SEQ ID NO: 32335 - protein, 329 aa, Zea mays subsp. mays
  peptide (1)..(329): Ceres Seq. ID no. 12374497
  misc_feature (93)..(329): Pfam Name: Pfam Description:  Manganese-stabilising protein / photosystem II polypeptide
  misc_feature (1)..(329): NCBI GI NO: 131388 NR Description: Oxygen-evolving enhancer protein 1
  misc_feature (1)..(329): NCBI GI NO: 11134054 NR Description: Oxygen-evolving enhancer protein 1
  misc_feature (1)..(329): NCBI GI NO: 9229957 NR Description: oxygen evolving enhancer protein 1 precursor
  misc_feature (1)..(329): NCBI GI NO: 131385 NR Description: OXYGEN-EVOLVING ENHANCER PROTEIN 1
  misc_feature (1)..(329): NCBI GI NO: 12644171 NR Description: Oxygen-evolving enhancer protein 1
  misc_feature (2)..(329): NCBI GI NO: 100454 NR Description: photosystem II oxygen-evolving complex protein 1 -potato
  misc_feature (1)..(329): NCBI GI NO: 11133881 NR Description: Oxygen-evolving enhancer protein 1
  misc_feature (1)..(329): NCBI GI NO: 15230324 NR Description: photosystem II oxygen-evolving complex 33
  misc_feature (1)..(329): NCBI GI NO: 131384 NR Description: Oxygen-evolving enhancer protein 1
  misc_feature (1)..(328): NCBI GI NO: 7008029 NR Description: oxygen-evolving enhancer protein 1 precursor
MAASLQAAATLMQPAKIGGRAPFASLPSRPSSQLACRAFGVDAGAARITCSLQDVASRCVDAAKLAGFALATSALLVSGASAEGTPKRLTYDEIQSKTYMEVKGTGTANQCPTIDGGVESFPFKAGKYQMKKLCLEPTSFTVKAEGIAKNAPPEFQKTKLMTRLTYTLDEIEGPLEVGSDGTLKFEEKDGIDYAAVTVQLPGGERVPFLFTVKQLVATGKPESFGGPFLVPSYRGSSFLDPKGRGGSTGYDNAVALPAGGRGDEEELQKENIKNAASSTGNITLSVTKSNPETGEVIGVFESVQPSDTDLGAKAPKDVKIQGVWYAQLE

SEQ ID NO: 32336 - protein, 318 aa, Zea mays subsp. mays
  peptide (1)..(318): Ceres Seq. ID no. 12374498
  misc_feature (82)..(318): Pfam Name: Pfam Description:  Manganese-stabilising protein / photosystem II polypeptide
  misc_feature (1)..(318): NCBI GI NO: 131388 NR Description: Oxygen-evolving enhancer protein 1
  misc_feature (1)..(318): NCBI GI NO: 11134054 NR Description: Oxygen-evolving enhancer protein 1
  misc_feature (1)..(318): NCBI GI NO: 9229957 NR Description: oxygen evolving enhancer protein 1 precursor
  misc_feature (1)..(318): NCBI GI NO: 131385 NR Description: OXYGEN-EVOLVING ENHANCER PROTEIN 1
  misc_feature (1)..(318): NCBI GI NO: 12644171 NR Description: Oxygen-evolving enhancer protein 1
  misc_feature (1)..(318): NCBI GI NO: 100454 NR Description: photosystem II oxygen-evolving complex protein 1 -potato
  misc_feature (1)..(318): NCBI GI NO: 11133881 NR Description: Oxygen-evolving enhancer protein 1
  misc_feature (1)..(318): NCBI GI NO: 15230324 NR Description: photosystem II oxygen-evolving complex 33
  misc_feature (1)..(318): NCBI GI NO: 131384 NR Description: Oxygen-evolving enhancer protein 1
  misc_feature (1)..(317): NCBI GI NO: 7008029 NR Description: oxygen-evolving enhancer protein 1 precursor
MQPAKIGGRAPFASLPSRPSSQLACRAFGVDAGAARITCSLQDVASRCVDAAKLAGFALATSALLVSGASAEGTPKRLTYDEIQSKTYMEVKGTGTANQCPTIDGGVESFPFKAGKYQMKKLCLEPTSFTVKAEGIAKNAPPEFQKTKLMTRLTYTLDEIEGPLEVGSDGTLKFEEKDGIDYAAVTVQLPGGERVPFLFTVKQLVATGKPESFGGPFLVPSYRGSSFLDPKGRGGSTGYDNAVALPAGGRGDEEELQKENIKNAASSTGNITLSVTKSNPETGEVIGVFESVQPSDTDLGAKAPKDVKIQGVWYAQLE

SEQ ID NO: 32337 - DNA, 1219 bp, Zea mays subsp. mays
  misc_feature (1)..(1219): Ceres Seq. ID no. 12379390
agcaccacctccaaatcttctcgggcctgcctctgcctctgcctcctgaggtgctgaacgacagctctgctacttctgatctgcatgatggccgggaaagcagcatgccggagtcatggagccagctgcttcttgggggattagtcggagatcacgagagatacaacgctgccacagctttactgtcaaaaggattagaggagcgacctgcagcttacaattgctatgaccctggacatggtggtggtgaggagatccagacatcggggaccaacattaggtctcatcaggtgagccaggcgctcttagcgtcgtcctctcctaggtcctgcatcaccacaagcctcggcagcaacatgctggacttctcaaacaccaccgtgccgccggcaccggatctgaagaatcatcactccgataactcttctgagggtaacagcgctggaagtggttcggctccaaagaaggctagggttcagacctcttcttcagcacagtctaccctaaaggtaagaaaggagaggcttggggatagaatcactgcacttcaccagatagtgtccccatttggcaaggagactattggctacattagattcctcctgagtcaaatcgaggctctcagcttcccttacttgggccatgacaacggggactccatgcaacaacataatactaataacttgctgctaaaccatagcactagcgatgccatggtacaagttcaaggtcctccgatgaccaatcaggagggggaggtctatggcaatggcattgaggagggcagcaggaaggatttgaggagcagggggctgtgcctggtgccagtgtcgtgcacgtcgcacctcgccgacgacaacggcccctcagacttctgggcggtgtccgcggcgccgtccccgcctcctccgcctccgccattcgccggcatcatctggcgatagagtcgtgtccagaccggcgtcgatccacccatcagtcgcatgcattattcatgcatgcatgacgtaaatatatacatatagtatcatgcatcactataccattggtttttttttaaaaaaaaatgtttggttgcttgccagggttgctagctagctatagctttgtttgaccgatgagctgaggtatccatcgagcatggagctacctgcagcctataccaggctgctgtatactgtacgtatgtagtacaccgtagtatatgtactgtacgttg

SEQ ID NO: 32338 - protein, 313 aa, Zea mays subsp. mays
  peptide (1)..(313): Ceres Seq. ID no. 12379391
  misc_feature (171)..(200): Pfam Name: Pfam Description:  Helix-loop-helix DNA-binding domain
  misc_feature (84)..(293): NCBI GI NO: 15233452 NR Description: putative protein; protein id: At4g29100
  misc_feature (14)..(293): NCBI GI NO: 33111977 NR Description: putative bHLH133 transcription factor
  misc_feature (104)..(293): NCBI GI NO: 11045087 NR Description: putative protein [Brassica napus]
  misc_feature (111)..(212): NCBI GI NO: 15217667 NR Description: hypothetical protein; protein id: At1g27660.1
  misc_feature (257)..(303): NCBI GI NO: 15217667 NR Description: hypothetical protein; protein id: At1g27660.1
  misc_feature (118)..(205): NCBI GI NO: 25403326 NR Description: protein T22C5.11 [imported] - Arabidopsis thaliana
  misc_feature (257)..(303): NCBI GI NO: 25403326 NR Description: protein T22C5.11 [imported] - Arabidopsis thaliana
  misc_feature (155)..(212): NCBI GI NO: 32562998 NR Description: bHLH transcription factor [Arabidopsis thaliana]
  misc_feature (259)..(299): NCBI GI NO: 32562998 NR Description: bHLH transcription factor [Arabidopsis thaliana]
  misc_feature (140)..(227): NCBI GI NO: 15232315 NR Description: hypothetical protein; protein id: At3g20640.1
HHLQIFSGLPLPLPPEVLNDSSATSDLHDGRESSMPESWSQLLLGGLVGDHERYNAATALLSKGLEERPAAYNCYDPGHGGGEEIQTSGTNIRSHQVSQALLASSSPRSCITTSLGSNMLDFSNTTVPPAPDLKNHHSDNSSEGNSAGSGSAPKKARVQTSSSAQSTLKVRKERLGDRITALHQIVSPFGKETIGYIRFLLSQIEALSFPYLGHDNGDSMQQHNTNNLLLNHSTSDAMVQVQGPPMTNQEGEVYGNGIEEGSRKDLRSRGLCLVPVSCTSHLADDNGPSDFWAVSAAPSPPPPPPPFAGIIWR

SEQ ID NO: 32339 - protein, 279 aa, Zea mays subsp. mays
  peptide (1)..(279): Ceres Seq. ID no. 12379392
  misc_feature (137)..(166): Pfam Name: Pfam Description:  Helix-loop-helix DNA-binding domain
  misc_feature (50)..(259): NCBI GI NO: 15233452 NR Description: putative protein; protein id: At4g29100
  misc_feature (1)..(259): NCBI GI NO: 33111977 NR Description: putative bHLH133 transcription factor
  misc_feature (70)..(259): NCBI GI NO: 11045087 NR Description: putative protein [Brassica napus]
  misc_feature (77)..(178): NCBI GI NO: 15217667 NR Description: hypothetical protein; protein id: At1g27660.1
  misc_feature (223)..(269): NCBI GI NO: 15217667 NR Description: hypothetical protein; protein id: At1g27660.1
  misc_feature (84)..(171): NCBI GI NO: 25403326 NR Description: protein T22C5.11 [imported] - Arabidopsis thaliana
  misc_feature (223)..(269): NCBI GI NO: 25403326 NR Description: protein T22C5.11 [imported] - Arabidopsis thaliana
  misc_feature (121)..(178): NCBI GI NO: 32562998 NR Description: bHLH transcription factor [Arabidopsis thaliana]
  misc_feature (225)..(265): NCBI GI NO: 32562998 NR Description: bHLH transcription factor [Arabidopsis thaliana]
  misc_feature (106)..(193): NCBI GI NO: 15232315 NR Description: hypothetical protein; protein id: At3g20640.1
MPESWSQLLLGGLVGDHERYNAATALLSKGLEERPAAYNCYDPGHGGGEEIQTSGTNIRSHQVSQALLASSSPRSCITTSLGSNMLDFSNTTVPPAPDLKNHHSDNSSEGNSAGSGSAPKKARVQTSSSAQSTLKVRKERLGDRITALHQIVSPFGKETIGYIRFLLSQIEALSFPYLGHDNGDSMQQHNTNNLLLNHSTSDAMVQVQGPPMTNQEGEVYGNGIEEGSRKDLRSRGLCLVPVSCTSHLADDNGPSDFWAVSAAPSPPPPPPPFAGIIWR

SEQ ID NO: 32340 - protein, 195 aa, Zea mays subsp. mays
  peptide (1)..(195): Ceres Seq. ID no. 12379393
  misc_feature (53)..(82): Pfam Name: Pfam Description:  Helix-loop-helix DNA-binding domain
  misc_feature (1)..(175): NCBI GI NO: 15233452 NR Description: putative protein; protein id: At4g29100
  misc_feature (1)..(175): NCBI GI NO: 33111977 NR Description: putative bHLH133 transcription factor
  misc_feature (1)..(175): NCBI GI NO: 11045087 NR Description: putative protein [Brassica napus]
  misc_feature (1)..(94): NCBI GI NO: 15217667 NR Description: hypothetical protein; protein id: At1g27660.1
  misc_feature (139)..(185): NCBI GI NO: 15217667 NR Description: hypothetical protein; protein id: At1g27660.1
  misc_feature (1)..(87): NCBI GI NO: 25403326 NR Description: protein T22C5.11 [imported] - Arabidopsis thaliana
  misc_feature (139)..(185): NCBI GI NO: 25403326 NR Description: protein T22C5.11 [imported] - Arabidopsis thaliana
  misc_feature (37)..(94): NCBI GI NO: 32562998 NR Description: bHLH transcription factor [Arabidopsis thaliana]
  misc_feature (141)..(181): NCBI GI NO: 32562998 NR Description: bHLH transcription factor [Arabidopsis thaliana]
  misc_feature (22)..(109): NCBI GI NO: 15232315 NR Description: hypothetical protein; protein id: At3g20640.1
MLDFSNTTVPPAPDLKNHHSDNSSEGNSAGSGSAPKKARVQTSSSAQSTLKVRKERLGDRITALHQIVSPFGKETIGYIRFLLSQIEALSFPYLGHDNGDSMQQHNTNNLLLNHSTSDAMVQVQGPPMTNQEGEVYGNGIEEGSRKDLRSRGLCLVPVSCTSHLADDNGPSDFWAVSAAPSPPPPPPPFAGIIWR

SEQ ID NO: 32341 - DNA, 915 bp, Zea mays subsp. mays
  misc_feature (1)..(915): Ceres Seq. ID no. 12374370
acaccacactcccgaaacgccgaaaccccaccccgcaccactcatggacgccgccggcgcgcgtccatcggcaccgtcggccgctgctgccgcagtcgccggggcctccgtcgcggacgagccccgggacgcgcgggtggtgcgggagctcctgcgctcgatgggtctcggtgagggcgagtacgaaccccgcgtcgtgcaccagttcctggacctggcctaccgatacgtcggagacgtgctaggggacgcccaagtctacgccgaccacgccgggaaggctcagatcgacgccgacgacgtccgcctcgccatccaggccaaggtcaatttctccttctcccagccgccgccgcgtgaggttctccttgagctggcccgcagccgaaacagaatgccgctgcccaaatcaattgctcctcctggctcaattcccctcccgcctgagcaggacacactgttggcccagaactaccaactcctgcctccgttgaagccgccacctcaatatgaggaaaacgaggatgagaatgaagaatccaacccaagtctgacaccgaacccggcaaattctaatccaaccttctcgcaggatcagcggagtaacgagcaacagcacactccccagcatggccagagggtttcatttcaactcaatgctgtggcagctgctgctgcaaagcgacctcggatgaccgtcgaccagctgaacatcggctaaccagttatcgttggttagactgtagtatcattttcccccatcttttagtgtggtgaatcatgtttcgaagagatttagtgttgtagtggtatgtagccagggcttgcatgcatatgtgtccaagttcgactttgggttgcttgtacttctccatttcataactgaaatcatatttcagatttgagttaaaaggt

SEQ ID NO: 32342 - protein, 239 aa, Zea mays subsp. mays
  peptide (1)..(239): Ceres Seq. ID no. 12374371
  misc_feature (32)..(161): Pfam Name: Pfam Description:  Transcription initiation factor IID
  misc_feature (121)..(239): NCBI GI NO: 30017563 NR Description: putative transcription initiation factor
  misc_feature (15)..(120): NCBI GI NO: 30017563 NR Description: putative transcription initiation factor
  misc_feature (32)..(219): NCBI GI NO: 15221048 NR Description: transcriptional activation factor TAFII32,putative
  misc_feature (16)..(198): NCBI GI NO: 24059851 NR Description: transcriptional activation factor TAFII32-like
  misc_feature (35)..(239): NCBI GI NO: 18079237 NR Description: TAF9 RNA polymerase II, TATA box binding protein
  misc_feature (35)..(239): NCBI GI NO: 28175808 NR Description: Similar to TAF9 RNA polymerase II
  misc_feature (35)..(227): NCBI GI NO: 33086648 NR Description: Cb1-739 [Rattus norvegicus]
  misc_feature (35)..(227): NCBI GI NO: 4507351 NR Description: TBP-associated factor 9
  misc_feature (35)..(227): NCBI GI NO: 13097291 NR Description: TATA box binding protein
  misc_feature (35)..(227): NCBI GI NO: 34576553 NR Description: TAF9 RNA polymerase II, TATA box binding protein
HHTPETPKPHPAPLMDAAGARPSAPSAAAAAVAGASVADEPRDARVVRELLRSMGLGEGEYEPRVVHQFLDLAYRYVGDVLGDAQVYADHAGKAQIDADDVRLAIQAKVNFSFSQPPPREVLLELARSRNRMPLPKSIAPPGSIPLPPEQDTLLAQNYQLLPPLKPPPQYEENEDENEESNPSLTPNPANSNPTFSQDQRSNEQQHTPQHGQRVSFQLNAVAAAAAKRPRMTVDQLNIG

SEQ ID NO: 32343 - protein, 225 aa, Zea mays subsp. mays
  peptide (1)..(225): Ceres Seq. ID no. 12374372
  misc_feature (18)..(147): Pfam Name: Pfam Description:  Transcription initiation factor IID
  misc_feature (107)..(225): NCBI GI NO: 30017563 NR Description: putative transcription initiation factor
  misc_feature (1)..(106): NCBI GI NO: 30017563 NR Description: putative transcription initiation factor
  misc_feature (18)..(205): NCBI GI NO: 15221048 NR Description: transcriptional activation factor TAFII32,putative
  misc_feature (2)..(184): NCBI GI NO: 24059851 NR Description: transcriptional activation factor TAFII32-like
  misc_feature (21)..(225): NCBI GI NO: 18079237 NR Description: TAF9 RNA polymerase II, TATA box binding protein
  misc_feature (21)..(225): NCBI GI NO: 28175808 NR Description: Similar to TAF9 RNA polymerase II
  misc_feature (21)..(213): NCBI GI NO: 33086648 NR Description: Cb1-739 [Rattus norvegicus]
  misc_feature (21)..(213): NCBI GI NO: 4507351 NR Description: TBP-associated factor 9
  misc_feature (21)..(213): NCBI GI NO: 13097291 NR Description: TATA box binding protein
  misc_feature (21)..(213): NCBI GI NO: 34576553 NR Description: TAF9 RNA polymerase II, TATA box binding protein
MDAAGARPSAPSAAAAAVAGASVADEPRDARVVRELLRSMGLGEGEYEPRVVHQFLDLAYRYVGDVLGDAQVYADHAGKAQIDADDVRLAIQAKVNFSFSQPPPREVLLELARSRNRMPLPKSIAPPGSIPLPPEQDTLLAQNYQLLPPLKPPPQYEENEDENEESNPSLTPNPANSNPTFSQDQRSNEQQHTPQHGQRVSFQLNAVAAAAAKRPRMTVDQLNIG

SEQ ID NO: 32344 - protein, 186 aa, Zea mays subsp. mays
  peptide (1)..(186): Ceres Seq. ID no. 12374373
  misc_feature (1)..(108): Pfam Name: Pfam Description:  Transcription initiation factor IID
  misc_feature (68)..(186): NCBI GI NO: 30017563 NR Description: putative transcription initiation factor
  misc_feature (1)..(67): NCBI GI NO: 30017563 NR Description: putative transcription initiation factor
  misc_feature (1)..(166): NCBI GI NO: 15221048 NR Description: transcriptional activation factor TAFII32,putative
  misc_feature (1)..(145): NCBI GI NO: 24059851 NR Description: transcriptional activation factor TAFII32-like
  misc_feature (1)..(186): NCBI GI NO: 18079237 NR Description: TAF9 RNA polymerase II, TATA box binding protein
  misc_feature (1)..(186): NCBI GI NO: 28175808 NR Description: Similar to TAF9 RNA polymerase II
  misc_feature (1)..(174): NCBI GI NO: 33086648 NR Description: Cb1-739 [Rattus norvegicus]
  misc_feature (1)..(174): NCBI GI NO: 4507351 NR Description: TBP-associated factor 9
  misc_feature (1)..(174): NCBI GI NO: 13097291 NR Description: TATA box binding protein
  misc_feature (1)..(174): NCBI GI NO: 34576553 NR Description: TAF9 RNA polymerase II, TATA box binding protein
MGLGEGEYEPRVVHQFLDLAYRYVGDVLGDAQVYADHAGKAQIDADDVRLAIQAKVNFSFSQPPPREVLLELARSRNRMPLPKSIAPPGSIPLPPEQDTLLAQNYQLLPPLKPPPQYEENEDENEESNPSLTPNPANSNPTFSQDQRSNEQQHTPQHGQRVSFQLNAVAAAAAKRPRMTVDQLNIG

SEQ ID NO: 32345 - DNA, 1701 bp, Zea mays subsp. mays
  misc_feature (1)..(1701): Ceres Seq. ID no. 12379394
aactcgtggaacctacagggctttaacttctcccaacttcctcaaacaaatcctagcatcttcctaccccgtcccgatccatccatggcagcccctaccgtcgtcttactgcccgtgtggggtgctggccacctcatgtccatgctcgacgccggcaagcggctgctcacccgcgggggtcgcgcgctctcgctcaccgtgctcgtcatgcgagcgcccacggagcagctcgcggccgatctcgacgcccacatacgcagggaggaggcatcgggcctcgacgtccgcttcgtccgcctccccgccgttcagcccccgacgcacttccacggcatcgaggagttcatctccaggctggtacagctgcacgcgccccacgtcagggcggctatctccagcctggcttccccggtggcagcggtcgttatggacttcttctgcacggcgctgctcgacgtgacccgcgagctcgccgtgcccgcgtacgtctacttcactgccagcgccgggatgctcgcgttcttcctccgcctcccgtcgctccacgaggaggtgacggtccagttcgaggagatggagggcgcggtggatgtgcccgggctgccgcccgtgccgccgtcttccctgccggtgccagtgatggacaagaaccacccgaattacacgtggttcatgtaccacggcaggcgcttcgccgaggccgacggcatcatcgtcaacacggctgccgagctcgagcagagcgtgcttgctgccatcgccgacgggcggtgcacgccgggtgtccgtgccccgacggtctatccaattggcccggttatctcgttcagcccccccgcccactaacacagaacatccgcacgagtgcgtgcggtggctcgacacgcagcccgcggcctccgtggtgctcctctgcttcgggagccaagggttctccgcggcgccacaggcgcacgagatcgcgcacggcctggagcgtagcggccaccgcttcctctgggtgctgcgcggcccaccggcacccggcgagcggcacccgtcggacgcgaacctctccgagctgctccccgatggattcctcgaaaggaccaagggcagaggcctggtgtggccgacgaaggcgccgcagaaagagatactagcccacgccgccgttggtggtttcgtgacacacggcggctggaactcggtgctcgagagcctgtggttcggggtgccgatggcaccgtggccgctgtacgccgagcagcacctgaacgcgttcacgctggtggcctatgtaggcgtcgccgtggcgatgaaggtggacaggaagaggaacaatttcgtggaggcctcggagctggagcgagcggtgaaggagctgatgggcggtggcgaggaagggaggaaggcgagggagaaggccatggagatgagggatgcctgcaggaacgccgtggaggagggtggctcatcctactcttcactacgaaggctatcagagaagatatgtaaagtcgacaagaacctatgagtctgacgatgagaggcaattttacatcacattctttattgctgtaaactagcagtaagagaggatgtgattgattaaggttgagaataaattcttatcattgaatataaattagatgaatgatatattttatctaaaaataaagtaaaaatcaaacacctataatttggcaatttctattatat

SEQ ID NO: 32346 - protein, 281 aa, Zea mays subsp. mays
  peptide (1)..(281): Ceres Seq. ID no. 12379395
  misc_feature (34)..(274): Pfam Name: Pfam Description:  UDP-glucoronosyl and UDP-glucosyl transferase
  misc_feature (29)..(280): NCBI GI NO: 34394683 NR Description: putative flavonol 3-O-glucosyltransferase
  misc_feature (29)..(279): NCBI GI NO: 34394651 NR Description: putative glucosyltransferase
  misc_feature (31)..(275): NCBI GI NO: 34394680 NR Description: putative glucosyltransferase
  misc_feature (29)..(279): NCBI GI NO: 34394653 NR Description: putative glucosyltransferase-3
  misc_feature (28)..(274): NCBI GI NO: 34394676 NR Description: putative glucosyltransferase
  misc_feature (30)..(274): NCBI GI NO: 22535568 NR Description: putative glucosyltransferase
  misc_feature (209)..(280): NCBI GI NO: 19911213 NR Description: glucosyltransferase like protein [Vigna angularis]
  misc_feature (115)..(157): NCBI GI NO: 19911213 NR Description: glucosyltransferase like protein [Vigna angularis]
  misc_feature (29)..(275): NCBI GI NO: 14349251 NR Description: glucosyltransferase [Nicotiana tabacum]
  misc_feature (29)..(281): NCBI GI NO: 34898742 NR Description: putative betanidin 6-O-glucosyltransferase
NSWNLQGFNFSQLPQTNPSIFLPRPDPSMAAPTVVLLPVWGAGHLMSMLDAGKRLLTRGGRALSLTVLVMRAPTEQLAADLDAHIRREEASGLDVRFVRLPAVQPPTHFHGIEEFISRLVQLHAPHVRAAISSLASPVAAVVMDFFCTALLDVTRELAVPAYVYFTASAGMLAFFLRLPSLHEEVTVQFEEMEGAVDVPGLPPVPPSSLPVPVMDKNHPNYTWFMYHGRRFAEADGIIVNTAAELEQSVLAAIADGRCTPGVRAPTVYPIGPVISFSPPAH

SEQ ID NO: 32347 - protein, 253 aa, Zea mays subsp. mays
  peptide (1)..(253): Ceres Seq. ID no. 12379396
  misc_feature (6)..(246): Pfam Name: Pfam Description:  UDP-glucoronosyl and UDP-glucosyl transferase
  misc_feature (1)..(252): NCBI GI NO: 34394683 NR Description: putative flavonol 3-O-glucosyltransferase
  misc_feature (1)..(251): NCBI GI NO: 34394651 NR Description: putative glucosyltransferase
  misc_feature (3)..(247): NCBI GI NO: 34394680 NR Description: putative glucosyltransferase
  misc_feature (1)..(251): NCBI GI NO: 34394653 NR Description: putative glucosyltransferase-3
  misc_feature (1)..(246): NCBI GI NO: 34394676 NR Description: putative glucosyltransferase
  misc_feature (2)..(246): NCBI GI NO: 22535568 NR Description: putative glucosyltransferase
  misc_feature (181)..(252): NCBI GI NO: 19911213 NR Description: glucosyltransferase like protein [Vigna angularis]
  misc_feature (87)..(129): NCBI GI NO: 19911213 NR Description: glucosyltransferase like protein [Vigna angularis]
  misc_feature (1)..(247): NCBI GI NO: 14349251 NR Description: glucosyltransferase [Nicotiana tabacum]
  misc_feature (1)..(253): NCBI GI NO: 34898742 NR Description: putative betanidin 6-O-glucosyltransferase
MAAPTVVLLPVWGAGHLMSMLDAGKRLLTRGGRALSLTVLVMRAPTEQLAADLDAHIRREEASGLDVRFVRLPAVQPPTHFHGIEEFISRLVQLHAPHVRAAISSLASPVAAVVMDFFCTALLDVTRELAVPAYVYFTASAGMLAFFLRLPSLHEEVTVQFEEMEGAVDVPGLPPVPPSSLPVPVMDKNHPNYTWFMYHGRRFAEADGIIVNTAAELEQSVLAAIADGRCTPGVRAPTVYPIGPVISFSPPAH

SEQ ID NO: 32348 - protein, 236 aa, Zea mays subsp. mays
  peptide (1)..(236): Ceres Seq. ID no. 12379397
  misc_feature (1)..(229): Pfam Name: Pfam Description:  UDP-glucoronosyl and UDP-glucosyl transferase
  misc_feature (1)..(235): NCBI GI NO: 34394683 NR Description: putative flavonol 3-O-glucosyltransferase
  misc_feature (1)..(234): NCBI GI NO: 34394651 NR Description: putative glucosyltransferase
  misc_feature (1)..(230): NCBI GI NO: 34394680 NR Description: putative glucosyltransferase
  misc_feature (1)..(234): NCBI GI NO: 34394653 NR Description: putative glucosyltransferase-3
  misc_feature (1)..(229): NCBI GI NO: 34394676 NR Description: putative glucosyltransferase
  misc_feature (1)..(229): NCBI GI NO: 22535568 NR Description: putative glucosyltransferase
  misc_feature (164)..(235): NCBI GI NO: 19911213 NR Description: glucosyltransferase like protein [Vigna angularis]
  misc_feature (70)..(112): NCBI GI NO: 19911213 NR Description: glucosyltransferase like protein [Vigna angularis]
  misc_feature (1)..(230): NCBI GI NO: 14349251 NR Description: glucosyltransferase [Nicotiana tabacum]
  misc_feature (1)..(236): NCBI GI NO: 34898742 NR Description: putative betanidin 6-O-glucosyltransferase
MSMLDAGKRLLTRGGRALSLTVLVMRAPTEQLAADLDAHIRREEASGLDVRFVRLPAVQPPTHFHGIEEFISRLVQLHAPHVRAAISSLASPVAAVVMDFFCTALLDVTRELAVPAYVYFTASAGMLAFFLRLPSLHEEVTVQFEEMEGAVDVPGLPPVPPSSLPVPVMDKNHPNYTWFMYHGRRFAEADGIIVNTAAELEQSVLAAIADGRCTPGVRAPTVYPIGPVISFSPPAH

SEQ ID NO: 32349 - DNA, 1417 bp, Zea mays subsp. mays
  misc_feature (1)..(1417): Ceres Seq. ID no. 12364906
tttttttttctcctccgccttccactcatccttgcccctgcctgccgtcgtgcatcatcatctccggccagggccagggcattcgtctccgcctccggtccggcctcctccactccgcgccccccagacgcgtcgctgcgtagctgctggccgccatggccaccgtcatggccgcggccgtctcgtccttcccgtcctcctcggccgtcgtcgccaaggcgtcgccggcgtccccctgtgccgccccgcacttccgcccgagggccgtgcgggccgctatccgggcgcaggcgtccgccgtcgaggcgcccgccacggccaaggccaagaaggagtccaagaagcaggaggagggcgtcgtcaccaacctatacaagcccaaggagccgtacgtcggcaggtgcctcctcaacaccaagatcaccggcgacgatgcgccgggggagacgtggcacatggtcttcagcaccgaaggcaagatcccgtacagagagggccagtccatcggcgtcatcgccgatggcgtcgacaagaacggcaagccgcacaaggtcaggctctactccatcgccagcagcgcgatcggcgacttcggcgactccaagacagtctcgctgtgtgtcaagaggctcatctacaccaacgatgccggagagatcgtcaaaggagtctgctccaacttcttatgtgatcttcagccaggtgataacgtccagataacaggaccagtcggcaaagaaatgctgatgcccaaagaccccaacgctaccattataatgcttgccaccggtacaggtatcgctccgttccgatcgttcctgtggaagatgttctttgagaagcatgacgactacaagttcaacggtctgggctggctcttcctgggtgttccaacgagcagctcgttgctctacaaggaggagttcgggaagatgaaggagagagcgccggagaacttccgggtcgactacgccgtcagccgggagcagacgaacgcggcgggggagaggatgtacatccagacccgtatggcggagtacaaagaggagctgtgggagctcctgaagaaggacaacacctacgtctacatgtgtgggttgaaaggcatggagaagggtatcgatgacattatggtgtcactggctgaaaaagacggaatcgactggttcgactacaagaagcagctgaagaggggagatcaatggaatgtggaggtctactaaccgctgaattttgcagctgacattttgtgttgtgcgtatctgtaagtgaggccagggtgtactacgtatataatgtagatagtgagtgtgttctgcgtttttttactattgccgtctctgtttatagatttgtataagtactcttaatattatgcctattcgattttttatatgagtaatgtgatcaagtgccc

SEQ ID NO: 32350 - protein, 355 aa, Zea mays subsp. mays
  peptide (1)..(355): Ceres Seq. ID no. 12364907
  misc_feature (203)..(325): Pfam Name: Pfam Description:  Oxidoreductase NAD-binding domain
  misc_feature (1)..(355): NCBI GI NO: 6561889 NR Description: ferredoxin [Zea mays]
  misc_feature (42)..(355): NCBI GI NO: 13096165 NR Description: Chain A
  misc_feature (1)..(355): NCBI GI NO: 6561891 NR Description: ferredoxin [Zea mays]
  misc_feature (1)..(355): NCBI GI NO: 20302473 NR Description: ferredoxin-NADP(H) oxidoreductase
  misc_feature (1)..(355): NCBI GI NO: 20302471 NR Description: ferredoxin-NADP(H) oxidoreductase
  misc_feature (1)..(355): NCBI GI NO: 729477 NR Description: Ferredoxin--NADP reductase, chloroplast precursor
  misc_feature (1)..(355): NCBI GI NO: 15239282 NR Description: ferredoxin-NADP+ reductase; protein id:At5g66190
  misc_feature (1)..(355): NCBI GI NO: 6899972 NR Description: chloroplast ferredoxin-NADP+ oxidoreductaseprecursor
  misc_feature (1)..(355): NCBI GI NO: 729479 NR Description: Ferredoxin--NADP reductase, chloroplast precursor
  misc_feature (44)..(355): NCBI GI NO: 16331051 NR Description: ferredoxin-NADP oxidoreductase
MATVMAAAVSSFPSSSAVVAKASPASPCAAPHFRPRAVRAAIRAQASAVEAPATAKAKKESKKQEEGVVTNLYKPKEPYVGRCLLNTKITGDDAPGETWHMVFSTEGKIPYREGQSIGVIADGVDKNGKPHKVRLYSIASSAIGDFGDSKTVSLCVKRLIYTNDAGEIVKGVCSNFLCDLQPGDNVQITGPVGKEMLMPKDPNATIIMLATGTGIAPFRSFLWKMFFEKHDDYKFNGLGWLFLGVPTSSSLLYKEEFGKMKERAPENFRVDYAVSREQTNAAGERMYIQTRMAEYKEELWELLKKDNTYVYMCGLKGMEKGIDDIMVSLAEKDGIDWFDYKKQLKRGDQWNVEVY

SEQ ID NO: 32351 - protein, 351 aa, Zea mays subsp. mays
  peptide (1)..(351): Ceres Seq. ID no. 12364908
  misc_feature (199)..(321): Pfam Name: Pfam Description:  Oxidoreductase NAD-binding domain
  misc_feature (1)..(351): NCBI GI NO: 6561889 NR Description: ferredoxin [Zea mays]
  misc_feature (38)..(351): NCBI GI NO: 13096165 NR Description: Chain A
  misc_feature (1)..(351): NCBI GI NO: 6561891 NR Description: ferredoxin [Zea mays]
  misc_feature (1)..(351): NCBI GI NO: 20302473 NR Description: ferredoxin-NADP(H) oxidoreductase
  misc_feature (1)..(351): NCBI GI NO: 20302471 NR Description: ferredoxin-NADP(H) oxidoreductase
  misc_feature (1)..(351): NCBI GI NO: 729477 NR Description: Ferredoxin--NADP reductase, chloroplast precursor
  misc_feature (1)..(351): NCBI GI NO: 15239282 NR Description: ferredoxin-NADP+ reductase; protein id:At5g66190
  misc_feature (1)..(351): NCBI GI NO: 6899972 NR Description: chloroplast ferredoxin-NADP+ oxidoreductaseprecursor
  misc_feature (1)..(351): NCBI GI NO: 729479 NR Description: Ferredoxin--NADP reductase, chloroplast precursor
  misc_feature (40)..(351): NCBI GI NO: 16331051 NR Description: ferredoxin-NADP oxidoreductase
MAAAVSSFPSSSAVVAKASPASPCAAPHFRPRAVRAAIRAQASAVEAPATAKAKKESKKQEEGVVTNLYKPKEPYVGRCLLNTKITGDDAPGETWHMVFSTEGKIPYREGQSIGVIADGVDKNGKPHKVRLYSIASSAIGDFGDSKTVSLCVKRLIYTNDAGEIVKGVCSNFLCDLQPGDNVQITGPVGKEMLMPKDPNATIIMLATGTGIAPFRSFLWKMFFEKHDDYKFNGLGWLFLGVPTSSSLLYKEEFGKMKERAPENFRVDYAVSREQTNAAGERMYIQTRMAEYKEELWELLKKDNTYVYMCGLKGMEKGIDDIMVSLAEKDGIDWFDYKKQLKRGDQWNVEVY

SEQ ID NO: 32352 - protein, 255 aa, Zea mays subsp. mays
  peptide (1)..(255): Ceres Seq. ID no. 12364909
  misc_feature (103)..(225): Pfam Name: Pfam Description:  Oxidoreductase NAD-binding domain
  misc_feature (1)..(255): NCBI GI NO: 6561889 NR Description: ferredoxin [Zea mays]
  misc_feature (1)..(255): NCBI GI NO: 13096165 NR Description: Chain A
  misc_feature (1)..(255): NCBI GI NO: 6561891 NR Description: ferredoxin [Zea mays]
  misc_feature (1)..(255): NCBI GI NO: 20302473 NR Description: ferredoxin-NADP(H) oxidoreductase
  misc_feature (1)..(255): NCBI GI NO: 20302471 NR Description: ferredoxin-NADP(H) oxidoreductase
  misc_feature (1)..(255): NCBI GI NO: 729477 NR Description: Ferredoxin--NADP reductase, chloroplast precursor
  misc_feature (1)..(255): NCBI GI NO: 15239282 NR Description: ferredoxin-NADP+ reductase; protein id:At5g66190
  misc_feature (1)..(255): NCBI GI NO: 6899972 NR Description: chloroplast ferredoxin-NADP+ oxidoreductaseprecursor
  misc_feature (1)..(255): NCBI GI NO: 729479 NR Description: Ferredoxin--NADP reductase, chloroplast precursor
  misc_feature (1)..(255): NCBI GI NO: 16331051 NR Description: ferredoxin-NADP oxidoreductase
MVFSTEGKIPYREGQSIGVIADGVDKNGKPHKVRLYSIASSAIGDFGDSKTVSLCVKRLIYTNDAGEIVKGVCSNFLCDLQPGDNVQITGPVGKEMLMPKDPNATIIMLATGTGIAPFRSFLWKMFFEKHDDYKFNGLGWLFLGVPTSSSLLYKEEFGKMKERAPENFRVDYAVSREQTNAAGERMYIQTRMAEYKEELWELLKKDNTYVYMCGLKGMEKGIDDIMVSLAEKDGIDWFDYKKQLKRGDQWNVEVY

SEQ ID NO: 32353 - DNA, 1365 bp, Zea mays subsp. mays
  misc_feature (1)..(1365): Ceres Seq. ID no. 12342083
agcctcgccgtcgattctctcccctccccttcgtcctcacgagcgacgaacgtcacgaacccctcctccacctcctgctactatcggcgccggagccctcctctggtctcaccgtgcaaatccccaaccccgaggcagacgcaggccagcccctgtgatggcacagaccaacggcaacgaccccttcagtccccctgtttcccaagaaagggttgtgataacaaacaagcatggtgagaggcttgtggggctgctgcatcacaccgcttcaaacaagattgtggtcttgtgccatggttttatagctaccaagaatgacagcctcattcttgacctggcggaagcgttgacaaaggaagggatcagtgtcttccgcttcgatttcagtggaaatggagaaagtgaaggccagtttgagtatggcaactacaggaaggaggctgacgatttgcattctgttgtattgtatctgtgtcaaaaaagttatgacatagcagctgttgttggtcatagcaaaggaggagatgtggtgattctatatgcttctgttcatgatgatgtgggcacaattgttaatttatcgggccggtttgatttaacaaaaggcattgaagaacggataggggaagggtctatcgatagaataaacaaagaaggctaccttgatgtcaaggacaaatctgaaaatgccagctacagggtaaccaaagaaagtttgatggaacggcttaatactgatatgcgcgctgcaagtgtttccataagcaagggatgcaggttcttaacagtccatggctcagctgataagaccatacccgtagaagatgcccatgagtttgcgaagcatatacccaaccatgaactgcgtgtcatagaaggagcaaatcataactacacctcacatcgcaaagaagttgctgatgcagtagtagatttcatcacgtccaatgtaaccgtataataaggctgggggatgaatgtcattccagaccacttggtcatgcacctatcgatcccctccatcatggggcaatactggtactaggtgtctattatcttctgaaccgaaaaccccatgtcatgcaggtttgatatgatgatgttgctcgtatgtgctcttaagaattactgtaaatattgaactcctggtagacttgtatgccgcagctcgcagtttatataggctcatatctctatagttttttttttctttcttctttgttcgagggctctattcccttgctcttttttgcatggttcatgtaagttttcttccttgtaccctatagttatttaatttatttaaatttggcactgtggactattttgtacaagaagtcttagtgcaaacgtacaagcaggccc

SEQ ID NO: 32354 - protein, 319 aa, Zea mays subsp. mays
  peptide (1)..(319): Ceres Seq. ID no. 12342084
  misc_feature (1)..(316): NCBI GI NO: 34913068 NR Description: P0013G02.26
  misc_feature (9)..(316): NCBI GI NO: 34913064 NR Description: P0013G02.24
  misc_feature (67)..(316): NCBI GI NO: 21554728 NR Description: putative esterase [Arabidopsis thaliana]
  misc_feature (60)..(313): NCBI GI NO: 15228202 NR Description: putative protein; protein id: At3g47590.1
  misc_feature (67)..(316): NCBI GI NO: 15232826 NR Description: putative protein; protein id: At3g47560
  misc_feature (67)..(316): NCBI GI NO: 22135864 NR Description: putative protein [Arabidopsis thaliana]
  misc_feature (67)..(313): NCBI GI NO: 15220578 NR Description: hypothetical protein; protein id: At1g29840.1
  misc_feature (66)..(312): NCBI GI NO: 11358640 NR Description: probable esterase-like protein - Arabidopsisthaliana
  misc_feature (66)..(312): NCBI GI NO: 18416707 NR Description: putative esterase - like protein
  misc_feature (70)..(319): NCBI GI NO: 15224799 NR Description: putative esterase; protein id: At2g19550.1
ASPSILSPPLRPHERRTSRTPPPPPATIGAGALLWSHRANPQPRGRRRPAPVMAQTNGNDPFSPPVSQERVVITNKHGERLVGLLHHTASNKIVVLCHGFIATKNDSLILDLAEALTKEGISVFRFDFSGNGESEGQFEYGNYRKEADDLHSVVLYLCQKSYDIAAVVGHSKGGDVVILYASVHDDVGTIVNLSGRFDLTKGIEERIGEGSIDRINKEGYLDVKDKSENASYRVTKESLMERLNTDMRAASVSISKGCRFLTVHGSADKTIPVEDAHEFAKHIPNHELRVIEGANHNYTSHRKEVADAVVDFITSNVTV

SEQ ID NO: 32355 - protein, 267 aa, Zea mays subsp. mays
  peptide (1)..(267): Ceres Seq. ID no. 12342085
  misc_feature (1)..(264): NCBI GI NO: 34913068 NR Description: P0013G02.26
  misc_feature (1)..(264): NCBI GI NO: 34913064 NR Description: P0013G02.24
  misc_feature (15)..(264): NCBI GI NO: 21554728 NR Description: putative esterase [Arabidopsis thaliana]
  misc_feature (8)..(261): NCBI GI NO: 15228202 NR Description: putative protein; protein id: At3g47590.1
  misc_feature (15)..(264): NCBI GI NO: 15232826 NR Description: putative protein; protein id: At3g47560
  misc_feature (15)..(264): NCBI GI NO: 22135864 NR Description: putative protein [Arabidopsis thaliana]
  misc_feature (15)..(261): NCBI GI NO: 15220578 NR Description: hypothetical protein; protein id: At1g29840.1
  misc_feature (14)..(260): NCBI GI NO: 11358640 NR Description: probable esterase-like protein - Arabidopsisthaliana
  misc_feature (14)..(260): NCBI GI NO: 18416707 NR Description: putative esterase - like protein
  misc_feature (18)..(267): NCBI GI NO: 15224799 NR Description: putative esterase; protein id: At2g19550.1
MAQTNGNDPFSPPVSQERVVITNKHGERLVGLLHHTASNKIVVLCHGFIATKNDSLILDLAEALTKEGISVFRFDFSGNGESEGQFEYGNYRKEADDLHSVVLYLCQKSYDIAAVVGHSKGGDVVILYASVHDDVGTIVNLSGRFDLTKGIEERIGEGSIDRINKEGYLDVKDKSENASYRVTKESLMERLNTDMRAASVSISKGCRFLTVHGSADKTIPVEDAHEFAKHIPNHELRVIEGANHNYTSHRKEVADAVVDFITSNVTV

SEQ ID NO: 32356 - DNA, 1233 bp, Zea mays subsp. mays
  misc_feature (1)..(1233): Ceres Seq. ID no. 12345079
cccatttcctcttctccaaaccccactcaccgcaacgagccgccggatccatggccggcaaagacgggtccccgcctcctcccccgctcccatcctaccctgagatgatcgtggaggcaatccgggcgctgggactcgagaacggctgcaacaagactgcgatctcggactacatcaagggcagctacggctccaacctccctgcccagcacaacgccgtcctcacgggtcacctcgcccgcatgaaggctaccggcgagctcgccttcctcaggaacaactatctcctccccaacgaggacgaagcctccccgctgagcaccggtgggcacaagggccccgccgccgccgaggaggagtctactggcgtgttggacgttggtgacgatgtgttgcttgcttcccctctcgtcatcgacgctgacgccgtcgacattgatgtgcctgctccagctcccgttgtcaccgctgatgtcgacgatattgacgtgcctgctccagctcccgttgtcaccgctgatgtcaaccctgttcataccaagcggggacgcggacggcccccgaagcccaaggaccccgttgctgagggctacggtggtaagcccgctacagctcccgtcgccgccgctgccgtgcctgtcaagcgcgggcgcggacgtccgccgaaacccaagaaccccgtcgccgaggactcagctcccactgcggcttccgttgtcaccactgatggcaatgccgtgcctgtgaagcgtgggcgcggacgccccccaaagctcaaggaccccatcaatgtggccactgaccaggccaccagcggcatgctgagcccacgtggccgtgggcgcccgcccaagaaggccaaggtcgccgtggaagatcccagaggtgaacctgctgcagctcgagacgttgttgctgatgccagtgctgtacatgtcaagcgtgggcgtggacggcccccaagatgagtcctgcagctgcagtgactgggaagccgtctgagtcttaaaccatgaacattgaatcctatggtggtaatggtttgggagtagcttggtgtatcaaattgagttctgaactatcttatccagttgggtgcatagcatcggaagactaatctcaataatctggatggtttctgtacattgaatggcggatgatgcgtaatagttgactgctgctgaagacttgacttaatcattgctattttcttctcattgttgcgtgttaatt

SEQ ID NO: 32357 - protein, 321 aa, Zea mays subsp. mays
  peptide (1)..(321): Ceres Seq. ID no. 12345080
  misc_feature (30)..(104): Pfam Name: Pfam Description:  linker histone H1 and H5 family
  misc_feature (207)..(319): NCBI GI NO: 20502966 NR Description: HMG-I/Y protein HMGa [Triticum aestivum]
  misc_feature (22)..(113): NCBI GI NO: 20502966 NR Description: HMG-I/Y protein HMGa [Triticum aestivum]
  misc_feature (162)..(258): NCBI GI NO: 20502966 NR Description: HMG-I/Y protein HMGa [Triticum aestivum]
  misc_feature (14)..(232): NCBI GI NO: 7439646 NR Description: DNA binding protein PF1 - rice
  misc_feature (210)..(321): NCBI GI NO: 7439646 NR Description: DNA binding protein PF1 - rice
  misc_feature (21)..(193): NCBI GI NO: 11544762 NR Description: HMGI/Y protein [Zea mays]
  misc_feature (21)..(193): NCBI GI NO: 9837562 NR Description: high mobility group I/Y-2 [Zea mays]
  misc_feature (21)..(193): NCBI GI NO: 4585621 NR Description: HMGI/Y protein [Zea mays]
  misc_feature (29)..(194): NCBI GI NO: 629769 NR Description: histone-like DNA-binding protein PF 1 - oat
  misc_feature (30)..(306): NCBI GI NO: 4218141 NR Description: HMR1 protein [Antirrhinum majus]
HFLFSKPHSPQRAAGSMAGKDGSPPPPPLPSYPEMIVEAIRALGLENGCNKTAISDYIKGSYGSNLPAQHNAVLTGHLARMKATGELAFLRNNYLLPNEDEASPLSTGGHKGPAAAEEESTGVLDVGDDVLLASPLVIDADAVDIDVPAPAPVVTADVDDIDVPAPAPVVTADVNPVHTKRGRGRPPKPKDPVAEGYGGKPATAPVAAAAVPVKRGRGRPPKPKNPVAEDSAPTAASVVTTDGNAVPVKRGRGRPPKLKDPINVATDQATSGMLSPRGRGRPPKKAKVAVEDPRGEPAAARDVVADASAVHVKRGRGRPPR

SEQ ID NO: 32358 - protein, 305 aa, Zea mays subsp. mays
  peptide (1)..(305): Ceres Seq. ID no. 12345081
  misc_feature (14)..(88): Pfam Name: Pfam Description:  linker histone H1 and H5 family
  misc_feature (191)..(303): NCBI GI NO: 20502966 NR Description: HMG-I/Y protein HMGa [Triticum aestivum]
  misc_feature (6)..(97): NCBI GI NO: 20502966 NR Description: HMG-I/Y protein HMGa [Triticum aestivum]
  misc_feature (146)..(242): NCBI GI NO: 20502966 NR Description: HMG-I/Y protein HMGa [Triticum aestivum]
  misc_feature (1)..(216): NCBI GI NO: 7439646 NR Description: DNA binding protein PF1 - rice
  misc_feature (194)..(305): NCBI GI NO: 7439646 NR Description: DNA binding protein PF1 - rice
  misc_feature (5)..(177): NCBI GI NO: 11544762 NR Description: HMGI/Y protein [Zea mays]
  misc_feature (5)..(177): NCBI GI NO: 9837562 NR Description: high mobility group I/Y-2 [Zea mays]
  misc_feature (5)..(177): NCBI GI NO: 4585621 NR Description: HMGI/Y protein [Zea mays]
  misc_feature (13)..(178): NCBI GI NO: 629769 NR Description: histone-like DNA-binding protein PF 1 - oat
  misc_feature (14)..(290): NCBI GI NO: 4218141 NR Description: HMR1 protein [Antirrhinum majus]
MAGKDGSPPPPPLPSYPEMIVEAIRALGLENGCNKTAISDYIKGSYGSNLPAQHNAVLTGHLARMKATGELAFLRNNYLLPNEDEASPLSTGGHKGPAAAEEESTGVLDVGDDVLLASPLVIDADAVDIDVPAPAPVVTADVDDIDVPAPAPVVTADVNPVHTKRGRGRPPKPKDPVAEGYGGKPATAPVAAAAVPVKRGRGRPPKPKNPVAEDSAPTAASVVTTDGNAVPVKRGRGRPPKLKDPINVATDQATSGMLSPRGRGRPPKKAKVAVEDPRGEPAAARDVVADASAVHVKRGRGRPPR

SEQ ID NO: 32359 - protein, 287 aa, Zea mays subsp. mays
  peptide (1)..(287): Ceres Seq. ID no. 12345082
  misc_feature (1)..(70): Pfam Name: Pfam Description:  linker histone H1 and H5 family
  misc_feature (173)..(285): NCBI GI NO: 20502966 NR Description: HMG-I/Y protein HMGa [Triticum aestivum]
  misc_feature (1)..(79): NCBI GI NO: 20502966 NR Description: HMG-I/Y protein HMGa [Triticum aestivum]
  misc_feature (128)..(224): NCBI GI NO: 20502966 NR Description: HMG-I/Y protein HMGa [Triticum aestivum]
  misc_feature (1)..(198): NCBI GI NO: 7439646 NR Description: DNA binding protein PF1 - rice
  misc_feature (176)..(287): NCBI GI NO: 7439646 NR Description: DNA binding protein PF1 - rice
  misc_feature (1)..(159): NCBI GI NO: 11544762 NR Description: HMGI/Y protein [Zea mays]
  misc_feature (1)..(159): NCBI GI NO: 9837562 NR Description: high mobility group I/Y-2 [Zea mays]
  misc_feature (1)..(159): NCBI GI NO: 4585621 NR Description: HMGI/Y protein [Zea mays]
  misc_feature (1)..(160): NCBI GI NO: 629769 NR Description: histone-like DNA-binding protein PF 1 - oat
  misc_feature (1)..(272): NCBI GI NO: 4218141 NR Description: HMR1 protein [Antirrhinum majus]
MIVEAIRALGLENGCNKTAISDYIKGSYGSNLPAQHNAVLTGHLARMKATGELAFLRNNYLLPNEDEASPLSTGGHKGPAAAEEESTGVLDVGDDVLLASPLVIDADAVDIDVPAPAPVVTADVDDIDVPAPAPVVTADVNPVHTKRGRGRPPKPKDPVAEGYGGKPATAPVAAAAVPVKRGRGRPPKPKNPVAEDSAPTAASVVTTDGNAVPVKRGRGRPPKLKDPINVATDQATSGMLSPRGRGRPPKKAKVAVEDPRGEPAAARDVVADASAVHVKRGRGRPPR

SEQ ID NO: 32360 - DNA, 1849 bp, Zea mays subsp. mays
  misc_feature (1)..(1849): Ceres Seq. ID no. 12351282
cccccctcccccacccacccagcgtgcgaggcgatcaaaccgtgtgcgggcatggtggccgcgctgctcctgacctcggcgaccgcgctcctggcgctggcggcggcgtggctctgggactacgtcgtggtgcgcctcctttggcggccccgcgccgtggccggcatgttcagggcgcagggggtccgcgggccgccctacagcttcctcagcggctgcaaccgcgagatgaggaggatgaaggcggaggccgacgacgggctccggctggacgtccgcgaccacaactacctccccagggtgatgccccatttcctcgcctggaagcagctgtacggggagccattcctgtactggatgggtccgcggccccgggtctgcctcttcgactacgagtcggtaaggcaagttcttttcaacaagcccggtcatttcttcaaggacgacgcccacccgactatcctggcaatgatgggcaaagggctggtcctggtggaaggcaccgactgggtgcgccatcggagggtggtcaacccagccttcgccatggacaagctcaagatgatgacggagacgatggtcagctgtgctgagccactgatcaagcggtgggaacagctcgcagcagccagcagatccagcgaggacggtgggaggggagaagtgcaagtggagttcagcaagcagttccaggacctgacggcggacgttatcgcccacaccggtttcggaagcagctacaaggagggcaaagaggtgttccatacgcagaagcagctcctggcgctcgccatggcgactctcctcaacgtgcagctgccaggattcaagtatctccctaccaagaacaacaggctcaagtgggcgctagaaaagaagatgaagacgacgctcacggcgatcatacagtcgcgggtggcatccaatgggaggagtagtggatacggagacgacctgctcggcctgatgctcgaggcctggctcacagcggaacgaggaggaggggaacgggacgagtcgagcctgaccatggacgagatcatagacgagtgcaagacattcttcttcgcaggccacgagaccacgtcccatttgctcacctggacaatgttcttgctcagcgtgtacccggaatggcagcaacggctaagggacgaggtcctgagagagtgcggacaggcaaaccctactgcagacacgcttaacaaattcaatgagatgacgatggtgctcctcgagacactgagactctacggccctgtcatgctcatgctaaggaagcctacctccgacataaggctgggcagcctcagcataccgaaaggcaacgggatcgccatacccgtcccgttcctccaccgagacagagaggtctggggcgacaacgccaatgacttcgatccgttgaggtttcagaacggggtcacgaacgcggccaagaccccgcaggctcttctgtcgttctcgatcgggccgagggcatgcatcggccagaacttcgcgatgctggaagcgaagtcggtgatggccatgatcatgaagaagttctccttcacgctttcctcgagctacgtgcacgcgcctgtggattatatcacgctccagcctaagttcggccttcccatagttttgaggccactcccggatgtatgatgtgaaatggatctgtagcctgatagctgattttttttggggggtctaagtatgcataagaggtcagtattcaggacttggtttcatccgccaaacagtaaggctaaagaaccaaaacttgttgaaaactggtaactttctgggattttatgcccgtattatgtatataaatatataatgctacatagaactttgt

SEQ ID NO: 32361 - protein, 550 aa, Zea mays subsp. mays
  peptide (1)..(550): Ceres Seq. ID no. 12351283
  misc_feature (19)..(547): NCBI GI NO: 34896952 NR Description: putative cytochrome P450-related protein
  misc_feature (27)..(547): NCBI GI NO: 34913354 NR Description: putative cytochrome P450
  misc_feature (27)..(547): NCBI GI NO: 38112707 NR Description: cytochrome P450 [Triticum aestivum]
  misc_feature (17)..(547): NCBI GI NO: 22324446 NR Description: putative cytochrome P450
  misc_feature (27)..(547): NCBI GI NO: 14719280 NR Description: cytochrome P450 [Zea mays]
  misc_feature (29)..(547): NCBI GI NO: 34913346 NR Description: putative cytochrome P450
  misc_feature (248)..(549): NCBI GI NO: 28927679 NR Description: putative cytochrome P450, 5'-partial
  misc_feature (80)..(231): NCBI GI NO: 28927679 NR Description: putative cytochrome P450, 5'-partial
  misc_feature (61)..(547): NCBI GI NO: 34913350 NR Description: putative cytochrome P450
  misc_feature (29)..(544): NCBI GI NO: 34913362 NR Description: putative cytochrome P450
PPSPTHPACEAIKPCAGMVAALLLTSATALLALAAAWLWDYVVVRLLWRPRAVAGMFRAQGVRGPPYSFLSGCNREMRRMKAEADDGLRLDVRDHNYLPRVMPHFLAWKQLYGEPFLYWMGPRPRVCLFDYESVRQVLFNKPGHFFKDDAHPTILAMMGKGLVLVEGTDWVRHRRVVNPAFAMDKLKMMTETMVSCAEPLIKRWEQLAAASRSSEDGGRGEVQVEFSKQFQDLTADVIAHTGFGSSYKEGKEVFHTQKQLLALAMATLLNVQLPGFKYLPTKNNRLKWALEKKMKTTLTAIIQSRVASNGRSSGYGDDLLGLMLEAWLTAERGGGERDESSLTMDEIIDECKTFFFAGHETTSHLLTWTMFLLSVYPEWQQRLRDEVLRECGQANPTADTLNKFNEMTMVLLETLRLYGPVMLMLRKPTSDIRLGSLSIPKGNGIAIPVPFLHRDREVWGDNANDFDPLRFQNGVTNAAKTPQALLSFSIGPRACIGQNFAMLEAKSVMAMIMKKFSFTLSSSYVHAPVDYITLQPKFGLPIVLRPLPDV

SEQ ID NO: 32362 - protein, 533 aa, Zea mays subsp. mays
  peptide (1)..(533): Ceres Seq. ID no. 12351284
  misc_feature (2)..(530): NCBI GI NO: 34896952 NR Description: putative cytochrome P450-related protein
  misc_feature (10)..(530): NCBI GI NO: 34913354 NR Description: putative cytochrome P450
  misc_feature (10)..(530): NCBI GI NO: 38112707 NR Description: cytochrome P450 [Triticum aestivum]
  misc_feature (1)..(530): NCBI GI NO: 22324446 NR Description: putative cytochrome P450
  misc_feature (10)..(530): NCBI GI NO: 14719280 NR Description: cytochrome P450 [Zea mays]
  misc_feature (12)..(530): NCBI GI NO: 34913346 NR Description: putative cytochrome P450
  misc_feature (231)..(532): NCBI GI NO: 28927679 NR Description: putative cytochrome P450, 5'-partial
  misc_feature (63)..(214): NCBI GI NO: 28927679 NR Description: putative cytochrome P450, 5'-partial
  misc_feature (44)..(530): NCBI GI NO: 34913350 NR Description: putative cytochrome P450
  misc_feature (12)..(527): NCBI GI NO: 34913362 NR Description: putative cytochrome P450
MVAALLLTSATALLALAAAWLWDYVVVRLLWRPRAVAGMFRAQGVRGPPYSFLSGCNREMRRMKAEADDGLRLDVRDHNYLPRVMPHFLAWKQLYGEPFLYWMGPRPRVCLFDYESVRQVLFNKPGHFFKDDAHPTILAMMGKGLVLVEGTDWVRHRRVVNPAFAMDKLKMMTETMVSCAEPLIKRWEQLAAASRSSEDGGRGEVQVEFSKQFQDLTADVIAHTGFGSSYKEGKEVFHTQKQLLALAMATLLNVQLPGFKYLPTKNNRLKWALEKKMKTTLTAIIQSRVASNGRSSGYGDDLLGLMLEAWLTAERGGGERDESSLTMDEIIDECKTFFFAGHETTSHLLTWTMFLLSVYPEWQQRLRDEVLRECGQANPTADTLNKFNEMTMVLLETLRLYGPVMLMLRKPTSDIRLGSLSIPKGNGIAIPVPFLHRDREVWGDNANDFDPLRFQNGVTNAAKTPQALLSFSIGPRACIGQNFAMLEAKSVMAMIMKKFSFTLSSSYVHAPVDYITLQPKFGLPIVLRPLPDV

SEQ ID NO: 32363 - protein, 495 aa, Zea mays subsp. mays
  peptide (1)..(495): Ceres Seq. ID no. 12351285
  misc_feature (1)..(492): NCBI GI NO: 34896952 NR Description: putative cytochrome P450-related protein
  misc_feature (1)..(492): NCBI GI NO: 34913354 NR Description: putative cytochrome P450
  misc_feature (1)..(492): NCBI GI NO: 38112707 NR Description: cytochrome P450 [Triticum aestivum]
  misc_feature (1)..(492): NCBI GI NO: 22324446 NR Description: putative cytochrome P450
  misc_feature (1)..(492): NCBI GI NO: 14719280 NR Description: cytochrome P450 [Zea mays]
  misc_feature (1)..(492): NCBI GI NO: 34913346 NR Description: putative cytochrome P450
  misc_feature (193)..(494): NCBI GI NO: 28927679 NR Description: putative cytochrome P450, 5'-partial
  misc_feature (25)..(176): NCBI GI NO: 28927679 NR Description: putative cytochrome P450, 5'-partial
  misc_feature (6)..(492): NCBI GI NO: 34913350 NR Description: putative cytochrome P450
  misc_feature (1)..(489): NCBI GI NO: 34913362 NR Description: putative cytochrome P450
MFRAQGVRGPPYSFLSGCNREMRRMKAEADDGLRLDVRDHNYLPRVMPHFLAWKQLYGEPFLYWMGPRPRVCLFDYESVRQVLFNKPGHFFKDDAHPTILAMMGKGLVLVEGTDWVRHRRVVNPAFAMDKLKMMTETMVSCAEPLIKRWEQLAAASRSSEDGGRGEVQVEFSKQFQDLTADVIAHTGFGSSYKEGKEVFHTQKQLLALAMATLLNVQLPGFKYLPTKNNRLKWALEKKMKTTLTAIIQSRVASNGRSSGYGDDLLGLMLEAWLTAERGGGERDESSLTMDEIIDECKTFFFAGHETTSHLLTWTMFLLSVYPEWQQRLRDEVLRECGQANPTADTLNKFNEMTMVLLETLRLYGPVMLMLRKPTSDIRLGSLSIPKGNGIAIPVPFLHRDREVWGDNANDFDPLRFQNGVTNAAKTPQALLSFSIGPRACIGQNFAMLEAKSVMAMIMKKFSFTLSSSYVHAPVDYITLQPKFGLPIVLRPLPDV

SEQ ID NO: 32364 - DNA, 1739 bp, Zea mays subsp. mays
  misc_feature (1)..(1739): Ceres Seq. ID no. 12347699
accctttttcgtctctcctctgcctttccccatcgtctctccgtctacacctcatcataatcacagattcacagagcgctagggaggagagagggctagggtttcgtgctccctcacgcaacgaatccgagccggatcggggggtgcgcggagtcaccggcggcccggcgttgcctgggctgtgatacagttgcaatggcatctgtaactgatgagacagctaagattgagggtttgacatctgctgcagcctttgtggagggtggcattcaggacgcatgtgatgatgcatgcagcatttgccttgaggctttctgtgagagtgacccttctgcattgactggctgcaaacatgagttccatctccaatgcattcttgaatggtgccagagaagttcacagtgcccaatgtgttggcagcctattactatgaaggatcctaccagtcaggagctgcttgaggcagtagagcgtgagaggaatataagaactaatcaaactcggaacacaactatatttcatcatcctgctcttggggattttgagctgcagcatctgcctgttggtaatgatgctgagcttgaagagcgtatactgcagcatctagctgctgctgctgcaatgggaagggcacaccatcttggaagaagggaggggcacaggggacgatctggctctcatggtcgtccacatttcctagttttctctacacaaccaaattcaccttctgctggcacaatctcttcatcttctgctcatatggagggagaaaatgattcaaatcctgccacacctagagctagcgagtcatctccacgagctattcgcattggagaagtgggaaaccaaagtcctgggatgcttacctacgatgctgaacaggatgctgtcgtttcttccggaaatagcactcctgtatcgagtcctaggttttttaacaggagacactccactggacagtcaactccagacagggctgggccatcggatattcagtctttctcagactccctgaagtcccgcttaaatgccgtctctatgaagtacaaagaatctattacaaagagtactcgagggtggaaggagagattgttttcacgtaattcatccgtggcggatcttggttctgaagtgagaagagaagttaatgctggaattgcgtccgtatcacggatgatggagcgtctggaaactagaggaaatagcagaacaagtgatagcccggcagcatccacttctgaagttccctctgctacagaatcaagcaatgaaagggttacagagagcaactctgctgctgctgctgctggtggtggtactacccactacgggtaccagcgctagcaacgcctccgccccttgtgttgcgacatccggttcaaattaggacatgtaagggtctcagaaagaaggcttacacctgcaattcttcatcttcaaaggtttgtgagcctggcggcagagcagaagtgcagtaacatgatgccgtcatttttttctcaaccactgcataaacggctgcaaggggaaaaaaaccaaacggtgatttgatgtattggctcgataaaatggtggtgcgtgtggcctaggagaagtcggatttcatcttctgttttcgtctctttgtaaaaaaaatcgtctgagggcagatgtttaccggtataaataacggatatgtcatcttcatagtacgtggatcagttataaatatgattggaacagcaaagcttgctgctgtt

SEQ ID NO: 32365 - protein, 382 aa, Zea mays subsp. mays
  peptide (1)..(382): Ceres Seq. ID no. 12347700
  misc_feature (33)..(73): Pfam Name: RING finger Pfam Description: Zinc finger, C3HC4 type
  misc_feature (1)..(376): NCBI GI NO: 32493110 NR Description: putative RING-H2 zinc finger protein
  misc_feature (7)..(369): NCBI GI NO: 18420424 NR Description: Expressed protein; protein id: At5g22000
  misc_feature (7)..(364): NCBI GI NO: 26451710 NR Description: putative RING-H2 finger protein RHF2a
  misc_feature (8)..(369): NCBI GI NO: 30688252 NR Description: zinc finger
  misc_feature (6)..(257): NCBI GI NO: 27819501 NR Description: putative zinc finger protein
  misc_feature (1)..(114): NCBI GI NO: 32400766 NR Description: RING-H2 finger protein [Triticum aestivum]
  misc_feature (15)..(207): NCBI GI NO: 25360953 NR Description: RING-H2 finger protein RHF1a
  misc_feature (15)..(207): NCBI GI NO: 30682750 NR Description: zinc finger
  misc_feature (219)..(375): NCBI GI NO: 25360953 NR Description: RING-H2 finger protein RHF1a
  misc_feature (219)..(375): NCBI GI NO: 30682750 NR Description: zinc finger
MASVTDETAKIEGLTSAAAFVEGGIQDACDDACSICLEAFCESDPSALTGCKHEFHLQCILEWCQRSSQCPMCWQPITMKDPTSQELLEAVERERNIRTNQTRNTTIFHHPALGDFELQHLPVGNDAELEERILQHLAAAAAMGRAHHLGRREGHRGRSGSHGRPHFLVFSTQPNSPSAGTISSSSAHMEGENDSNPATPRASESSPRAIRIGEVGNQSPGMLTYDAEQDAVVSSGNSTPVSSPRFFNRRHSTGQSTPDRAGPSDIQSFSDSLKSRLNAVSMKYKESITKSTRGWKERLFSRNSSVADLGSEVRREVNAGIASVSRMMERLETRGNSRTSDSPAASTSEVPSATESSNERVTESNSAAAAAGGGTTHYGYQR

SEQ ID NO: 32366 - protein, 311 aa, Zea mays subsp. mays
  peptide (1)..(311): Ceres Seq. ID no. 12347701
  misc_feature (1)..(305): NCBI GI NO: 32493110 NR Description: putative RING-H2 zinc finger protein
  misc_feature (1)..(298): NCBI GI NO: 18420424 NR Description: Expressed protein; protein id: At5g22000
  misc_feature (1)..(293): NCBI GI NO: 26451710 NR Description: putative RING-H2 finger protein RHF2a
  misc_feature (1)..(298): NCBI GI NO: 30688252 NR Description: zinc finger
  misc_feature (1)..(186): NCBI GI NO: 27819501 NR Description: putative zinc finger protein
  misc_feature (1)..(43): NCBI GI NO: 32400766 NR Description: RING-H2 finger protein [Triticum aestivum]
  misc_feature (1)..(136): NCBI GI NO: 25360953 NR Description: RING-H2 finger protein RHF1a
  misc_feature (1)..(136): NCBI GI NO: 30682750 NR Description: zinc finger
  misc_feature (148)..(304): NCBI GI NO: 25360953 NR Description: RING-H2 finger protein RHF1a
  misc_feature (148)..(304): NCBI GI NO: 30682750 NR Description: zinc finger
MCWQPITMKDPTSQELLEAVERERNIRTNQTRNTTIFHHPALGDFELQHLPVGNDAELEERILQHLAAAAAMGRAHHLGRREGHRGRSGSHGRPHFLVFSTQPNSPSAGTISSSSAHMEGENDSNPATPRASESSPRAIRIGEVGNQSPGMLTYDAEQDAVVSSGNSTPVSSPRFFNRRHSTGQSTPDRAGPSDIQSFSDSLKSRLNAVSMKYKESITKSTRGWKERLFSRNSSVADLGSEVRREVNAGIASVSRMMERLETRGNSRTSDSPAASTSEVPSATESSNERVTESNSAAAAAGGGTTHYGYQR

SEQ ID NO: 32367 - protein, 304 aa, Zea mays subsp. mays
  peptide (1)..(304): Ceres Seq. ID no. 12347702
  misc_feature (1)..(298): NCBI GI NO: 32493110 NR Description: putative RING-H2 zinc finger protein
  misc_feature (1)..(291): NCBI GI NO: 18420424 NR Description: Expressed protein; protein id: At5g22000
  misc_feature (1)..(286): NCBI GI NO: 26451710 NR Description: putative RING-H2 finger protein RHF2a
  misc_feature (1)..(291): NCBI GI NO: 30688252 NR Description: zinc finger
  misc_feature (1)..(179): NCBI GI NO: 27819501 NR Description: putative zinc finger protein
  misc_feature (1)..(36): NCBI GI NO: 32400766 NR Description: RING-H2 finger protein [Triticum aestivum]
  misc_feature (1)..(129): NCBI GI NO: 25360953 NR Description: RING-H2 finger protein RHF1a
  misc_feature (1)..(129): NCBI GI NO: 30682750 NR Description: zinc finger
  misc_feature (141)..(297): NCBI GI NO: 25360953 NR Description: RING-H2 finger protein RHF1a
  misc_feature (141)..(297): NCBI GI NO: 30682750 NR Description: zinc finger
MKDPTSQELLEAVERERNIRTNQTRNTTIFHHPALGDFELQHLPVGNDAELEERILQHLAAAAAMGRAHHLGRREGHRGRSGSHGRPHFLVFSTQPNSPSAGTISSSSAHMEGENDSNPATPRASESSPRAIRIGEVGNQSPGMLTYDAEQDAVVSSGNSTPVSSPRFFNRRHSTGQSTPDRAGPSDIQSFSDSLKSRLNAVSMKYKESITKSTRGWKERLFSRNSSVADLGSEVRREVNAGIASVSRMMERLETRGNSRTSDSPAASTSEVPSATESSNERVTESNSAAAAAGGGTTHYGYQR

SEQ ID NO: 32368 - DNA, 1358 bp, Zea mays subsp. mays
  misc_feature (1)..(1358): Ceres Seq. ID no. 13493529
aaaccaacccacgccatcatcatccgtcaatccatccatccatccgcttgtccctaccacctccaccaaccaaaacccccaaccgccgaggtcaccggcgactccgtcctcgccgcgccgcgccgtgaggatgtcgttccactaccacgaccacgggctgtccatggacgccgcggcagcggcggccgccgccgcgtcgtcgccgaaccctagcggcttctcccccggcatcggcggggaaagggagaaggcggccatcgcggcgcacccgctgtacgagcgcctcctggaggcgcacgtcgcctgcctacgcgtcgccacccccgtcgaccagctcccccgcatcgacgcgcagatcgccgcgcgccccccgccgctcgccgcggccgccggggccgcggccgcgggaggcccgtccggcggggaggagctcgacctcttcatgacgcactatgtattgctcctttgctcattcaaggagcagttgcagcagcatgtacgtgttcatgcaatggaagcagtgatgggttgctgggagcttgaacaatctttacaaagcctaacaggggcatctccgggtgaaggcactggaggaaccatgtctgacgatgaagataaccaggtggatagtgaagccaacatgttcgatggaaatgatggatcagacggtatgggctttggccccctaatactgacagagggtgaacggtccttagttgagcgtgtacggaaggagctgaagaacgagcttaagcagggttacaaggaaaagcttgtcgatatcagggaagagatcatgcgcaaacgcagggctgggaaacttcctggagataccgcatctgtactgaaagcttggtggcaagctcattcgaagtggccgtacccaactgaagacgacaaggccagactggtgcaggaaacggggttgcagctaaagcagatcaacaactggttcattaaccaacgcaaacggaactggcacagcaacccaacatcctcggctgaaaagaccaagaagaaaaggtgatgatggcccagagcaatcttggcaaaaagctagacatgtccactatactttattatggcgaagtacattctccctcacttcgtaggcaagagggaaaggtatcttgggtgacttgagtggccacctaatgcgcaagtttgaccacgtgtggggctggggttgggtagtgacctcagcagtatagcattcgctaacgtgatgtgggaatcacgtgttgcagtagaaccggcgagcgggaggggggtaatttatgttgtattgtaattactatatatgaaagacggacacaaacgtcgctcctcgtacgtccacgtcgtcacttttttcagcg

SEQ ID NO: 32369 - protein, 341 aa, Zea mays subsp. mays
  peptide (1)..(341): Ceres Seq. ID no. 13493530
  misc_feature (134)..(189): Pfam Name: Pfam Description:  KNOX2 domain
  misc_feature (44)..(341): NCBI GI NO: 14149139 NR Description: KNOX family class 2 homeodomain protein
  misc_feature (46)..(341): NCBI GI NO: 33333542 NR Description: knotted 7 [Hordeum vulgare]
  misc_feature (52)..(341): NCBI GI NO: 7446253 NR Description: probable homeobox protein OSH45, splice form OSH44
  misc_feature (52)..(340): NCBI GI NO: 7446252 NR Description: probable homeobox protein OSH45, splice form OSH45
  misc_feature (81)..(340): NCBI GI NO: 15238743 NR Description: KNAT3 homeodomain protein [Arabidopsis thaliana]
  misc_feature (81)..(340): NCBI GI NO: 21539535 NR Description: KNAT3 homeodomain protein [Arabidopsis thaliana]
  misc_feature (81)..(340): NCBI GI NO: 21554222 NR Description: KNAT3 homeodomain protein [Arabidopsis thaliana]
  misc_feature (53)..(341): NCBI GI NO: 3023961 NR Description: Homeobox protein knotted-1 like 3 (KNAP3)
  misc_feature (81)..(341): NCBI GI NO: 20141566 NR Description: Homeobox protein knotted-1 like 4 (KNAT4)
  misc_feature (81)..(341): NCBI GI NO: 1045044 NR Description: KNAT4 homeobox protein [Arabidopsis thaliana]
NQPTPSSSVNPSIHPLVPTTSTNQNPQPPRSPATPSSPRRAVRMSFHYHDHGLSMDAAAAAAAAASSPNPSGFSPGIGGEREKAAIAAHPLYERLLEAHVACLRVATPVDQLPRIDAQIAARPPPLAAAAGAAAAGGPSGGEELDLFMTHYVLLLCSFKEQLQQHVRVHAMEAVMGCWELEQSLQSLTGASPGEGTGGTMSDDEDNQVDSEANMFDGNDGSDGMGFGPLILTEGERSLVERVRKELKNELKQGYKEKLVDIREEIMRKRRAGKLPGDTASVLKAWWQAHSKWPYPTEDDKARLVQETGLQLKQINNWFINQRKRNWHSNPTSSAEKTKKKR

SEQ ID NO: 32370 - protein, 298 aa, Zea mays subsp. mays
  peptide (1)..(298): Ceres Seq. ID no. 13493531
  misc_feature (91)..(146): Pfam Name: Pfam Description:  KNOX2 domain
  misc_feature (1)..(298): NCBI GI NO: 14149139 NR Description: KNOX family class 2 homeodomain protein
  misc_feature (3)..(298): NCBI GI NO: 33333542 NR Description: knotted 7 [Hordeum vulgare]
  misc_feature (9)..(298): NCBI GI NO: 7446253 NR Description: probable homeobox protein OSH45, splice form OSH44
  misc_feature (9)..(297): NCBI GI NO: 7446252 NR Description: probable homeobox protein OSH45, splice form OSH45
  misc_feature (38)..(297): NCBI GI NO: 15238743 NR Description: KNAT3 homeodomain protein [Arabidopsis thaliana]
  misc_feature (38)..(297): NCBI GI NO: 21539535 NR Description: KNAT3 homeodomain protein [Arabidopsis thaliana]
  misc_feature (38)..(297): NCBI GI NO: 21554222 NR Description: KNAT3 homeodomain protein [Arabidopsis thaliana]
  misc_feature (10)..(298): NCBI GI NO: 3023961 NR Description: Homeobox protein knotted-1 like 3 (KNAP3)
  misc_feature (38)..(298): NCBI GI NO: 20141566 NR Description: Homeobox protein knotted-1 like 4 (KNAT4)
  misc_feature (38)..(298): NCBI GI NO: 1045044 NR Description: KNAT4 homeobox protein [Arabidopsis thaliana]
MSFHYHDHGLSMDAAAAAAAAASSPNPSGFSPGIGGEREKAAIAAHPLYERLLEAHVACLRVATPVDQLPRIDAQIAARPPPLAAAAGAAAAGGPSGGEELDLFMTHYVLLLCSFKEQLQQHVRVHAMEAVMGCWELEQSLQSLTGASPGEGTGGTMSDDEDNQVDSEANMFDGNDGSDGMGFGPLILTEGERSLVERVRKELKNELKQGYKEKLVDIREEIMRKRRAGKLPGDTASVLKAWWQAHSKWPYPTEDDKARLVQETGLQLKQINNWFINQRKRNWHSNPTSSAEKTKKKR

SEQ ID NO: 32371 - protein, 287 aa, Zea mays subsp. mays
  peptide (1)..(287): Ceres Seq. ID no. 13493532
  misc_feature (80)..(135): Pfam Name: Pfam Description:  KNOX2 domain
  misc_feature (1)..(287): NCBI GI NO: 14149139 NR Description: KNOX family class 2 homeodomain protein
  misc_feature (1)..(287): NCBI GI NO: 33333542 NR Description: knotted 7 [Hordeum vulgare]
  misc_feature (1)..(287): NCBI GI NO: 7446253 NR Description: probable homeobox protein OSH45, splice form OSH44
  misc_feature (1)..(286): NCBI GI NO: 7446252 NR Description: probable homeobox protein OSH45, splice form OSH45
  misc_feature (27)..(286): NCBI GI NO: 15238743 NR Description: KNAT3 homeodomain protein [Arabidopsis thaliana]
  misc_feature (27)..(286): NCBI GI NO: 21539535 NR Description: KNAT3 homeodomain protein [Arabidopsis thaliana]
  misc_feature (27)..(286): NCBI GI NO: 21554222 NR Description: KNAT3 homeodomain protein [Arabidopsis thaliana]
  misc_feature (1)..(287): NCBI GI NO: 3023961 NR Description: Homeobox protein knotted-1 like 3 (KNAP3)
  misc_feature (27)..(287): NCBI GI NO: 20141566 NR Description: Homeobox protein knotted-1 like 4 (KNAT4)
  misc_feature (27)..(287): NCBI GI NO: 1045044 NR Description: KNAT4 homeobox protein [Arabidopsis thaliana]
MDAAAAAAAAASSPNPSGFSPGIGGEREKAAIAAHPLYERLLEAHVACLRVATPVDQLPRIDAQIAARPPPLAAAAGAAAAGGPSGGEELDLFMTHYVLLLCSFKEQLQQHVRVHAMEAVMGCWELEQSLQSLTGASPGEGTGGTMSDDEDNQVDSEANMFDGNDGSDGMGFGPLILTEGERSLVERVRKELKNELKQGYKEKLVDIREEIMRKRRAGKLPGDTASVLKAWWQAHSKWPYPTEDDKARLVQETGLQLKQINNWFINQRKRNWHSNPTSSAEKTKKKR

SEQ ID NO: 32372 - DNA, 1446 bp, Zea mays subsp. mays
  misc_feature (1)..(1446): Ceres Seq. ID no. 13569613
ggctgccgcatttattatattggtttggtacttggtagtttggtgacgctgaggcctcgtccccgatcagacttgttcggcctcttcgacggcgtgcccgtctccccgggctcattcgccatgcattcctcagcctccgcgagaggaggacgagggctcctcttgccggcggctgcggcggcggttgtggtgctactgttgggtgcagtggcgccagcggcgggttgctatccgcgcgtgttcaacttcggggactctctggcggacacgggcaactacccgttcgtctatggcaacgactcagccaagctccggccaccctacggcgagaccttcttccaccgcgccaccgggcgcgcctccaacgggcgcctcgtggtcgacttcatcgcggacacgctcggcctcccgttcgtgcgaccgtatctgagcggacggagcgcggaggacttcgcgggcggggccaacttcgccgtgggcggcgccacggcgctcagcccggacttcttccgtgcaagggggttccacaacatgggaaaccgagtggacctcgacatggagatgaagtggttccgcggcctgctcgacctactctgccccggcaacctcgccggttgctcggatatgatgaaccaatctctcttcttagttggagaaatcgggggcaatgactacaacggacctcttctttctggagttcccttcgaggaaattcgcgccatcactccgagtgttgttgcgaaaatttcttctacaatcagcgaattgattcagctaggagccaagactcttgtggttccaggaaaccttcctattggatgtgtcccaaaatatctgatgatattcaagagcaataagaaagaggattatgatccacagacaggttgtcttagatggatgaacgagttctcacagtaccacaacaagcttcttgtggagcagctcaagaagcttcgcaggctccatcctggagtaaccatcatctatgctgattactatggagctgctatggaaatattcctttcccctgaacgatatgggatcgaatatcccctagtggcttgctgtggtgcagaaggaccctacggtgtgtccccaactacaagctgtggattgggagaatataagctgtgcgataatccagaaaggtatggatcatgggatggcctccatccaacagaatctgcatacaaggtcatcgctatgggcctgctactaggttcctatacaagaccgccaatcgcttccaccaccacttcatgtccacagcttatggagctcggctcttctgctgaatacaaacgcctctacgacctgtaataatttatgtaattatattttattgtatgtactccctcgcccacttcaataagtcccattttgcgagtacatgtactttgtaacttttaactaataacttatcaaactagctactatatatttgtt

SEQ ID NO: 32373 - protein, 439 aa, Zea mays subsp. mays
  peptide (1)..(439): Ceres Seq. ID no. 13569614
  misc_feature (80)..(216): Pfam Name: Pfam Description:  GDSL-like Lipase/Acylhydrolase
  misc_feature (204)..(439): NCBI GI NO: 34911804 NR Description: lipase-like protein
  misc_feature (60)..(216): NCBI GI NO: 34911804 NR Description: lipase-like protein
  misc_feature (46)..(439): NCBI GI NO: 34911800 NR Description: lipase-like protein
  misc_feature (60)..(413): NCBI GI NO: 10764858 NR Description: F1K23.17 [Arabidopsis thaliana]
  misc_feature (60)..(413): NCBI GI NO: 15218731 NR Description: lipase, putative [Arabidopsis thaliana]
  misc_feature (60)..(413): NCBI GI NO: 21593234 NR Description: lipase, putative [Arabidopsis thaliana]
  misc_feature (65)..(413): NCBI GI NO: 10764858 NR Description: F1K23.17 [Arabidopsis thaliana]
  misc_feature (65)..(413): NCBI GI NO: 15218728 NR Description: lipase, putative [Arabidopsis thaliana]
  misc_feature (62)..(413): NCBI GI NO: 15225872 NR Description: lipase, putative [Arabidopsis thaliana]
  misc_feature (53)..(413): NCBI GI NO: 12322540 NR Description: unknown protein [Arabidopsis thaliana]
GCRIYYIGLVLGSLVTLRPRPRSDLFGLFDGVPVSPGSFAMHSSASARGGRGLLLPAAAAAVVVLLLGAVAPAAGCYPRVFNFGDSLADTGNYPFVYGNDSAKLRPPYGETFFHRATGRASNGRLVVDFIADTLGLPFVRPYLSGRSAEDFAGGANFAVGGATALSPDFFRARGFHNMGNRVDLDMEMKWFRGLLDLLCPGNLAGCSDMMNQSLFLVGEIGGNDYNGPLLSGVPFEEIRAITPSVVAKISSTISELIQLGAKTLVVPGNLPIGCVPKYLMIFKSNKKEDYDPQTGCLRWMNEFSQYHNKLLVEQLKKLRRLHPGVTIIYADYYGAAMEIFLSPERYGIEYPLVACCGAEGPYGVSPTTSCGLGEYKLCDNPERYGSWDGLHPTESAYKVIAMGLLLGSYTRPPIASTTTSCPQLMELGSSAEYKRLYDL

SEQ ID NO: 32374 - protein, 399 aa, Zea mays subsp. mays
  peptide (1)..(399): Ceres Seq. ID no. 13569615
  misc_feature (40)..(176): Pfam Name: Pfam Description:  GDSL-like Lipase/Acylhydrolase
  misc_feature (164)..(399): NCBI GI NO: 34911804 NR Description: lipase-like protein
  misc_feature (20)..(176): NCBI GI NO: 34911804 NR Description: lipase-like protein
  misc_feature (6)..(399): NCBI GI NO: 34911800 NR Description: lipase-like protein
  misc_feature (20)..(373): NCBI GI NO: 10764858 NR Description: F1K23.17 [Arabidopsis thaliana]
  misc_feature (20)..(373): NCBI GI NO: 15218731 NR Description: lipase, putative [Arabidopsis thaliana]
  misc_feature (20)..(373): NCBI GI NO: 21593234 NR Description: lipase, putative [Arabidopsis thaliana]
  misc_feature (25)..(373): NCBI GI NO: 10764858 NR Description: F1K23.17 [Arabidopsis thaliana]
  misc_feature (25)..(373): NCBI GI NO: 15218728 NR Description: lipase, putative [Arabidopsis thaliana]
  misc_feature (22)..(373): NCBI GI NO: 15225872 NR Description: lipase, putative [Arabidopsis thaliana]
  misc_feature (13)..(373): NCBI GI NO: 12322540 NR Description: unknown protein [Arabidopsis thaliana]
MHSSASARGGRGLLLPAAAAAVVVLLLGAVAPAAGCYPRVFNFGDSLADTGNYPFVYGNDSAKLRPPYGETFFHRATGRASNGRLVVDFIADTLGLPFVRPYLSGRSAEDFAGGANFAVGGATALSPDFFRARGFHNMGNRVDLDMEMKWFRGLLDLLCPGNLAGCSDMMNQSLFLVGEIGGNDYNGPLLSGVPFEEIRAITPSVVAKISSTISELIQLGAKTLVVPGNLPIGCVPKYLMIFKSNKKEDYDPQTGCLRWMNEFSQYHNKLLVEQLKKLRRLHPGVTIIYADYYGAAMEIFLSPERYGIEYPLVACCGAEGPYGVSPTTSCGLGEYKLCDNPERYGSWDGLHPTESAYKVIAMGLLLGSYTRPPIASTTTSCPQLMELGSSAEYKRLYDL

SEQ ID NO: 32375 - protein, 262 aa, Zea mays subsp. mays
  peptide (1)..(262): Ceres Seq. ID no. 13569616
  misc_feature (27)..(227): Pfam Name: Pfam Description:  GDSL-like Lipase/Acylhydrolase
  misc_feature (27)..(262): NCBI GI NO: 34911804 NR Description: lipase-like protein
  misc_feature (1)..(39): NCBI GI NO: 34911804 NR Description: lipase-like protein
  misc_feature (1)..(262): NCBI GI NO: 34911800 NR Description: lipase-like protein
  misc_feature (1)..(236): NCBI GI NO: 10764858 NR Description: F1K23.17 [Arabidopsis thaliana]
  misc_feature (1)..(236): NCBI GI NO: 15218731 NR Description: lipase, putative [Arabidopsis thaliana]
  misc_feature (1)..(236): NCBI GI NO: 21593234 NR Description: lipase, putative [Arabidopsis thaliana]
  misc_feature (1)..(236): NCBI GI NO: 10764858 NR Description: F1K23.17 [Arabidopsis thaliana]
  misc_feature (1)..(236): NCBI GI NO: 15218728 NR Description: lipase, putative [Arabidopsis thaliana]
  misc_feature (1)..(236): NCBI GI NO: 15225872 NR Description: lipase, putative [Arabidopsis thaliana]
  misc_feature (1)..(236): NCBI GI NO: 12322540 NR Description: unknown protein [Arabidopsis thaliana]
MGNRVDLDMEMKWFRGLLDLLCPGNLAGCSDMMNQSLFLVGEIGGNDYNGPLLSGVPFEEIRAITPSVVAKISSTISELIQLGAKTLVVPGNLPIGCVPKYLMIFKSNKKEDYDPQTGCLRWMNEFSQYHNKLLVEQLKKLRRLHPGVTIIYADYYGAAMEIFLSPERYGIEYPLVACCGAEGPYGVSPTTSCGLGEYKLCDNPERYGSWDGLHPTESAYKVIAMGLLLGSYTRPPIASTTTSCPQLMELGSSAEYKRLYDL

SEQ ID NO: 32376 - DNA, 1957 bp, Zea mays subsp. mays
  misc_feature (1)..(1957): Ceres Seq. ID no. 13494733
  misc_feature (251)..(251): n is a, c, t, g, unknown, or other
aggcctccactcattcctgcccccgacactcccactgccaccagtcctctcaccgccaggcgcggcacaatgcagccgcctacccttctcccgctaggcgccgtcgtggtcgccatcctcctgctcgccaccgccccgagccccgccgtctcccgccaccgccactcgtccgccgcggacacggagacgctcgatgtagccgcctcgctctcccgcgcccgcgccgcgctctccaccgacgccgtctcggntgcaccagtccgcggccgccgccgccgccggggcgaagcgctccccgcgagcgcgggagggcggcctcacgctgcggctccactcccgggacttcctgcccgaggagcaggggcggcacgagacgtaccgctcgctcgtgctctcccgcctccgccgcgactcggcgcgcgccgctgcggtgtcggcccgcgcgacgctggcggcggacggcgtgacccggctggacctgcgccccgcgaacgggtcggcggtgttcgcggcgtcggcggcggcggcggcgatccagggtcccgtggtgtccggcgtcgggcagggcagcggcgagtacttctcccgcgtgggcatcggcagccccgcgcggcagctgtacatggtgctggacaccggcagcgacgtcacctgggtgcagtgccagccctgcgccgactgctaccagcagtccgacccggtgttcgacccgtccctctccgcctcctacgccgccgtctcctgcgactcccagcgctgccgggacctggacaccgcggcgtgccgcaacgccacgggcgcctgcctctacgaggtggcctacggcgacggctcctacaccgtgggcgacttcgccaccgagacgctcacgctgggggactccaccccggtcggcaacgtcgccatcgggtgcggccacgacaacgagggcctcttcgtcggcgccgcggggctgctggcgctgggcggcgggccgctctccttcccgtcccagatctccgcgtccaccttctcctactgcctcgtggaccgcgactccccggccgcgtccacgctccagttcggcgacggcgccgccgaggcgggcaccgtgacggcgcctctcgtgcgcagcccgcgcacgagcaccttctactacgtggcgctttcgggcatctcggtgggcgggcagccgctgtccatcccggcatccgccttcgccatggacgccacgtcgggctcgggcggcgtcatcgtggactccggcaccgccgtgacgcggctccagtccgccgcgtacgcggcgctccgcgacgccttcgtccagggcgcgccgtcgctgccccggacctccggggtgtcgctgttcgacacgtgctacgacctgtcggaccggacgagcgtggaggtgcccgcggtgtcgctgcggttcgagggcggcggcgcgctgcggctgccggcgaagaactacctgatccccgtggacggagccggcacctactgcctggcgttcgcgccgacgaacgcggccgtgtccatcatcgggaacgtgcagcagcagggcacccgcgtcagcttcgacaccgccaggggcgccgtcggcttcacccccaacaagtgctagcctagcctagcctaagcctgccttctggctaaccgtgccctgttagccacggttgtcagtagtaatgacaagccggtgtttaattagcgggagaatgattagatggggggtaattaagcggtgggccctgccgggtctggggaggagcgaaaggcaaaggcgaggacagatgatgccattgccatgccagcctgtgtccggcgcgatgggtccagctccagcagtgtttctctctttctctcgagtatgcgtgcgtggagccttgtcatgacgaattagatcgtgggggctcccaagttaagagtatttatttttattttatttgctatgtcaagaaaatggaagtttccatcc

SEQ ID NO: 32377 - protein, 535 aa, Zea mays subsp. mays
  peptide (1)..(535): Ceres Seq. ID no. 13494734
  misc_feature (24)..(198): NCBI GI NO: 34895664 NR Description: nucleoid DNA-binding protein cnd41-like protein
  misc_feature (84)..(84): Xaa is any aa, unknown or other
RPPLIPAPDTPTATSPLTARRGTMQPPTLLPLGAVVVAILLLATAPSPAVSRHRHSSAADTETLDVAASLSRARAALSTDAVSXAPVRGRRRRRGEALPASAGGRPHAAAPLPGLPARGAGAARDVPLARALPPPPRLGARRCGVGPRDAGGGRRDPAGPAPRERVGGVRGVGGGGGDPGSRGVRRRAGQRRVLLPRGHRQPRAAAVHGAGHRQRRHLGAVPALRRLLPAVRPGVRPVPLRLLRRRLLRLPALPGPGHRGVPQRHGRLPLRGGLRRRLLHRGRLRHRDAHAGGLHPGRQRRHRVRPRQRGPLRRRRGAAGAGRRAALLPVPDLRVHLLLLPRGPRLPGRVHAPVRRRRRRGGHRDGASRAQPAHEHLLLRGAFGHLGGRAAAVHPGIRLRHGRHVGLGRRHRGLRHRRDAAPVRRVRGAPRRLRPGRAVAAPDLRGVAVRHVLRPVGPDERGGARGVAAVRGRRRAAAAGEELPDPRGRSRHLLPGVRADERGRVHHRERAAAGHPRQLRHRQGRRRLHPQQVLA

SEQ ID NO: 32378 - protein, 512 aa, Zea mays subsp. mays
  peptide (1)..(512): Ceres Seq. ID no. 13494735
  misc_feature (1)..(175): NCBI GI NO: 34895664 NR Description: nucleoid DNA-binding protein cnd41-like protein
  misc_feature (61)..(61): Xaa is any aa, unknown or other
MQPPTLLPLGAVVVAILLLATAPSPAVSRHRHSSAADTETLDVAASLSRARAALSTDAVSXAPVRGRRRRRGEALPASAGGRPHAAAPLPGLPARGAGAARDVPLARALPPPPRLGARRCGVGPRDAGGGRRDPAGPAPRERVGGVRGVGGGGGDPGSRGVRRRAGQRRVLLPRGHRQPRAAAVHGAGHRQRRHLGAVPALRRLLPAVRPGVRPVPLRLLRRRLLRLPALPGPGHRGVPQRHGRLPLRGGLRRRLLHRGRLRHRDAHAGGLHPGRQRRHRVRPRQRGPLRRRRGAAGAGRRAALLPVPDLRVHLLLLPRGPRLPGRVHAPVRRRRRRGGHRDGASRAQPAHEHLLLRGAFGHLGGRAAAVHPGIRLRHGRHVGLGRRHRGLRHRRDAAPVRRVRGAPRRLRPGRAVAAPDLRGVAVRHVLRPVGPDERGGARGVAAVRGRRRAAAAGEELPDPRGRSRHLLPGVRADERGRVHHRERAAAGHPRQLRHRQGRRRLHPQQVLA

SEQ ID NO: 32379 - protein, 326 aa, Zea mays subsp. mays
  peptide (1)..(326): Ceres Seq. ID no. 13494736
  misc_feature (1)..(324): Pfam Name: Pfam Description:  Eukaryotic aspartyl protease
  misc_feature (1)..(326): NCBI GI NO: 34895664 NR Description: nucleoid DNA-binding protein cnd41-like protein
  misc_feature (1)..(326): NCBI GI NO: 15222611 NR Description: expressed protein [Arabidopsis thaliana]
  misc_feature (1)..(326): NCBI GI NO: 15229656 NR Description: chloroplast nucleoid DNA-binding protein -related
  misc_feature (1)..(326): NCBI GI NO: 19424106 NR Description: putative chloroplast nucleoid DNA-binding protein
  misc_feature (1)..(326): NCBI GI NO: 15290061 NR Description: nucleoid DNA-binding protein cnd41-like protein
  misc_feature (1)..(326): NCBI GI NO: 28392860 NR Description: unknown protein [Arabidopsis thaliana]
  misc_feature (1)..(326): NCBI GI NO: 15231010 NR Description: expressed protein [Arabidopsis thaliana]
  misc_feature (1)..(326): NCBI GI NO: 15223368 NR Description: chloroplast nucleoid DNA binding protein -related
  misc_feature (1)..(326): NCBI GI NO: 21594980 NR Description: chloroplast nucleoid DNA binding protein, putative
  misc_feature (1)..(326): NCBI GI NO: 15228618 NR Description: expressed protein [Arabidopsis thaliana]
MVLDTGSDVTWVQCQPCADCYQQSDPVFDPSLSASYAAVSCDSQRCRDLDTAACRNATGACLYEVAYGDGSYTVGDFATETLTLGDSTPVGNVAIGCGHDNEGLFVGAAGLLALGGGPLSFPSQISASTFSYCLVDRDSPAASTLQFGDGAAEAGTVTAPLVRSPRTSTFYYVALSGISVGGQPLSIPASAFAMDATSGSGGVIVDSGTAVTRLQSAAYAALRDAFVQGAPSLPRTSGVSLFDTCYDLSDRTSVEVPAVSLRFEGGGALRLPAKNYLIPVDGAGTYCLAFAPTNAAVSIIGNVQQQGTRVSFDTARGAVGFTPNKC

SEQ ID NO: 32380 - DNA, 1499 bp, Zea mays subsp. mays
  misc_feature (1)..(1499): Ceres Seq. ID no. 13580175
acaccacacctacatgtttctttaccctaacggcctaacctttctgctctagcgaaggcacagccgccgctgtttcttcatcttccttgcagcgccggcgctccatcttactctccctcccttactagcgcttgacacgcaggtgacgggcggcagcgacggcgctcagactcgggcttttagtgacggcatcagcggtttcccctcccgcctcttgccagtcccatcgcgccctcgcctcgggtcctctgcacaccgtccagtgaccttgcgtgatggactggataaagttttgcagcgattttaccgcaagtgatgggaaacagcatgcattgcttgataatcttaatcaggaattgtcccagaagtctgtactattgggtgatggttttaaactgtcagctgctgataatgatgtgtttgcaactgttcatccttttgtgatccgtgttagtgacagcgagttgcagaaatatccacatgtactgcggtggatggactacattcagaacactgttggtgctggtacaactttgcaaaagataaatgtgaccaagtctgactttgatccaccttctcatccaaggaaagctgataaaaaagatgctgaatcaagttcaaagaaagccatttccgtacagaagactgctgacaagtcaaatggaagtgctgactcaaagaaatccacaagagagcctcctgaaaataaggagaatcctactgctgcggggaacagcaaaacctctggggagaaaaagaaagtgcaagagaagtcagcaggaaaaacaacagagaaagctccagagaaaattgcagacaaggaatcagagtgcgatatcagtatcctgaatatacaggttggccttatccgtaaagcatggaagcatccatctgctgacagccttttagttgaggagatagatttgggagatggtaatgtgcgtcaagttgttagtggtcttgcaaagtattgcagcccagatgatcttactaatcggcatgttgtcttgatcacgaatgtgaagcctggaaagctgcgagatgtaatgtctgctggattggtcctttgtgcttcaactgaagatcatgctgctgtggagcctttgattcctccagaaggagccaagattggagaacgcatttcatttgctgggtttgatgggaagcctgaagatgttctaaatccaaagaaaaagcagctggacaagattaccccgcatcttcgtaccgacgagaatggaattgcaatgttcaaaggtgttccctttactacatcagctggcccatgtagatcttcgattcacaacggaaatgttaagtgagcagctcattagacatggttgcatagattgacatcaaacttatgcaggctgtctgtgtaccattttgtcatacatcatgttttgcccatatttagcgttgcaaaatttgaacagagttacactatctgtaagcaattttctactaatggttggcccagagtttgcttttgagtatgc

SEQ ID NO: 32381 - protein, 348 aa, Zea mays subsp. mays
  peptide (1)..(348): Ceres Seq. ID no. 13580176
  misc_feature (193)..(288): Pfam Name: Pfam Description:  Putative tRNA binding domain
  misc_feature (1)..(348): NCBI GI NO: 34907808 NR Description: similar to methionyl-tRNA synthetase
  misc_feature (1)..(348): NCBI GI NO: 18405465 NR Description: methionyl-tRNA synthetase -related
  misc_feature (1)..(348): NCBI GI NO: 25408718 NR Description: probable methionyl-tRNA synthetase
  misc_feature (96)..(348): NCBI GI NO: 15236350 NR Description: methionyl-tRNA synthetase - like protein
  misc_feature (16)..(347): NCBI GI NO: 4140277 NR Description: aminoacyl-tRNA synthetase cofactor
  misc_feature (89)..(348): NCBI GI NO: 12230649 NR Description: Probable methionyl-tRNA synthetase
  misc_feature (117)..(338): NCBI GI NO: 28302254 NR Description: Similar to small inducible cytokine subfamily E
  misc_feature (121)..(348): NCBI GI NO: 34860578 NR Description: endothelial monocyte activating polypeptide 2
  misc_feature (19)..(327): NCBI GI NO: 19115568 NR Description: putative Cofactor for methionyl-and glutamyl-tRNAsynthetases and
  misc_feature (157)..(348): NCBI GI NO: 26352830 NR Description: unnamed protein product [Mus musculus]
MDWIKFCSDFTASDGKQHALLDNLNQELSQKSVLLGDGFKLSAADNDVFATVHPFVIRVSDSELQKYPHVLRWMDYIQNTVGAGTTLQKINVTKSDFDPPSHPRKADKKDAESSSKKAISVQKTADKSNGSADSKKSTREPPENKENPTAAGNSKTSGEKKKVQEKSAGKTTEKAPEKIADKESECDISILNIQVGLIRKAWKHPSADSLLVEEIDLGDGNVRQVVSGLAKYCSPDDLTNRHVVLITNVKPGKLRDVMSAGLVLCASTEDHAAVEPLIPPEGAKIGERISFAGFDGKPEDVLNPKKKQLDKITPHLRTDENGIAMFKGVPFTTSAGPCRSSIHNGNVK

SEQ ID NO: 32382 - protein, 275 aa, Zea mays subsp. mays
  peptide (1)..(275): Ceres Seq. ID no. 13580177
  misc_feature (120)..(215): Pfam Name: Pfam Description:  Putative tRNA binding domain
  misc_feature (1)..(275): NCBI GI NO: 34907808 NR Description: similar to methionyl-tRNA synthetase
  misc_feature (1)..(275): NCBI GI NO: 18405465 NR Description: methionyl-tRNA synthetase -related
  misc_feature (1)..(275): NCBI GI NO: 25408718 NR Description: probable methionyl-tRNA synthetase
  misc_feature (23)..(275): NCBI GI NO: 15236350 NR Description: methionyl-tRNA synthetase - like protein
  misc_feature (1)..(274): NCBI GI NO: 4140277 NR Description: aminoacyl-tRNA synthetase cofactor
  misc_feature (16)..(275): NCBI GI NO: 12230649 NR Description: Probable methionyl-tRNA synthetase
  misc_feature (44)..(265): NCBI GI NO: 28302254 NR Description: Similar to small inducible cytokine subfamily E
  misc_feature (48)..(275): NCBI GI NO: 34860578 NR Description: endothelial monocyte activating polypeptide 2
  misc_feature (1)..(254): NCBI GI NO: 19115568 NR Description: putative Cofactor for methionyl-and glutamyl-tRNAsynthetases and
  misc_feature (84)..(275): NCBI GI NO: 26352830 NR Description: unnamed protein product [Mus musculus]
MDYIQNTVGAGTTLQKINVTKSDFDPPSHPRKADKKDAESSSKKAISVQKTADKSNGSADSKKSTREPPENKENPTAAGNSKTSGEKKKVQEKSAGKTTEKAPEKIADKESECDISILNIQVGLIRKAWKHPSADSLLVEEIDLGDGNVRQVVSGLAKYCSPDDLTNRHVVLITNVKPGKLRDVMSAGLVLCASTEDHAAVEPLIPPEGAKIGERISFAGFDGKPEDVLNPKKKQLDKITPHLRTDENGIAMFKGVPFTTSAGPCRSSIHNGNVK

SEQ ID NO: 32383 - DNA, 1466 bp, Zea mays subsp. mays
  misc_feature (1)..(1466): Ceres Seq. ID no. 12374177
ctctcgctctaggcccctacccataagaaacttcgtcacggtctactctttctccgtcctagcaaaatcctccccgtactgagagccaaagaaacaacaaaggcaggaggccggcgaactacgcgaggaaaatttcgtttcccgggaggaagtcgggagtcgagacacgcgcgggtcaaaatcgcctccgtcgctgctgttgctgtcggaggcgagcaggaaggggaaagaacgagcttggaaccttggacagctcaagaagaggggacggggaggcggcagcctgtgagaaggcacgtgacacgtgaaggagcccgagggtagggaggaaccgaatcgagacatggactcggagcactggatctcgcgccctggccgccgccaagcgttactacgcggcgcagctcggccacgtcgacgatgtgcccgggatagggacggaggaggtggagatggagattgaggacgacgggggcttggagatggagatggagatggcgctggggctcggggacgcgacgtggccggaggtcgcctgcccctactgctacgaggaccatgacgtcgcgtccctctgcgtccacctcgaggaggaccacccctatgagccccacgccgcgccctgccccatttgctcccaaagggttacaagagatatgcttaaccatatgaccatgcagcatggttacctgttcaagaacggtcacaggtctcgcagatacattattcccgagagccatgcaatttctgcattgagccgagatctacggggtactcatttacgggctcttctagggggtggtcatggccacagatcaagcaatgcagtgactacaaacatttccagcgatcctcttctttcgtcgtttggcctgggcttctcaccatcagatgcaccagaaccatcaaaatcggcgtcttctattccagatggcgcctcaatacgtaaggagacaccggttcagccttgggagtcgagtattgattcatctctcacaagcgaggaaagggagcaaaagcggaaacaggccaccggcagagcaacctttgtgcaaggcctagtgctctccactctatttggagactgatcgttcgaaacagctctaggttcttgcacatgctagttcggcgcttactcctgcctggtccgcatagtcagatagtgctccacccggtttggtgcatctaactctgatggcgggaaagttcgcctcaggaaacttagccgcgttcttctttgtttcagaaaagcgcgcagttgattctatcgtgatatagcttgatttaagctagctgttgtaccgttgtctttaccaatttatcagccagtaattcttatctgttagctcactggcagatcgtgtttgcaccaacatacataatagcctgtaacatgtacttacacaaagcaagaaaggcgcttgtttgagcgcacattcttcttgttgtaagaccagttaaggcct

SEQ ID NO: 32384 - protein, 211 aa, Zea mays subsp. mays
  peptide (1)..(211): Ceres Seq. ID no. 12374178
  misc_feature (26)..(208): Pfam Name: Di19 Pfam Description: Drought induced 19 protein
  misc_feature (26)..(211): NCBI GI NO: 18377875 NR Description: AT3g06760/F3E22_10 [Arabidopsis thaliana]
  misc_feature (26)..(211): NCBI GI NO: 28393233 NR Description: unknown protein [Arabidopsis thaliana]
  misc_feature (26)..(211): NCBI GI NO: 25992529 NR Description: fiber protein Fb2 [Gossypium barbadense]
  misc_feature (26)..(211): NCBI GI NO: 15240426 NR Description: drought-induced protein - like
  misc_feature (26)..(211): NCBI GI NO: 15230782 NR Description: unknown protein; protein id: At3g06760.1
  misc_feature (9)..(211): NCBI GI NO: 15028023 NR Description: unknown protein [Arabidopsis thaliana]
  misc_feature (9)..(211): NCBI GI NO: 1076316 NR Description: drought-induced protein Di19
  misc_feature (1)..(211): NCBI GI NO: 7485240 NR Description: hypothetical protein A_IG002P16
  misc_feature (26)..(193): NCBI GI NO: 13937216 NR Description: AT5g49230/K21P3_11 [Arabidopsis thaliana]
  misc_feature (26)..(193): NCBI GI NO: 15239827 NR Description: drought-induced protein Di19-like protein
MEIEDDGGLEMEMEMALGLGDATWPEVACPYCYEDHDVASLCVHLEEDHPYEPHAAPCPICSQRVTRDMLNHMTMQHGYLFKNGHRSRRYIIPESHAISALSRDLRGTHLRALLGGGHGHRSSNAVTTNISSDPLLSSFGLGFSPSDAPEPSKSASSIPDGASIRKETPVQPWESSIDSSLTSEEREQKRKQATGRATFVQGLVLSTLFGD

SEQ ID NO: 32385 - protein, 201 aa, Zea mays subsp. mays
  peptide (1)..(201): Ceres Seq. ID no. 12374179
  misc_feature (16)..(198): Pfam Name: Di19 Pfam Description: Drought induced 19 protein
  misc_feature (16)..(201): NCBI GI NO: 18377875 NR Description: AT3g06760/F3E22_10 [Arabidopsis thaliana]
  misc_feature (16)..(201): NCBI GI NO: 28393233 NR Description: unknown protein [Arabidopsis thaliana]
  misc_feature (16)..(201): NCBI GI NO: 25992529 NR Description: fiber protein Fb2 [Gossypium barbadense]
  misc_feature (16)..(201): NCBI GI NO: 15240426 NR Description: drought-induced protein - like
  misc_feature (16)..(201): NCBI GI NO: 15230782 NR Description: unknown protein; protein id: At3g06760.1
  misc_feature (1)..(201): NCBI GI NO: 15028023 NR Description: unknown protein [Arabidopsis thaliana]
  misc_feature (1)..(201): NCBI GI NO: 1076316 NR Description: drought-induced protein Di19
  misc_feature (1)..(201): NCBI GI NO: 7485240 NR Description: hypothetical protein A_IG002P16
  misc_feature (16)..(183): NCBI GI NO: 13937216 NR Description: AT5g49230/K21P3_11 [Arabidopsis thaliana]
  misc_feature (16)..(183): NCBI GI NO: 15239827 NR Description: drought-induced protein Di19-like protein
MEMEMALGLGDATWPEVACPYCYEDHDVASLCVHLEEDHPYEPHAAPCPICSQRVTRDMLNHMTMQHGYLFKNGHRSRRYIIPESHAISALSRDLRGTHLRALLGGGHGHRSSNAVTTNISSDPLLSSFGLGFSPSDAPEPSKSASSIPDGASIRKETPVQPWESSIDSSLTSEEREQKRKQATGRATFVQGLVLSTLFGD

SEQ ID NO: 32386 - protein, 199 aa, Zea mays subsp. mays
  peptide (1)..(199): Ceres Seq. ID no. 12374180
  misc_feature (14)..(196): Pfam Name: Di19 Pfam Description: Drought induced 19 protein
  misc_feature (14)..(199): NCBI GI NO: 18377875 NR Description: AT3g06760/F3E22_10 [Arabidopsis thaliana]
  misc_feature (14)..(199): NCBI GI NO: 28393233 NR Description: unknown protein [Arabidopsis thaliana]
  misc_feature (14)..(199): NCBI GI NO: 25992529 NR Description: fiber protein Fb2 [Gossypium barbadense]
  misc_feature (14)..(199): NCBI GI NO: 15240426 NR Description: drought-induced protein - like
  misc_feature (14)..(199): NCBI GI NO: 15230782 NR Description: unknown protein; protein id: At3g06760.1
  misc_feature (1)..(199): NCBI GI NO: 15028023 NR Description: unknown protein [Arabidopsis thaliana]
  misc_feature (1)..(199): NCBI GI NO: 1076316 NR Description: drought-induced protein Di19
  misc_feature (1)..(199): NCBI GI NO: 7485240 NR Description: hypothetical protein A_IG002P16
  misc_feature (14)..(181): NCBI GI NO: 13937216 NR Description: AT5g49230/K21P3_11 [Arabidopsis thaliana]
  misc_feature (14)..(181): NCBI GI NO: 15239827 NR Description: drought-induced protein Di19-like protein
MEMALGLGDATWPEVACPYCYEDHDVASLCVHLEEDHPYEPHAAPCPICSQRVTRDMLNHMTMQHGYLFKNGHRSRRYIIPESHAISALSRDLRGTHLRALLGGGHGHRSSNAVTTNISSDPLLSSFGLGFSPSDAPEPSKSASSIPDGASIRKETPVQPWESSIDSSLTSEEREQKRKQATGRATFVQGLVLSTLFGD

SEQ ID NO: 32387 - DNA, 1151 bp, Zea mays subsp. mays
  misc_feature (1)..(1151): Ceres Seq. ID no. 12362748
cccaggccccctccccacctccacctccaggcaccactggtcccacctcctcacctgcgaggatgctgctcgtgagtcaggcagcgaacggctccctctccgcgcggcggctgccgtcgaagccgccggggccgtccaccaccaacccctacccgctcttcgccaaccctcgcctcctgcgccgccgcctggcgctctccggcgctggcgccgaccaagccccgcgccgcgccgcgccgaccccagccgccgcgggcgagggcccctccgcctcctccaccgaggacccggtccttgtccgcgtcgccgacgacggcgtgccgctcgagggcgtcatccagattgagaagcccggggatgcggccgccgagtccaagctcgtctcctacgcgaagctgggtcttctggccggcggggacgtgttctgccttctgctgttctctgcgattggaaggttcagccatggcctgcccgtcctcgacgccgagacgttcaagacggccgaccccttcattgctgggtggctgctgagcgcctaccttcttggcggatttggcgatgatgccaaagggcgcaatggcgtcggaagcgcggttatcaccgcagctaaatcatgggctgttgggataccgttgggacttgctatccgagcagtgacgtctggtcatcttccaccaactccttttatcttggtaaccatgggaagtacaggggtcttgttaactgcatggcgtgctttggtatcacaactgttttccaaccagcaaaagcagcaggatgatgtctaccggcgtggaagtccttttgagctttttgagctactcacatcgctggtgcggaggtggtgacatctgaaggctgaagcctatagaaggtaagaagggcattgttccgctctggtatccgcaatcatcaggttcagccatctgtgtctattgtgtaagtacaattttgaaggtgaagaagagcaggctaaaacctagtttggagcatttgccgaacccaaaaaatgtttggcaataacacgcccgcgatgttggtttagtatattatattatattcataagatgtactcatattcctgatcttccacttgtaaaattgtatccagcttaacaaatcctaatcgataagaccgttgcctcttgttc

SEQ ID NO: 32388 - protein, 281 aa, Zea mays subsp. mays
  peptide (1)..(281): Ceres Seq. ID no. 12362749
  misc_feature (21)..(281): NCBI GI NO: 28273393 NR Description: unknown protein
  misc_feature (22)..(281): NCBI GI NO: 18401414 NR Description: expressed protein; protein id: At1g44920
  misc_feature (22)..(279): NCBI GI NO: 25405875 NR Description: protein F27F5.3 [imported] - Arabidopsis thaliana
  misc_feature (127)..(244): NCBI GI NO: 22970530 NR Description: hypothetical protein [Chloroflexus aurantiacus]
QAPSPPPPPGTTGPTSSPARMLLVSQAANGSLSARRLPSKPPGPSTTNPYPLFANPRLLRRRLALSGAGADQAPRRAAPTPAAAGEGPSASSTEDPVLVRVADDGVPLEGVIQIEKPGDAAAESKLVSYAKLGLLAGGDVFCLLLFSAIGRFSHGLPVLDAETFKTADPFIAGWLLSAYLLGGFGDDAKGRNGVGSAVITAAKSWAVGIPLGLAIRAVTSGHLPPTPFILVTMGSTGVLLTAWRALVSQLFSNQQKQQDDVYRRGSPFELFELLTSLVRRW

SEQ ID NO: 32389 - protein, 261 aa, Zea mays subsp. mays
  peptide (1)..(261): Ceres Seq. ID no. 12362750
  misc_feature (1)..(261): NCBI GI NO: 28273393 NR Description: unknown protein
  misc_feature (2)..(261): NCBI GI NO: 18401414 NR Description: expressed protein; protein id: At1g44920
  misc_feature (2)..(259): NCBI GI NO: 25405875 NR Description: protein F27F5.3 [imported] - Arabidopsis thaliana
  misc_feature (107)..(224): NCBI GI NO: 22970530 NR Description: hypothetical protein [Chloroflexus aurantiacus]
MLLVSQAANGSLSARRLPSKPPGPSTTNPYPLFANPRLLRRRLALSGAGADQAPRRAAPTPAAAGEGPSASSTEDPVLVRVADDGVPLEGVIQIEKPGDAAAESKLVSYAKLGLLAGGDVFCLLLFSAIGRFSHGLPVLDAETFKTADPFIAGWLLSAYLLGGFGDDAKGRNGVGSAVITAAKSWAVGIPLGLAIRAVTSGHLPPTPFILVTMGSTGVLLTAWRALVSQLFSNQQKQQDDVYRRGSPFELFELLTSLVRRW

SEQ ID NO: 32390 - DNA, 1362 bp, Zea mays subsp. mays
  misc_feature (1)..(1362): Ceres Seq. ID no. 13492731
  misc_feature (659)..(659): n is a, c, t, g, unknown, or other
  misc_feature (460)..(460): n is a, c, t, g, unknown, or other
  misc_feature (667)..(667): n is a, c, t, g, unknown, or other
  misc_feature (666)..(666): n is a, c, t, g, unknown, or other
  misc_feature (658)..(658): n is a, c, t, g, unknown, or other
caacaacttgggcgcgcgcgcggccgggtagcaaaagctcgcgatctgtgcgcccaccaccgggaggagcgaagatgcggatgagctgcaatggctgccgcgtcctgcgcaagggctgcggcgacgcctgcaccatccgcccctgcctgcagtggatcgaggcccccgaggcgcaggccaacgccaccgtcttcctcgcaaagttctacggccgggcgggcctgctcaacctgctcgccgccgcgcccgacgacggcgtccgccccgcggtcttccgctccctgctctacgaggcgtgcggccgcatcgtcaacccggtctacggctccgtcggcctgctctggtcgcgccagtggcacaggtgcgccgacgccgtcgaggccgtgctcaggggggaccccgtcgtgcaggtcgacgccgggtccgacgccgccgctgccccgccgctgctcgccggcgncaggccgccgccgccggccgccttcgacatccgccacgtccccagggatcccgacgccaccgccgccgacctcctccgcgccggccgcaagaggttcaagcgcgcgggttcgtcttccaacgcctccaaggcgaagcccctgcccctcgagctcgagggcaaggccggcaacaacgaacgcgcgtcgcccagccctcnnccgacgnnacaactgagaggcggaggagctgcagccggtgccgatggtcgtcgagccagaacacggcgaggagtccgccggcagccacgaccaccacctgcagctgcaggggtggtcggaggaggacaccgacgtggaggcggcctcacacgtgagccaagccgaggctgagccgccagccagcagccagagccaggtgctggtagcggatcaggaggaagaggaggttgggctcgagctcacgcttgggttcgagcctgtcgtcaggcagcagccgaggtcgtcgcgctgcgacaagagcggcttgagcgcggcatcgagcctcatcggcctgcggctgcagctgccggccgcctaagcacaggcacagctcgcacctaaacgaatagagcagttttgcgaccctgcgcctgcggtgtttgcttaaaaataagcttttggacccccgggtgccaggagacacacagtagccaacttcaaattttctaggttttgtttatctttttcaatttttcttcttgtctttaactgtaaaagttgatggactgcacaattactcaggtagagggggtttggttccccgatcaaagagggcgtttggttactcggtttagttcttatatcgaatgtttaaatgccagttataagtattatatgtagtatatttaaaaattaattatataaatgaagactaaacattagt

SEQ ID NO: 32391 - protein, 275 aa, Zea mays subsp. mays
  peptide (1)..(275): Ceres Seq. ID no. 13492732
  misc_feature (28)..(134): Pfam Name: Pfam Description:  Protein of unknown function DUF260
  misc_feature (25)..(223): NCBI GI NO: 34914608 NR Description: P0520B06.17
  misc_feature (25)..(215): NCBI GI NO: 18396229 NR Description: lateral organ boundaries
  misc_feature (25)..(215): NCBI GI NO: 21554191 NR Description: unknown [Arabidopsis thaliana]
  misc_feature (25)..(195): NCBI GI NO: 34895540 NR Description: unnamed protein product
  misc_feature (25)..(203): NCBI GI NO: 15219829 NR Description: lateral organ boundaries (LOB) domain family
  misc_feature (25)..(221): NCBI GI NO: 15221429 NR Description: lateral organ boundaries
  misc_feature (27)..(231): NCBI GI NO: 40539088 NR Description: expressed protein
  misc_feature (27)..(150): NCBI GI NO: 15235604 NR Description: lateral organ boundaries (LOB) domain family
  misc_feature (27)..(150): NCBI GI NO: 21592894 NR Description: unknown [Arabidopsis thaliana]
  misc_feature (27)..(147): NCBI GI NO: 15229644 NR Description: lateral organ boundaries
  misc_feature (153)..(153): Xaa is any aa, unknown or other
  misc_feature (219)..(219): Xaa is any aa, unknown or other
  misc_feature (222)..(222): Xaa is any aa, unknown or other
TTWARARPGSKSSRSVRPPPGGAKMRMSCNGCRVLRKGCGDACTIRPCLQWIEAPEAQANATVFLAKFYGRAGLLNLLAAAPDDGVRPAVFRSLLYEACGRIVNPVYGSVGLLWSRQWHRCADAVEAVLRGDPVVQVDAGSDAAAAPPLLAGXRPPPPAAFDIRHVPRDPDATAADLLRAGRKRFKRAGSSSNASKAKPLPLELEGKAGNNERASPSPXPTXQLRGGGAAAGADGRRARTRRGVRRQPRPPPAAAGVVGGGHRRGGGLTREPSRG

SEQ ID NO: 32392 - protein, 251 aa, Zea mays subsp. mays
  peptide (1)..(251): Ceres Seq. ID no. 13492733
  misc_feature (4)..(110): Pfam Name: Pfam Description:  Protein of unknown function DUF260
  misc_feature (1)..(199): NCBI GI NO: 34914608 NR Description: P0520B06.17
  misc_feature (1)..(191): NCBI GI NO: 18396229 NR Description: lateral organ boundaries
  misc_feature (1)..(191): NCBI GI NO: 21554191 NR Description: unknown [Arabidopsis thaliana]
  misc_feature (1)..(171): NCBI GI NO: 34895540 NR Description: unnamed protein product
  misc_feature (1)..(179): NCBI GI NO: 15219829 NR Description: lateral organ boundaries (LOB) domain family
  misc_feature (1)..(197): NCBI GI NO: 15221429 NR Description: lateral organ boundaries
  misc_feature (3)..(207): NCBI GI NO: 40539088 NR Description: expressed protein
  misc_feature (3)..(126): NCBI GI NO: 15235604 NR Description: lateral organ boundaries (LOB) domain family
  misc_feature (3)..(126): NCBI GI NO: 21592894 NR Description: unknown [Arabidopsis thaliana]
  misc_feature (3)..(123): NCBI GI NO: 15229644 NR Description: lateral organ boundaries
  misc_feature (129)..(129): Xaa is any aa, unknown or other
  misc_feature (195)..(195): Xaa is any aa, unknown or other
  misc_feature (198)..(198): Xaa is any aa, unknown or other
MRMSCNGCRVLRKGCGDACTIRPCLQWIEAPEAQANATVFLAKFYGRAGLLNLLAAAPDDGVRPAVFRSLLYEACGRIVNPVYGSVGLLWSRQWHRCADAVEAVLRGDPVVQVDAGSDAAAAPPLLAGXRPPPPAAFDIRHVPRDPDATAADLLRAGRKRFKRAGSSSNASKAKPLPLELEGKAGNNERASPSPXPTXQLRGGGAAAGADGRRARTRRGVRRQPRPPPAAAGVVGGGHRRGGGLTREPSRG

SEQ ID NO: 32393 - protein, 249 aa, Zea mays subsp. mays
  peptide (1)..(249): Ceres Seq. ID no. 13492734
  misc_feature (2)..(108): Pfam Name: Pfam Description:  Protein of unknown function DUF260
  misc_feature (1)..(197): NCBI GI NO: 34914608 NR Description: P0520B06.17
  misc_feature (1)..(189): NCBI GI NO: 18396229 NR Description: lateral organ boundaries
  misc_feature (1)..(189): NCBI GI NO: 21554191 NR Description: unknown [Arabidopsis thaliana]
  misc_feature (1)..(169): NCBI GI NO: 34895540 NR Description: unnamed protein product
  misc_feature (1)..(177): NCBI GI NO: 15219829 NR Description: lateral organ boundaries (LOB) domain family
  misc_feature (1)..(195): NCBI GI NO: 15221429 NR Description: lateral organ boundaries
  misc_feature (1)..(205): NCBI GI NO: 40539088 NR Description: expressed protein
  misc_feature (1)..(124): NCBI GI NO: 15235604 NR Description: lateral organ boundaries (LOB) domain family
  misc_feature (1)..(124): NCBI GI NO: 21592894 NR Description: unknown [Arabidopsis thaliana]
  misc_feature (1)..(121): NCBI GI NO: 15229644 NR Description: lateral organ boundaries
  misc_feature (127)..(127): Xaa is any aa, unknown or other
  misc_feature (193)..(193): Xaa is any aa, unknown or other
  misc_feature (196)..(196): Xaa is any aa, unknown or other
MSCNGCRVLRKGCGDACTIRPCLQWIEAPEAQANATVFLAKFYGRAGLLNLLAAAPDDGVRPAVFRSLLYEACGRIVNPVYGSVGLLWSRQWHRCADAVEAVLRGDPVVQVDAGSDAAAAPPLLAGXRPPPPAAFDIRHVPRDPDATAADLLRAGRKRFKRAGSSSNASKAKPLPLELEGKAGNNERASPSPXPTXQLRGGGAAAGADGRRARTRRGVRRQPRPPPAAAGVVGGGHRRGGGLTREPSRG

SEQ ID NO: 32394 - DNA, 1175 bp, Zea mays subsp. mays; identical to SEQ ID NO: 23594
  misc_feature (1)..(1175): Ceres Seq. ID no. 12566396

SEQ ID NO: 32395 - protein, 283 aa, Zea mays subsp. mays; identical to SEQ ID NO: 23595
  peptide (1)..(283): Ceres Seq. ID no. 12566397
  misc_feature (69)..(273): Pfam Name: Pfam Description:  ER lumen protein retaining receptor
  misc_feature (69)..(283): NCBI GI NO: 6685428 NR Description: ER lumen protein retaining receptor
  misc_feature (69)..(283): NCBI GI NO: 21592401 NR Description: ER lumen retaining receptor
  misc_feature (69)..(283): NCBI GI NO: 18404390 NR Description: ER lumen retaining receptor
  misc_feature (69)..(283): NCBI GI NO: 9293986 NR Description: ER lumen protein-retaining receptor-like protein
  misc_feature (69)..(283): NCBI GI NO: 18397049 NR Description: ER lumen protein retaining receptor
  misc_feature (69)..(283): NCBI GI NO: 14285310 NR Description: ERD2 protein [Scherffelia dubia]
  misc_feature (69)..(282): NCBI GI NO: 22656361 NR Description: endoplasmic reticulum retention receptor
  misc_feature (69)..(283): NCBI GI NO: 17137442 NR Description: KDEL receptor CG5183-PA [Drosophila melanogaster]
  misc_feature (69)..(283): NCBI GI NO: 17551392 NR Description: Yeast Endoplasmic Reticulum retention Defectiverelated ERD-2
  misc_feature (69)..(270): NCBI GI NO: 34870419 NR Description: similar to KDEL

SEQ ID NO: 32396 - protein, 215 aa, Zea mays subsp. mays; identical to SEQ ID NO: 23596
  peptide (1)..(215): Ceres Seq. ID no. 12566398
  misc_feature (1)..(205): Pfam Name: Pfam Description:  ER lumen protein retaining receptor
  misc_feature (1)..(215): NCBI GI NO: 6685428 NR Description: ER lumen protein retaining receptor
  misc_feature (1)..(215): NCBI GI NO: 21592401 NR Description: ER lumen retaining receptor
  misc_feature (1)..(215): NCBI GI NO: 18404390 NR Description: ER lumen retaining receptor
  misc_feature (1)..(215): NCBI GI NO: 9293986 NR Description: ER lumen protein-retaining receptor-like protein
  misc_feature (1)..(215): NCBI GI NO: 18397049 NR Description: ER lumen protein retaining receptor
  misc_feature (1)..(215): NCBI GI NO: 14285310 NR Description: ERD2 protein [Scherffelia dubia]
  misc_feature (1)..(214): NCBI GI NO: 22656361 NR Description: endoplasmic reticulum retention receptor
  misc_feature (1)..(215): NCBI GI NO: 17137442 NR Description: KDEL receptor CG5183-PA [Drosophila melanogaster]
  misc_feature (1)..(215): NCBI GI NO: 17551392 NR Description: Yeast Endoplasmic Reticulum retention Defectiverelated ERD-2
  misc_feature (1)..(202): NCBI GI NO: 34870419 NR Description: similar to KDEL

SEQ ID NO: 32397 - protein, 206 aa, Zea mays subsp. mays; identical to SEQ ID NO: 23597
  peptide (1)..(206): Ceres Seq. ID no. 12566399
  misc_feature (1)..(196): Pfam Name: Pfam Description:  ER lumen protein retaining receptor
  misc_feature (1)..(206): NCBI GI NO: 6685428 NR Description: ER lumen protein retaining receptor
  misc_feature (1)..(206): NCBI GI NO: 21592401 NR Description: ER lumen retaining receptor
  misc_feature (1)..(206): NCBI GI NO: 18404390 NR Description: ER lumen retaining receptor
  misc_feature (1)..(206): NCBI GI NO: 9293986 NR Description: ER lumen protein-retaining receptor-like protein
  misc_feature (1)..(206): NCBI GI NO: 18397049 NR Description: ER lumen protein retaining receptor
  misc_feature (1)..(206): NCBI GI NO: 14285310 NR Description: ERD2 protein [Scherffelia dubia]
  misc_feature (1)..(205): NCBI GI NO: 22656361 NR Description: endoplasmic reticulum retention receptor
  misc_feature (1)..(206): NCBI GI NO: 17137442 NR Description: KDEL receptor CG5183-PA [Drosophila melanogaster]
  misc_feature (1)..(206): NCBI GI NO: 17551392 NR Description: Yeast Endoplasmic Reticulum retention Defectiverelated ERD-2
  misc_feature (1)..(193): NCBI GI NO: 34870419 NR Description: similar to KDEL

SEQ ID NO: 32398 - DNA, 1733 bp, Zea mays subsp. mays
  misc_feature (1)..(1733): Ceres Seq. ID no. 12374173
gatacaaaccctaatccccaccgccgcccgaccccgcagcctcattccaggcgcatcgacagcgacggcacgcgctggtccatccacggtccaccagtcgacctcgctcacccgcgagccgcgggccttgtcctcgtcgtcgttcataggcagtgcagcctcattcaccggtcgtcctcgtccaccagcgaattgaagttcctcgcccatcagccaacgacgtcgacgcggcctcgttctcgtccagcccacagcccagcgtgctgcacgtcgccttgctgttgctgtgctgctgctgcctatgtttcaaatgtcccaactggacctagccctcggacggaagtgcccaggacctgtcaatatatgccagctgtgcggcgagccagagctgagcggcgtacagatttcttgcccttgatttgatcaagggcaaaagtgtccggccactagctgccaatataataaaataagtcccgccgccattcaccaaatcggccgccagggctccgtcctctagctgctccgtccggtggtccagccagctgcctagctccctccgacggtccggccagcaccgcctcctgctcgtggccttgcccagctcctccgctctccggtgagacgtagatcttggtgcggcagggcgctacggagggggggtggtgctgttgtgcgtgtgctggtggcctggtgctagcaaccaagcctattatgaaatctggtgctagttaactgctgaaaggtacagtactatggatcacgaatgatgtattgtatgcaattcggcccggagcgtcactaaatcctggatccgcattggccgcagcgccagtggccagtgtccagcctgccagctcagcccggcggcaagcgcccagcggctggctcgggcagcggccagtgaccagcagccgactcgtttcttcggcgttctccgccactgccccccagctatgcaccctgttccagtcccctcccagccctttaccgcaactcctgcaaaaaaacttgtttcaaggagcactgctgtgaggaaggccatccattttgtcaacctgcggacagctggaaggtctagtggaaacctggctatgaactccgtaccaaaacccgcccctgggtccgaaacatctgggagggaggattttgctgtgggggataaggatgctgtggtcattgttgatcatgggtcaagacgccaagaatccaatctcatgctaaatgactttgttgagatgttccgggcgaagactagctataggattgttgagcctgctcatatggagctagcggagcctactataaaggatgcttttggaaaatgtgtgcaacaaggagcatctcgagttattattagtccatatttcctttcccctggacgacactggaagcaagacattcctgctttagcagcagaggcatcaaaggagcactcaaatataccctatattgtcactgcccctcttgggctgcatgagcttatggtggatatcatgaatgatcgcatcaagtactgcctgcgacatgttgcgggtgatgtcgatgagtgtacagtgtgtgccggaactggaaagtgccgcatgtactcctgatggagcatacctggtaattgtttcttggtattaccatttattgtgagatctggagaatacgagatctgacgagtgtatagttcattttgtaatcttggactgtccatattctgagcagattgtcagaattagacaagtgcc

SEQ ID NO: 32399 - protein, 212 aa, Zea mays subsp. mays
  peptide (1)..(212): Ceres Seq. ID no. 12374174
  misc_feature (76)..(188): Pfam Name: Pfam Description:  CbiX
  misc_feature (58)..(212): NCBI GI NO: 18402963 NR Description: expressed protein; protein id: At1g50170
  misc_feature (58)..(212): NCBI GI NO: 21618095 NR Description: unknown [Arabidopsis thaliana]
  misc_feature (109)..(212): NCBI GI NO: 25405354 NR Description: hypothetical protein F14I3.20
  misc_feature (58)..(110): NCBI GI NO: 25405354 NR Description: hypothetical protein F14I3.20
  misc_feature (70)..(189): NCBI GI NO: 39998091 NR Description: cbiX protein [Geobacter sulfurreducens PCA]
  misc_feature (70)..(189): NCBI GI NO: 23054392 NR Description: hypothetical protein [Geobacter metallireducens]
  misc_feature (73)..(186): NCBI GI NO: 21400014 NR Description: CbiX, CbiX [Bacillus anthracis A2012]
  misc_feature (73)..(186): NCBI GI NO: 30020268 NR Description: CbiX protein [Bacillus cereus ATCC 14579]
  misc_feature (73)..(206): NCBI GI NO: 15614059 NR Description: BH1496~unknown conserved protein
  misc_feature (71)..(185): NCBI GI NO: 40642725 NR Description: ferrochelatase [Bacillus megaterium]
MHPVPVPSQPFTATPAKKLVSRSTAVRKAIHFVNLRTAGRSSGNLAMNSVPKPAPGSETSGREDFAVGDKDAVVIVDHGSRRQESNLMLNDFVEMFRAKTSYRIVEPAHMELAEPTIKDAFGKCVQQGASRVIISPYFLSPGRHWKQDIPALAAEASKEHSNIPYIVTAPLGLHELMVDIMNDRIKYCLRHVAGDVDECTVCAGTGKCRMYS

SEQ ID NO: 32400 - protein, 166 aa, Zea mays subsp. mays
  peptide (1)..(166): Ceres Seq. ID no. 12374175
  misc_feature (30)..(142): Pfam Name: Pfam Description:  CbiX
  misc_feature (12)..(166): NCBI GI NO: 18402963 NR Description: expressed protein; protein id: At1g50170
  misc_feature (12)..(166): NCBI GI NO: 21618095 NR Description: unknown [Arabidopsis thaliana]
  misc_feature (63)..(166): NCBI GI NO: 25405354 NR Description: hypothetical protein F14I3.20
  misc_feature (12)..(64): NCBI GI NO: 25405354 NR Description: hypothetical protein F14I3.20
  misc_feature (24)..(143): NCBI GI NO: 39998091 NR Description: cbiX protein [Geobacter sulfurreducens PCA]
  misc_feature (24)..(143): NCBI GI NO: 23054392 NR Description: hypothetical protein [Geobacter metallireducens]
  misc_feature (27)..(140): NCBI GI NO: 21400014 NR Description: CbiX, CbiX [Bacillus anthracis A2012]
  misc_feature (27)..(140): NCBI GI NO: 30020268 NR Description: CbiX protein [Bacillus cereus ATCC 14579]
  misc_feature (27)..(160): NCBI GI NO: 15614059 NR Description: BH1496~unknown conserved protein
  misc_feature (25)..(139): NCBI GI NO: 40642725 NR Description: ferrochelatase [Bacillus megaterium]
MNSVPKPAPGSETSGREDFAVGDKDAVVIVDHGSRRQESNLMLNDFVEMFRAKTSYRIVEPAHMELAEPTIKDAFGKCVQQGASRVIISPYFLSPGRHWKQDIPALAAEASKEHSNIPYIVTAPLGLHELMVDIMNDRIKYCLRHVAGDVDECTVCAGTGKCRMYS

SEQ ID NO: 32401 - protein, 140 aa, Zea mays subsp. mays
  peptide (1)..(140): Ceres Seq. ID no. 12374176
DTNPNPHRRPTPQPHSRRIDSDGTRWSIHGPPVDLAHPRAAGLVLVVVHRQCSLIHRSSSSTSELKFLAHQPTTSTRPRSRPAHSPACCTSPCCCCAAAAYVSNVPTGPSPRTEVPRTCQYMPAVRRARAERRTDFLPLI

SEQ ID NO: 32402 - DNA, 1034 bp, Zea mays subsp. mays
  misc_feature (1)..(1034): Ceres Seq. ID no. 12363023
acgcgaggtcacgagatatggcggacggcaagcgaggggaggattcggccgtggcgttgaagacctcgccgtcgtcggcggtgatggctgggggtttacgcggcgttagcaaccctctggaggagtggagcgggcgcgtgaaggcgattgaggccgggttccgcgcgtggatggcgaagcaacccatccaaatcgaggccgcggtgaccacggccgtgggggcggtgcagggcggggctctgggtgggctcatgggctcgctcacagctgacggcgggtcgccgttccccatcccgcagccgccgcccaacgccaacccagaggccatggcgtcgttcaagcaggcccaggctttagctggtggacccttggtgcaagcccggaactttgcagtcatgaccggcgcaaacgcaggcatatcttgtgtcatgagaaggatacgagggaaagaggatatccagggcagcatggcagctgctttcggttctggtgctcttttctccatagtgagcggaatgggaactcctaatccagtagcaaatgcagttacaactggtgttgcttttgcagtatttcaaggtggctttttcatgatcgggcagaaattctcaaagccaccaagtgaagatacatactactctcggacaagaagcatgctgcacaaactgggtcttgaaaagtatgagaagaatttcaagaggggtctcctcaatgatcaaacattaccactccttacggacagtgctctgagagatgtgaagatccctcctggacccagacttctcatactcgaccaaattaaaagggaccccgagctggttcgagcaaagtagcagtcacaattgtcgacagctggttctttctgggttgcatagggtttgaaagcgatgccgtctctagtttcttaataaactttctaggcaagcaagcaagaatttagttgtgctgtagttaattgttttttggccgatcagtttgcatcgatcctattaaattctgaacaacaggtatttatatgcatcttattcaaattt

SEQ ID NO: 32403 - protein, 276 aa, Zea mays subsp. mays
  peptide (1)..(276): Ceres Seq. ID no. 12363024
  misc_feature (55)..(202): Pfam Name: Pfam Description:  Tim17/Tim22/Tim23 family
  misc_feature (33)..(268): NCBI GI NO: 32487911 NR Description: OJ000315_02.15
  misc_feature (9)..(272): NCBI GI NO: 15238598 NR Description: putative protein; protein id: At5g24650
  misc_feature (26)..(272): NCBI GI NO: 21593899 NR Description: unknown [Arabidopsis thaliana]
  misc_feature (20)..(272): NCBI GI NO: 15229167 NR Description: putative protein; protein id: At3g49560
ARSRDMADGKRGEDSAVALKTSPSSAVMAGGLRGVSNPLEEWSGRVKAIEAGFRAWMAKQPIQIEAAVTTAVGAVQGGALGGLMGSLTADGGSPFPIPQPPPNANPEAMASFKQAQALAGGPLVQARNFAVMTGANAGISCVMRRIRGKEDIQGSMAAAFGSGALFSIVSGMGTPNPVANAVTTGVAFAVFQGGFFMIGQKFSKPPSEDTYYSRTRSMLHKLGLEKYEKNFKRGLLNDQTLPLLTDSALRDVKIPPGPRLLILDQIKRDPELVRAK

SEQ ID NO: 32404 - protein, 271 aa, Zea mays subsp. mays
  peptide (1)..(271): Ceres Seq. ID no. 12363025
  misc_feature (50)..(197): Pfam Name: Pfam Description:  Tim17/Tim22/Tim23 family
  misc_feature (28)..(263): NCBI GI NO: 32487911 NR Description: OJ000315_02.15
  misc_feature (4)..(267): NCBI GI NO: 15238598 NR Description: putative protein; protein id: At5g24650
  misc_feature (21)..(267): NCBI GI NO: 21593899 NR Description: unknown [Arabidopsis thaliana]
  misc_feature (15)..(267): NCBI GI NO: 15229167 NR Description: putative protein; protein id: At3g49560
MADGKRGEDSAVALKTSPSSAVMAGGLRGVSNPLEEWSGRVKAIEAGFRAWMAKQPIQIEAAVTTAVGAVQGGALGGLMGSLTADGGSPFPIPQPPPNANPEAMASFKQAQALAGGPLVQARNFAVMTGANAGISCVMRRIRGKEDIQGSMAAAFGSGALFSIVSGMGTPNPVANAVTTGVAFAVFQGGFFMIGQKFSKPPSEDTYYSRTRSMLHKLGLEKYEKNFKRGLLNDQTLPLLTDSALRDVKIPPGPRLLILDQIKRDPELVRAK

SEQ ID NO: 32405 - protein, 249 aa, Zea mays subsp. mays
  peptide (1)..(249): Ceres Seq. ID no. 12363026
  misc_feature (28)..(175): Pfam Name: Pfam Description:  Tim17/Tim22/Tim23 family
  misc_feature (6)..(241): NCBI GI NO: 32487911 NR Description: OJ000315_02.15
  misc_feature (1)..(245): NCBI GI NO: 15238598 NR Description: putative protein; protein id: At5g24650
  misc_feature (1)..(245): NCBI GI NO: 21593899 NR Description: unknown [Arabidopsis thaliana]
  misc_feature (1)..(245): NCBI GI NO: 15229167 NR Description: putative protein; protein id: At3g49560
MAGGLRGVSNPLEEWSGRVKAIEAGFRAWMAKQPIQIEAAVTTAVGAVQGGALGGLMGSLTADGGSPFPIPQPPPNANPEAMASFKQAQALAGGPLVQARNFAVMTGANAGISCVMRRIRGKEDIQGSMAAAFGSGALFSIVSGMGTPNPVANAVTTGVAFAVFQGGFFMIGQKFSKPPSEDTYYSRTRSMLHKLGLEKYEKNFKRGLLNDQTLPLLTDSALRDVKIPPGPRLLILDQIKRDPELVRAK

SEQ ID NO: 32406 - DNA, 1092 bp, Zea mays subsp. mays
  misc_feature (1)..(1092): Ceres Seq. ID no. 12372425
ctcatccggagtcgtcgccaagaaccacagccaccgcgatggcgcagatcatcgatggcaaggccatcgccgccgacgtccgccgcgaggtcgccgccgatgtggccgcgctctcgtcagcccacggactcgtgccggggctggccgtggtcatcgtggggagcaggaaggactcgcagacgtacgtgaacatgaagcgcaaggcgtgcgccgaggtcggcatctgctccatcgacgtcgacctcccggaggacatctccgagaccgcgctcgtcgccgaggttcatcgcctcaacgctgaccccgcagtgcacgggatccttgtccagcttccacttcctaagcatatcaacgaagagaagatactgagcgagatttccatcgagaaagatgtggatggcttccatcctctcaacattggcaagcttgcaatgaaaggcagagagccactgttcgtaccatgtacgccaaaggggtgcatggagctcttgtcaaggagcggagtcactgttaaaggtaagcgggcagttgtggttggtcgcagcaacatcgtcgggctacctgtatccctgctccttctgaaggcagatgcgaccgtatctgttgtgcactcgcggacccctgatcctgaaagcattgtacgcgaagctgacatagtcatcgcggcagctgggcaggctatgatgatcaaaggtgactggatcaagccaggtgctgcggtcatcgatgtcgggacgaactccatcgatgaccctacccggaagtccgggtaccggctcgtcggcgatgtggatttcgcagcagcgagcaaggttgctgggtacctgactccggttcccggaggcgttggcccaatgacggtggcaatgctgctgaagaacacggtggatggggcaaagcgggggatagtcgagtagctacgttcatctcacttctcgttgctgtacggcctgtgttgcaaggatgtgagctgactcgaaaagcgtgtgttggttggtgtaacaatctgtttcccaagaataagaatgatagtcacagctgttttcctgtttaataaatgcaatgaagaaagaattttggctttgctgctgt

SEQ ID NO: 32407 - protein, 304 aa, Zea mays subsp. mays
  peptide (1)..(304): Ceres Seq. ID no. 12372426
  misc_feature (134)..(302): Pfam Name: P Pfam Description: Tetrahydrofolate dehydrogenase/cyclohydrolase
  misc_feature (13)..(304): NCBI GI NO: 12083525 NR Description: similar to Pisum sativum methylenetetrahydrofolatedehydrogenase
  misc_feature (14)..(300): NCBI GI NO: 21553669 NR Description: 5
  misc_feature (14)..(300): NCBI GI NO: 15230449 NR Description: 5
  misc_feature (13)..(302): NCBI GI NO: 11252953 NR Description: methylenetetrahydrofolate dehydrogenase
  misc_feature (5)..(300): NCBI GI NO: 15236888 NR Description: putative tetrahydrofolate synthase
  misc_feature (16)..(300): NCBI GI NO: 25284864 NR Description: methylenetetrahydrofolate dehydrogenase
  misc_feature (16)..(300): NCBI GI NO: 30687594 NR Description: tetrahydrofolate dehydrogenase/cyclohydrolase
  misc_feature (13)..(300): NCBI GI NO: 9992889 NR Description: C1-THFS protein [Yarrowia lipolytica]
  misc_feature (13)..(300): NCBI GI NO: 23001349 NR Description: hypothetical protein [Magnetococcus sp. MC-1]
  misc_feature (4)..(300): NCBI GI NO: 17988855 NR Description: METHYLENETETRAHYDROFOLATE DEHYDROGENASE  / METHENYLTETRAHYDROFOLATE CYCLOHYDROLASE
HPESSPRTTATAMAQIIDGKAIAADVRREVAADVAALSSAHGLVPGLAVVIVGSRKDSQTYVNMKRKACAEVGICSIDVDLPEDISETALVAEVHRLNADPAVHGILVQLPLPKHINEEKILSEISIEKDVDGFHPLNIGKLAMKGREPLFVPCTPKGCMELLSRSGVTVKGKRAVVVGRSNIVGLPVSLLLLKADATVSVVHSRTPDPESIVREADIVIAAAGQAMMIKGDWIKPGAAVIDVGTNSIDDPTRKSGYRLVGDVDFAAASKVAGYLTPVPGGVGPMTVAMLLKNTVDGAKRGIVE

SEQ ID NO: 32408 - protein, 292 aa, Zea mays subsp. mays
  peptide (1)..(292): Ceres Seq. ID no. 12372427
  misc_feature (122)..(290): Pfam Name: P Pfam Description: Tetrahydrofolate dehydrogenase/cyclohydrolase
  misc_feature (1)..(292): NCBI GI NO: 12083525 NR Description: similar to Pisum sativum methylenetetrahydrofolatedehydrogenase
  misc_feature (2)..(288): NCBI GI NO: 21553669 NR Description: 5
  misc_feature (2)..(288): NCBI GI NO: 15230449 NR Description: 5
  misc_feature (1)..(290): NCBI GI NO: 11252953 NR Description: methylenetetrahydrofolate dehydrogenase
  misc_feature (1)..(288): NCBI GI NO: 15236888 NR Description: putative tetrahydrofolate synthase
  misc_feature (4)..(288): NCBI GI NO: 25284864 NR Description: methylenetetrahydrofolate dehydrogenase
  misc_feature (4)..(288): NCBI GI NO: 30687594 NR Description: tetrahydrofolate dehydrogenase/cyclohydrolase
  misc_feature (1)..(288): NCBI GI NO: 9992889 NR Description: C1-THFS protein [Yarrowia lipolytica]
  misc_feature (1)..(288): NCBI GI NO: 23001349 NR Description: hypothetical protein [Magnetococcus sp. MC-1]
  misc_feature (1)..(288): NCBI GI NO: 17988855 NR Description: METHYLENETETRAHYDROFOLATE DEHYDROGENASE  / METHENYLTETRAHYDROFOLATE CYCLOHYDROLASE
MAQIIDGKAIAADVRREVAADVAALSSAHGLVPGLAVVIVGSRKDSQTYVNMKRKACAEVGICSIDVDLPEDISETALVAEVHRLNADPAVHGILVQLPLPKHINEEKILSEISIEKDVDGFHPLNIGKLAMKGREPLFVPCTPKGCMELLSRSGVTVKGKRAVVVGRSNIVGLPVSLLLLKADATVSVVHSRTPDPESIVREADIVIAAAGQAMMIKGDWIKPGAAVIDVGTNSIDDPTRKSGYRLVGDVDFAAASKVAGYLTPVPGGVGPMTVAMLLKNTVDGAKRGIVE

SEQ ID NO: 32409 - protein, 241 aa, Zea mays subsp. mays
  peptide (1)..(241): Ceres Seq. ID no. 12372428
  misc_feature (71)..(239): Pfam Name: P Pfam Description: Tetrahydrofolate dehydrogenase/cyclohydrolase
  misc_feature (1)..(241): NCBI GI NO: 12083525 NR Description: similar to Pisum sativum methylenetetrahydrofolatedehydrogenase
  misc_feature (1)..(237): NCBI GI NO: 21553669 NR Description: 5
  misc_feature (1)..(237): NCBI GI NO: 15230449 NR Description: 5
  misc_feature (1)..(239): NCBI GI NO: 11252953 NR Description: methylenetetrahydrofolate dehydrogenase
  misc_feature (1)..(237): NCBI GI NO: 15236888 NR Description: putative tetrahydrofolate synthase
  misc_feature (1)..(237): NCBI GI NO: 25284864 NR Description: methylenetetrahydrofolate dehydrogenase
  misc_feature (1)..(237): NCBI GI NO: 30687594 NR Description: tetrahydrofolate dehydrogenase/cyclohydrolase
  misc_feature (1)..(237): NCBI GI NO: 9992889 NR Description: C1-THFS protein [Yarrowia lipolytica]
  misc_feature (1)..(237): NCBI GI NO: 23001349 NR Description: hypothetical protein [Magnetococcus sp. MC-1]
  misc_feature (1)..(237): NCBI GI NO: 17988855 NR Description: METHYLENETETRAHYDROFOLATE DEHYDROGENASE  / METHENYLTETRAHYDROFOLATE CYCLOHYDROLASE
MKRKACAEVGICSIDVDLPEDISETALVAEVHRLNADPAVHGILVQLPLPKHINEEKILSEISIEKDVDGFHPLNIGKLAMKGREPLFVPCTPKGCMELLSRSGVTVKGKRAVVVGRSNIVGLPVSLLLLKADATVSVVHSRTPDPESIVREADIVIAAAGQAMMIKGDWIKPGAAVIDVGTNSIDDPTRKSGYRLVGDVDFAAASKVAGYLTPVPGGVGPMTVAMLLKNTVDGAKRGIVE

SEQ ID NO: 32410 - DNA, 1132 bp, Zea mays subsp. mays
  misc_feature (1)..(1132): Ceres Seq. ID no. 12368827
agctcaccgccacctccacgctcgaagctcctcccgaaccggccgcatcgtcgccatggcagccgccgcttctgcaagctccgtgaaggaagtgctgccgtctcccctgacctccgcctccgagccccctccccttttcgatggcaccaccaggttgtacgtggcctatctttgcccgttcgcgcagcgcgcttggattgctagaaactacaagggtctgcaggacaagattaagatagttgccatcgatctcgctgacaggccagcgtggtacaaggagaaggtttatccagaaaacaaggtgccttctctagagcacgacaaccaggtgaaaggagagagcttggatttggttaagtacatcgacaacaacttcgaaggtccatcgttgctccccgaggatcatgcaaagcagcagttcgctgaggagctgctcggatacactgacgcattcaacaaagcattttactcatgtttagtcgacagggaagatgtgtctgaggaagccgttgctgccttggacaaaatagaagacgccctggggaaattcaacgacggcccgttcttccttggccagttcagtctggtggacgttgcgtatgtaccgttcatcgagaggtttcagatactctattccaatataaagaactatgacatcacaaagggcagacccagccttcagaaattcatcgaggaagtgaacaagatcgatgcgtacacacagactaaactggacccgcagtttttgcttgagcaaacaaagaagcggcttgggattgcttaaagcctgtgaccaaggacgagactttcgccagaagcaccagcgtagtagatcggagctcgttttagtaggttgtgtgcttggatattacgtctggtcttcaataaggcatggccttctttaatggctgtgcttctgaaaataaataaactagttgtccaggtattatcgttgctttggtgacgtgtcgatgtcactgtatatatatgaatgggtgggaaagaatgatgatgtgcagtgtgttctgtgcaaatattgccgagatgaaggatcagtatccatgtagacattcatatattgctcatattgtgacacggcgcatgaaagacatggtttcggcccctaccacgc

SEQ ID NO: 32411 - protein, 260 aa, Zea mays subsp. mays
  peptide (1)..(260): Ceres Seq. ID no. 12368828
  misc_feature (17)..(260): NCBI GI NO: 24796806 NR Description: putative glutathione S-transferase
  misc_feature (20)..(260): NCBI GI NO: 7939638 NR Description: XIG [Oryza sativa]
  misc_feature (20)..(260): NCBI GI NO: 7489703 NR Description: safener-induced In2.1-like protein - wheat
  misc_feature (20)..(260): NCBI GI NO: 24796810 NR Description: putative glutathione S-transferase
  misc_feature (19)..(260): NCBI GI NO: 1352460 NR Description: IN2-1 PROTEIN
  misc_feature (28)..(256): NCBI GI NO: 11385579 NR Description: In2-1 protein [Glycine max]
  misc_feature (33)..(256): NCBI GI NO: 15241956 NR Description: In2-1 protein, putative; protein id: At5g02790
  misc_feature (33)..(256): NCBI GI NO: 21537338 NR Description: In2-1 protein [Arabidopsis thaliana]
  misc_feature (12)..(257): NCBI GI NO: 15233164 NR Description: In2-1 protein, putative; protein id: At3g55040.1
  misc_feature (57)..(258): NCBI GI NO: 24796802 NR Description: putative dehydroascorbate reductase
AHRHLHARSSSRTGRIVAMAAAASASSVKEVLPSPLTSASEPPPLFDGTTRLYVAYLCPFAQRAWIARNYKGLQDKIKIVAIDLADRPAWYKEKVYPENKVPSLEHDNQVKGESLDLVKYIDNNFEGPSLLPEDHAKQQFAEELLGYTDAFNKAFYSCLVDREDVSEEAVAALDKIEDALGKFNDGPFFLGQFSLVDVAYVPFIERFQILYSNIKNYDITKGRPSLQKFIEEVNKIDAYTQTKLDPQFLLEQTKKRLGIA

SEQ ID NO: 32412 - protein, 242 aa, Zea mays subsp. mays
  peptide (1)..(242): Ceres Seq. ID no. 12368829
  misc_feature (1)..(242): NCBI GI NO: 24796806 NR Description: putative glutathione S-transferase
  misc_feature (2)..(242): NCBI GI NO: 7939638 NR Description: XIG [Oryza sativa]
  misc_feature (2)..(242): NCBI GI NO: 7489703 NR Description: safener-induced In2.1-like protein - wheat
  misc_feature (2)..(242): NCBI GI NO: 24796810 NR Description: putative glutathione S-transferase
  misc_feature (1)..(242): NCBI GI NO: 1352460 NR Description: IN2-1 PROTEIN
  misc_feature (10)..(238): NCBI GI NO: 11385579 NR Description: In2-1 protein [Glycine max]
  misc_feature (15)..(238): NCBI GI NO: 15241956 NR Description: In2-1 protein, putative; protein id: At5g02790
  misc_feature (15)..(238): NCBI GI NO: 21537338 NR Description: In2-1 protein [Arabidopsis thaliana]
  misc_feature (1)..(239): NCBI GI NO: 15233164 NR Description: In2-1 protein, putative; protein id: At3g55040.1
  misc_feature (39)..(240): NCBI GI NO: 24796802 NR Description: putative dehydroascorbate reductase
MAAAASASSVKEVLPSPLTSASEPPPLFDGTTRLYVAYLCPFAQRAWIARNYKGLQDKIKIVAIDLADRPAWYKEKVYPENKVPSLEHDNQVKGESLDLVKYIDNNFEGPSLLPEDHAKQQFAEELLGYTDAFNKAFYSCLVDREDVSEEAVAALDKIEDALGKFNDGPFFLGQFSLVDVAYVPFIERFQILYSNIKNYDITKGRPSLQKFIEEVNKIDAYTQTKLDPQFLLEQTKKRLGIA

SEQ ID NO: 32413 - DNA, 1341 bp, Zea mays subsp. mays
  misc_feature (1)..(1341): Ceres Seq. ID no. 12351670
atcactcaccaagaaccagagaggagcttcatcagctcattcaattctcgttccatccctcgtctcttgtgtcccgcctccgttccataattcaccagcgtcgtcctacccatatctcccatcgtcttctccctcgcgccatcagcttccccaagccagcggcgaccatgatctccccggacaccatccgcacggccatcggcgtcatcggcaatggaactgcactcgtgctcttcctctccccagtgcctacgttcatccgcatctggaagaaagggtcggtggagcagtactcgccgatcccgtacgtggcgacgctgctgaactgcatgatgtgggtgctgtacgggctgccggcggtgcacccgcacagcatgctggtgatcaccatcaacggcaccggcatggcgatccagctgacctacgtggcgctcttcctcctctactccgcgggggcggccggcgcaaggtggtcctgctgctggccgccgaggtgggcttcgtcggcgccgtcgccgcgctggtgctcagcctggcgcacacgcacgagcgcaggtccatggtggtcggcatcctctgcgtcctcttcggcaccggcatgtacgccgccccgctctccgtcaaaaatggtgatccagacaaagagcgtggagtacatgcccctgttcctgtcgctggcttccctcgtgaatggcatctgctggactgcttacgcgctcatccgcttcgacctctacattactatccccaacgggctgggcgtgctgttcgcggtggcgcagctggtgctgtacgccatctactacaagtccacccaggagatcatcgaggcgcgcaagcgcaaggccgaccagatcgccatgaccggggtggtcgtcgacggcggcaagaccaacaaccaagccgccgcgggccaatactgaccgacgatcaagtgacgatcgacaccaatatgctcatgcaagaagccagcggcaaatcaattatgtcgccgctgggttttatgtattttgtgattctatctgcacgctgcttgtccgtcccaatggaaaaaaaagggggggaagaaaaaggtttgtcggtatatgtgttctcgccgaataactctcgcgcatagctagctggtggggctgagtcactgccttcgctatatgtatacgtgcaaaaattagaggtggagggttgttttagctaatcccaccttaattccaaggcagagtgacctttttttttttctccttctgtttcctaggattttgctataattgagcaatttagcgcgacttgttattggtgttggtgtgtctcaatcaaatagtaaaatgttcattttactctttc

SEQ ID NO: 32414 - protein, 371 aa, Zea mays subsp. mays
  peptide (1)..(371): Ceres Seq. ID no. 12351671
  misc_feature (151)..(207): NCBI GI NO: 431154 NR Description: ORF [Lilium longiflorum]
  misc_feature (154)..(207): NCBI GI NO: 34912462 NR Description: MtN3-like protein
  misc_feature (154)..(207): NCBI GI NO: 34912454 NR Description: P0681B11.31
  misc_feature (153)..(207): NCBI GI NO: 18413388 NR Description: putative protein; protein id: At4g10850
  misc_feature (156)..(207): NCBI GI NO: 18405611 NR Description: Expressed protein; protein id: At3g28007
  misc_feature (156)..(207): NCBI GI NO: 21592355 NR Description: contains similarity to nodulin MtN3 protein
  misc_feature (153)..(207): NCBI GI NO: 7486709 NR Description: hypothetical protein F8M12
  misc_feature (154)..(207): NCBI GI NO: 15219732 NR Description: hypothetical protein; protein id: At1g66770.1
  misc_feature (156)..(207): NCBI GI NO: 11994120 NR Description: contains similarity to nodulin MtN3protein~gene_id:MMG15
  misc_feature (153)..(227): NCBI GI NO: 7486148 NR Description: hypothetical protein F25I24
SLTKNQRGASSAHSILVPSLVSCVPPPFHNSPASSYPYLPSSSPSRHQLPQASGDHDLPGHHPHGHRRHRQWNCTRALPLPSAYVHPHLEERVGGAVLADPVRGDAAELHDVGAVRAAGGAPAQHAGDHHQRHRHGDPADLRGALPPLLRGGGRRKVVLLLAAEVGFVGAVAALVLSLAHTHERRSMVVGILCVLFGTGMYAAPLSVKNGDPDKERGVHAPVPVAGFPREWHLLDCLRAHPLRPLHYYPQRAGRAVRGGAAGAVRHLLQVHPGDHRGAQAQGRPDRHDRGGRRRRQDQQPSRRGPILTDDQVTIDTNMLMQEASGKSIMSPLGFMYFVILSARCLSVPMEKKGGEEKGLSVYVFSPNNSRA

SEQ ID NO: 32415 - protein, 306 aa, Zea mays subsp. mays
  peptide (1)..(306): Ceres Seq. ID no. 12351672
  misc_feature (203)..(272): Pfam Name: Pfam Description:  MtN3/saliva family
  misc_feature (203)..(306): NCBI GI NO: 431154 NR Description: ORF [Lilium longiflorum]
  misc_feature (94)..(156): NCBI GI NO: 431154 NR Description: ORF [Lilium longiflorum]
  misc_feature (210)..(304): NCBI GI NO: 34912462 NR Description: MtN3-like protein
  misc_feature (56)..(149): NCBI GI NO: 34912462 NR Description: MtN3-like protein
  misc_feature (56)..(149): NCBI GI NO: 34912454 NR Description: P0681B11.31
  misc_feature (210)..(279): NCBI GI NO: 34912454 NR Description: P0681B11.31
  misc_feature (203)..(299): NCBI GI NO: 18413388 NR Description: putative protein; protein id: At4g10850
  misc_feature (62)..(148): NCBI GI NO: 18413388 NR Description: putative protein; protein id: At4g10850
  misc_feature (56)..(149): NCBI GI NO: 18405611 NR Description: Expressed protein; protein id: At3g28007
  misc_feature (203)..(271): NCBI GI NO: 18405611 NR Description: Expressed protein; protein id: At3g28007
HSPRTREELHQLIQFSFHPSSLVSRLRSIIHQRRPTHISHRLLPRAISFPKPAATMISPDTIRTAIGVIGNGTALVLFLSPVPTFIRIWKKGSVEQYSPIPYVATLLNCMMWVLYGLPAVHPHSMLVITINGTGMAIQLTYVALFLLYSAGAAGARWSCCWPPRWASSAPSPRWCSAWRTRTSAGPWWSASSASSSAPACTPPRSPSKMVIQTKSVEYMPLFLSLASLVNGICWTAYALIRFDLYITIPNGLGVLFAVAQLVLYAIYYKSTQEIIEARKRKADQIAMTGVVVDGGKTNNQAAAGQY

SEQ ID NO: 32416 - protein, 251 aa, Zea mays subsp. mays
  peptide (1)..(251): Ceres Seq. ID no. 12351673
  misc_feature (148)..(217): Pfam Name: Pfam Description:  MtN3/saliva family
  misc_feature (148)..(251): NCBI GI NO: 431154 NR Description: ORF [Lilium longiflorum]
  misc_feature (39)..(101): NCBI GI NO: 431154 NR Description: ORF [Lilium longiflorum]
  misc_feature (155)..(249): NCBI GI NO: 34912462 NR Description: MtN3-like protein
  misc_feature (1)..(94): NCBI GI NO: 34912462 NR Description: MtN3-like protein
  misc_feature (1)..(94): NCBI GI NO: 34912454 NR Description: P0681B11.31
  misc_feature (155)..(224): NCBI GI NO: 34912454 NR Description: P0681B11.31
  misc_feature (148)..(244): NCBI GI NO: 18413388 NR Description: putative protein; protein id: At4g10850
  misc_feature (7)..(93): NCBI GI NO: 18413388 NR Description: putative protein; protein id: At4g10850
  misc_feature (1)..(94): NCBI GI NO: 18405611 NR Description: Expressed protein; protein id: At3g28007
  misc_feature (148)..(216): NCBI GI NO: 18405611 NR Description: Expressed protein; protein id: At3g28007
MISPDTIRTAIGVIGNGTALVLFLSPVPTFIRIWKKGSVEQYSPIPYVATLLNCMMWVLYGLPAVHPHSMLVITINGTGMAIQLTYVALFLLYSAGAAGARWSCCWPPRWASSAPSPRWCSAWRTRTSAGPWWSASSASSSAPACTPPRSPSKMVIQTKSVEYMPLFLSLASLVNGICWTAYALIRFDLYITIPNGLGVLFAVAQLVLYAIYYKSTQEIIEARKRKADQIAMTGVVVDGGKTNNQAAAGQY

SEQ ID NO: 32417 - DNA, 1075 bp, Zea mays subsp. mays
  misc_feature (1)..(1075): Ceres Seq. ID no. 12364946
agtacagatccaccgccaccaccaccaccaagcactccagtcccgcagcagcatggccggcagcgcgtcccgcctcgccatcctcttggtgctcctggcggcgtcaccgctgcttggcgcgacgcagaaggccgcgccagggccggcgtcgtcgtcgggctcgggcgcgggcgcggcggacgcggcgccgccgacggacgtgaacaaggcgctgaaggacgagcagttcagcgagttccggcagctgctgcacgacacgcgcgtggacacgcagatcaacgcgcagctgacggacagctacaacgggctgaccatcatggcgcccaccaacgccgccttcgacaagatgaaggcgggcgtgctgaacgggctgtcgccgcaggagcagatccagatggtgctctactgcgtgctgccccggttctacagcctgtccatgctcggcaccctcagcggcaaggtcaacacgcaggggtccggccacgacgggccctacaggtacgacatcaagcggtcggggaacaacgtcaacgtgtccacgggggtgaactggatgctgctgggcagccccgtcagcaaggacttcccgctcgccatctaccccgtcgacaaggtgccgctcccctacgagctgttcgggcccaagccgcccacgccggcgcccgcgccggcacccgcgcccgggccggccaaggccaagaccaagaagaagaagaagtccgccgccatcgccgagccgcccacggccgacgacgacgacaccggctccacctccgacgaccagaaggctgccgccgcgccgccacgcgccagcagggcggccgccgcgctctccgtgctcggcgccgctgttctcgtcggcggcctcttctgatgggaagaggatcggatcggaggaggatagaatgaatgcaccgtcattcagaccaagatcacacggcgtgtgtgcgtttggccatcggctttattctttcttctctcttctcttgggggattttctctctctctctctctctctcggtgatttgtatttgtaacttaatgtgatatacattagcagtggttgttcttcttt

SEQ ID NO: 32418 - protein, 302 aa, Zea mays subsp. mays
  peptide (1)..(302): Ceres Seq. ID no. 12364947
  misc_feature (61)..(299): Pfam Name: Pfam Description:  HlyD family secretion protein
  misc_feature (57)..(302): NCBI GI NO: 22958681 NR Description: hypothetical protein [Rhodobacter sphaeroides]
  misc_feature (1)..(32): NCBI GI NO: 37530618 NR Description: unknown protein
STDPPPPPPPSTPVPQQHGRQRVPPRHPLGAPGGVTAAWRDAEGRARAGVVVGLGRGRGGRGAADGREQGAEGRAVQRVPAAAARHARGHADQRAADGQLQRADHHGAHQRRLRQDEGGRAERAVAAGADPDGALLRAAPVLQPVHARHPQRQGQHAGVRPRRALQVRHQAVGEQRQRVHGGELDAAGQPRQQGLPARHLPRRQGAAPLRAVRAQAAHAGARAGTRARAGQGQDQEEEEVRRHRRAAHGRRRRHRLHLRRPEGCRRAATRQQGGRRALRARRRCSRRRPLLMGRGSDRRRIE

SEQ ID NO: 32419 - protein, 290 aa, Zea mays subsp. mays
  peptide (1)..(290): Ceres Seq. ID no. 12364948
  misc_feature (72)..(208): Pfam Name: Pfam Description:  Fasciclin domain
  misc_feature (26)..(258): NCBI GI NO: 34910950 NR Description: putative arabinogalactan-like protein
  misc_feature (28)..(250): NCBI GI NO: 21553590 NR Description: arabinogalactan protein-like
  misc_feature (29)..(250): NCBI GI NO: 15239344 NR Description: fasciclin-like arabinogalactan-protein
  misc_feature (48)..(258): NCBI GI NO: 5919185 NR Description: arabinogalactan protein Pop14A9
  misc_feature (30)..(227): NCBI GI NO: 2129473 NR Description: arabinogalactan-like protein - loblolly pine
  misc_feature (18)..(264): NCBI GI NO: 18399381 NR Description: fasciclin-like arabinogalactan-protein
  misc_feature (29)..(247): NCBI GI NO: 15294288 NR Description: AT5g60490/muf9_140 [Arabidopsis thaliana]
  misc_feature (21)..(255): NCBI GI NO: 18379157 NR Description: fasciclin-like arabinogalactan-protein
  misc_feature (28)..(245): NCBI GI NO: 15241423 NR Description: fasciclin-like arabinogalactan-protein, putative
  misc_feature (21)..(255): NCBI GI NO: 24417458 NR Description: unknown [Arabidopsis thaliana]
VQIHRHHHHQALQSRSSMAGSASRLAILLVLLAASPLLGATQKAAPGPASSSGSGAGAADAAPPTDVNKALKDEQFSEFRQLLHDTRVDTQINAQLTDSYNGLTIMAPTNAAFDKMKAGVLNGLSPQEQIQMVLYCVLPRFYSLSMLGTLSGKVNTQGSGHDGPYRYDIKRSGNNVNVSTGVNWMLLGSPVSKDFPLAIYPVDKVPLPYELFGPKPPTPAPAPAPAPGPAKAKTKKKKKSAAIAEPPTADDDDTGSTSDDQKAAAAPPRASRAAAALSVLGAAVLVGGLF

SEQ ID NO: 32420 - protein, 273 aa, Zea mays subsp. mays
  peptide (1)..(273): Ceres Seq. ID no. 12364949
  misc_feature (55)..(191): Pfam Name: Pfam Description:  Fasciclin domain
  misc_feature (9)..(241): NCBI GI NO: 34910950 NR Description: putative arabinogalactan-like protein
  misc_feature (11)..(233): NCBI GI NO: 21553590 NR Description: arabinogalactan protein-like
  misc_feature (12)..(233): NCBI GI NO: 15239344 NR Description: fasciclin-like arabinogalactan-protein
  misc_feature (31)..(241): NCBI GI NO: 5919185 NR Description: arabinogalactan protein Pop14A9
  misc_feature (13)..(210): NCBI GI NO: 2129473 NR Description: arabinogalactan-like protein - loblolly pine
  misc_feature (1)..(247): NCBI GI NO: 18399381 NR Description: fasciclin-like arabinogalactan-protein
  misc_feature (12)..(230): NCBI GI NO: 15294288 NR Description: AT5g60490/muf9_140 [Arabidopsis thaliana]
  misc_feature (4)..(238): NCBI GI NO: 18379157 NR Description: fasciclin-like arabinogalactan-protein
  misc_feature (11)..(228): NCBI GI NO: 15241423 NR Description: fasciclin-like arabinogalactan-protein, putative
  misc_feature (4)..(238): NCBI GI NO: 24417458 NR Description: unknown [Arabidopsis thaliana]
MAGSASRLAILLVLLAASPLLGATQKAAPGPASSSGSGAGAADAAPPTDVNKALKDEQFSEFRQLLHDTRVDTQINAQLTDSYNGLTIMAPTNAAFDKMKAGVLNGLSPQEQIQMVLYCVLPRFYSLSMLGTLSGKVNTQGSGHDGPYRYDIKRSGNNVNVSTGVNWMLLGSPVSKDFPLAIYPVDKVPLPYELFGPKPPTPAPAPAPAPGPAKAKTKKKKKSAAIAEPPTADDDDTGSTSDDQKAAAAPPRASRAAAALSVLGAAVLVGGLF

SEQ ID NO: 32421 - DNA, 2021 bp, Zea mays subsp. mays
  misc_feature (1)..(2021): Ceres Seq. ID no. 12413767
atcgcaaactcggaaaccttgagaggaaagccaccagcagcaagcgaagaccaccagcagcagcgcagcggcgacgtgtttcgctctcgccatggcgtcgtcgtcctcgtcccggctgctgctcctcctcctcccgtgcctcgcgctcacgctgctcggcgcggcagacgccgaagtgcaccaccacgagttcgttatccaagagacgccggtgaagaggctgtgcaagacgcacaacatcatcacggtgaacgggcagtacccggggccgacgctggaggtcagggagggtgacacgctcgtcatcaacgtcgtcaaccgggcgcagtacaacgccaccatccactggcacggcatccggcagataaggactgggtgggcggacgggccggagttcgtgacgcagtgccccatcaggcccggcggcagctacaagtaccggttcaccatccaggggcaggagggcacgctgtggtggcacgcgcacagctcctggctcagggccaccgtctacggcgcgctcatcatccgccccagggagaacaagacctacccattcgccaagccctcgcgagaagtccccgtcatcctcggtgagtggtgggatgcgaacccgatcgacgtcatccgggaggcgcagaggaccggcggcggtcccaacgtctccgacgcgttcaccatcaacggccagcccggcgacctgtacaaatgctccaacaaagagactacggccatcccggtggaggccggcgagacggcgctgctgcggttcatcaacgccgcgctcaaccacgagctgttcgtcaccatcgcgcagcacaagatgacggtcgtcgccaccgacgcgtcctacaccaagcccttcaccacctcggtgctcatgctcgcgccgggccagaccaccgacgtcctcgtcaccatggaccagccgcccacccgctactacgtcgccgcgcgcgcctacgtctccggccagaacgtggccttcgacaacaccaccaccacggccgtcctcgagtacgactgcggctgcgcctccgacttcggccccaagatacagccggcgttcccggcggcgctaccggccttcaacgacacgtccgccgccaccgccttcgccgccgggatcaggagccccgaccgggtcaaggtccacgagaacgtcgacgagtacctcttcttcaccgtcggcctcggcctcttcaactgcaagccgggccagctctgcgccgggcccaacaacaacacccgcttcgcggccagcatgaacaacgtctccttcgtcttcccgcagaccgactccctcctccacgcgcactactacaagatccccggcgtcttcaccaccgacttcccggcatacccgccggtgcagttcgactacacggggcagaacgtcagccaggccctgtggcagccggtccccgccaccaagctgtacccgctcaggttcggctccgtggtgcagctcgtcctgcaggacaccagcatcgtcacgcccgagaaccaccccatccacatccacggctacgatttcttcatcctcgccgagggcttcggcaacttcgaccccaagaaggacgtcgagaagttcaactacgtcgacccgccccagaggaacaccgtggcggtgcctgtcaacggttgggcggtcatccagttcgtcgccgacaacccaggtgtgtggctcatgcattgccatctggacgtgcacatcacctggggcctggcaatggctttcctagtggaggacggctatggcgaactgcagtcgctggagccgcccccagttgatcttcccatgtgctagtggaggacggatatttgtgttgaggaagaaagcctgttcacgttgtatgttaattgttactcttttttggtggaggggggcgtgttcgtgatcttaaattcttaggggacttgattttccagcttgatttgaagtttcttctgtaaatctatgtaattttcaattaatgacattcagcatattatttgagaataaattatttctttgtacg

SEQ ID NO: 32422 - protein, 572 aa, Zea mays subsp. mays
  peptide (1)..(572): Ceres Seq. ID no. 12413768
  misc_feature (7)..(572): NCBI GI NO: 21552583 NR Description: diphenol oxidase laccase [Glycine max]
  misc_feature (2)..(572): NCBI GI NO: 3805962 NR Description: laccase [Populus balsamifera subsp. trichocarpa]
  misc_feature (11)..(572): NCBI GI NO: 15239103 NR Description: laccase
  misc_feature (7)..(572): NCBI GI NO: 15226663 NR Description: laccase
  misc_feature (17)..(572): NCBI GI NO: 15240701 NR Description: laccase
  misc_feature (12)..(572): NCBI GI NO: 13661201 NR Description: laccase [Pinus taeda]
  misc_feature (13)..(572): NCBI GI NO: 15227721 NR Description: laccase
  misc_feature (17)..(572): NCBI GI NO: 13661197 NR Description: laccase [Pinus taeda]
  misc_feature (12)..(572): NCBI GI NO: 13661199 NR Description: laccase [Pinus taeda]
  misc_feature (1)..(572): NCBI GI NO: 1621465 NR Description: laccase [Liriodendron tulipifera]
MASSSSSRLLLLLLPCLALTLLGAADAEVHHHEFVIQETPVKRLCKTHNIITVNGQYPGPTLEVREGDTLVINVVNRAQYNATIHWHGIRQIRTGWADGPEFVTQCPIRPGGSYKYRFTIQGQEGTLWWHAHSSWLRATVYGALIIRPRENKTYPFAKPSREVPVILGEWWDANPIDVIREAQRTGGGPNVSDAFTINGQPGDLYKCSNKETTAIPVEAGETALLRFINAALNHELFVTIAQHKMTVVATDASYTKPFTTSVLMLAPGQTTDVLVTMDQPPTRYYVAARAYVSGQNVAFDNTTTTAVLEYDCGCASDFGPKIQPAFPAALPAFNDTSAATAFAAGIRSPDRVKVHENVDEYLFFTVGLGLFNCKPGQLCAGPNNNTRFAASMNNVSFVFPQTDSLLHAHYYKIPGVFTTDFPAYPPVQFDYTGQNVSQALWQPVPATKLYPLRFGSVVQLVLQDTSIVTPENHPIHIHGYDFFILAEGFGNFDPKKDVEKFNYVDPPQRNTVAVPVNGWAVIQFVADNPGVWLMHCHLDVHITWGLAMAFLVEDGYGELQSLEPPPVDLPMC

SEQ ID NO: 32423 - protein, 361 aa, Zea mays subsp. mays
  peptide (1)..(361): Ceres Seq. ID no. 12413769
MLQQRDYGHPGGGRRDGAAAVHQRRAQPRAVRHHRAAQDDGRRHRRVLHQALHHLGAHARAGPDHRRPRHHGPAAHPLLRRRARLRLRPERGLRQHHHHGRPRVRLRLRLRLRPQDTAGVPGGATGLQRHVRRHRLRRRDQEPRPGQGPRERRRVPLLHRRPRPLQLQAGPALRRAQQQHPLRGQHEQRLLRLPADRLPPPRALLQDPRRLHHRLPGIPAGAVRLHGAERQPGPVAAGPRHQAVPAQVRLRGAARPAGHQHRHAREPPHPHPRLRFLHPRRGLRQLRPQEGRREVQLRRPAPEEHRGGACQRLGGHPVRRRQPRCVAHALPSGRAHHLGPGNGFPSGGRLWRTAVAGAAPS

SEQ ID NO: 32424 - protein, 328 aa, Zea mays subsp. mays
  peptide (1)..(328): Ceres Seq. ID no. 12413770
  misc_feature (1)..(328): NCBI GI NO: 21552583 NR Description: diphenol oxidase laccase [Glycine max]
  misc_feature (1)..(328): NCBI GI NO: 3805962 NR Description: laccase [Populus balsamifera subsp. trichocarpa]
  misc_feature (1)..(328): NCBI GI NO: 15239103 NR Description: laccase
  misc_feature (1)..(328): NCBI GI NO: 15226663 NR Description: laccase
  misc_feature (1)..(328): NCBI GI NO: 15240701 NR Description: laccase
  misc_feature (1)..(328): NCBI GI NO: 13661201 NR Description: laccase [Pinus taeda]
  misc_feature (1)..(328): NCBI GI NO: 15227721 NR Description: laccase
  misc_feature (1)..(328): NCBI GI NO: 13661197 NR Description: laccase [Pinus taeda]
  misc_feature (1)..(328): NCBI GI NO: 13661199 NR Description: laccase [Pinus taeda]
  misc_feature (1)..(328): NCBI GI NO: 1621465 NR Description: laccase [Liriodendron tulipifera]
MTVVATDASYTKPFTTSVLMLAPGQTTDVLVTMDQPPTRYYVAARAYVSGQNVAFDNTTTTAVLEYDCGCASDFGPKIQPAFPAALPAFNDTSAATAFAAGIRSPDRVKVHENVDEYLFFTVGLGLFNCKPGQLCAGPNNNTRFAASMNNVSFVFPQTDSLLHAHYYKIPGVFTTDFPAYPPVQFDYTGQNVSQALWQPVPATKLYPLRFGSVVQLVLQDTSIVTPENHPIHIHGYDFFILAEGFGNFDPKKDVEKFNYVDPPQRNTVAVPVNGWAVIQFVADNPGVWLMHCHLDVHITWGLAMAFLVEDGYGELQSLEPPPVDLPMC

SEQ ID NO: 32425 - DNA, 1342 bp, Zea mays subsp. mays
  misc_feature (1)..(1342): Ceres Seq. ID no. 12425290
gcacgagaccattacctagaacatcctaatcgaaaagggagcaatataactaactgcacaaacgcaaaagtcaaacttgcagctgaggaatcgatcgcatcggtatcttgacgtgttcattgcccgattctagctactagtccccgctagctcttgagcgatcgtcgtagctagccgcccgccgtcgatcgatgggtgcaccggcgccgtccgtcgccgtggtcgccgcggtggtggtttgcctgtgcggcgcctttgcgcgcgcgcaggacatggacaacgagtgggcgcggccgccgtaccgcggcttcttcggcggccccgggtcgctgctgccgcagtcggacgtggacctgctggagttcccgctgaacctggagtacctggagacggagttcttctgctgggccgctctggggtacggcctcgacgccatcgatgccaacctcaccggcggcgggccgccctccatcggcggccagtccgccttccctcaccccgttcatccgcgacgtcgccacccagttctgctaccaagaagtcggacacctcagggcgatcaagcagacggtgaggggcttcccgcggccgttgctggacatcagcgcggccaacttcggcaagatcatcgagcaggcgctgaacgcgacgctggatccgcccttcaacccctacgagaacagcgtcaacttcctcgtcgcctcctacatcatcccctacgtcggcctcaccggctacgtcggcgccaaccccaggctcttcacccctcaggccagaaagctgctggcggggctgctggcggtggagtcagcgcaggacgcggtgatccggacgctgctgtacgagcgcgggatggcgcgtgtggcgggctacgccgtcggggtggcggaggtcacggcgcacatctcggacctcaggaactcgctggggaggaggggcgtcaaggacgagggactggtggtggcggccgagctggggcccgaggggctcaccgtggggaatgtcatcgccggtgaccacctctcgctcgcctacgaccgcacgcccgaggagatcctcggcatcgtctacggcaccggcaaccccgctcagcacggtgggttctttccccagggcgccgacggccgcatcgccagggggctcctcgcgtagcgcatgggcgtgtagcgaccgtgcgctgagcagcacggggggtaaagttgtccgtgtccctgctgcacggtacaggctgtagactagtactagtactttacgtgtttgtatgttcgcgactttgacgcatgtagttgtgtggtgagtgtgtaaactggatgatataaatgaatgttggtggaaataaagc

SEQ ID NO: 32426 - protein, 274 aa, Zea mays subsp. mays
  peptide (1)..(274): Ceres Seq. ID no. 12425291
  misc_feature (1)..(99): NCBI GI NO: 38346151 NR Description: OSJNBb0118P14.11
  misc_feature (52)..(104): NCBI GI NO: 21593191 NR Description: dessication-related protein, putative
  misc_feature (52)..(104): NCBI GI NO: 18401988 NR Description: dessication-related protein, putative
  misc_feature (52)..(104): NCBI GI NO: 25357137 NR Description: hypothetical protein T2J15.11
  misc_feature (48)..(99): NCBI GI NO: 118926 NR Description: Desiccation-related protein PCC13-62 precursor
  misc_feature (33)..(107): NCBI GI NO: 15228845 NR Description: putative protein; protein id: At3g62730
  misc_feature (33)..(99): NCBI GI NO: 12083528 NR Description: similar to Arabidopsis thaliana hypotheticalprotein
  misc_feature (42)..(104): NCBI GI NO: 22984403 NR Description: hypothetical protein [Burkholderia fungorum]
MGAPAPSVAVVAAVVVCLCGAFARAQDMDNEWARPPYRGFFGGPGSLLPQSDVDLLEFPLNLEYLETEFFCWAALGYGLDAIDANLTGGGPPSIGGQSAFPHPVHPRRRHPVLLPRSRTPQGDQADGEGLPAAVAGHQRGQLRQDHRAGAERDAGSALQPLREQRQLPRRLLHHPLRRPHRLRRRQPQALHPSGQKAAGGAAGGGVSAGRGDPDAAVRARDGACGGLRRRGGGGHGAHLGPQELAGEEGRQGRGTGGGGRAGARGAHRGECHRR

SEQ ID NO: 32427 - protein, 247 aa, Zea mays subsp. mays
  peptide (1)..(247): Ceres Seq. ID no. 12425292
  misc_feature (1)..(72): NCBI GI NO: 38346151 NR Description: OSJNBb0118P14.11
  misc_feature (25)..(77): NCBI GI NO: 21593191 NR Description: dessication-related protein, putative
  misc_feature (25)..(77): NCBI GI NO: 18401988 NR Description: dessication-related protein, putative
  misc_feature (25)..(77): NCBI GI NO: 25357137 NR Description: hypothetical protein T2J15.11
  misc_feature (21)..(72): NCBI GI NO: 118926 NR Description: Desiccation-related protein PCC13-62 precursor
  misc_feature (6)..(80): NCBI GI NO: 15228845 NR Description: putative protein; protein id: At3g62730
  misc_feature (6)..(72): NCBI GI NO: 12083528 NR Description: similar to Arabidopsis thaliana hypotheticalprotein
  misc_feature (15)..(77): NCBI GI NO: 22984403 NR Description: hypothetical protein [Burkholderia fungorum]
MDNEWARPPYRGFFGGPGSLLPQSDVDLLEFPLNLEYLETEFFCWAALGYGLDAIDANLTGGGPPSIGGQSAFPHPVHPRRRHPVLLPRSRTPQGDQADGEGLPAAVAGHQRGQLRQDHRAGAERDAGSALQPLREQRQLPRRLLHHPLRRPHRLRRRQPQALHPSGQKAAGGAAGGGVSAGRGDPDAAVRARDGACGGLRRRGGGGHGAHLGPQELAGEEGRQGRGTGGGGRAGARGAHRGECHRR

SEQ ID NO: 32428 - protein, 237 aa, Zea mays subsp. mays
  peptide (1)..(237): Ceres Seq. ID no. 12425293
  misc_feature (8)..(237): NCBI GI NO: 38346151 NR Description: OSJNBb0118P14.11
  misc_feature (2)..(236): NCBI GI NO: 21593191 NR Description: dessication-related protein, putative
  misc_feature (2)..(236): NCBI GI NO: 18401988 NR Description: dessication-related protein, putative
  misc_feature (2)..(236): NCBI GI NO: 25357137 NR Description: hypothetical protein T2J15.11
  misc_feature (6)..(230): NCBI GI NO: 118926 NR Description: Desiccation-related protein PCC13-62 precursor
  misc_feature (3)..(236): NCBI GI NO: 15228845 NR Description: putative protein; protein id: At3g62730
  misc_feature (114)..(234): NCBI GI NO: 12083528 NR Description: similar to Arabidopsis thaliana hypotheticalprotein
  misc_feature (8)..(95): NCBI GI NO: 12083528 NR Description: similar to Arabidopsis thaliana hypotheticalprotein
  misc_feature (17)..(231): NCBI GI NO: 22984403 NR Description: hypothetical protein [Burkholderia fungorum]
  misc_feature (5)..(231): NCBI GI NO: 16263242 NR Description: Conserved hypothetical protein
MPTSPAAGRPPSAASPPSLTPFIRDVATQFCYQEVGHLRAIKQTVRGFPRPLLDISAANFGKIIEQALNATLDPPFNPYENSVNFLVASYIIPYVGLTGYVGANPRLFTPQARKLLAGLLAVESAQDAVIRTLLYERGMARVAGYAVGVAEVTAHISDLRNSLGRRGVKDEGLVVAAELGPEGLTVGNVIAGDHLSLAYDRTPEEILGIVYGTGNPAQHGGFFPQGADGRIARGLLA

SEQ ID NO: 32429 - DNA, 1359 bp, Zea mays subsp. mays
  misc_feature (1)..(1359): Ceres Seq. ID no. 12342086
gctctatacgactcctccatcctccccccctccccgtgatggctgcaatggatggggtaattgtagtggagctgtagaggcggcgggggtgcggttgcgacggactgtgctgcgccgacaagctgggaagaggaggcagcggcggcggggtgggacttgggatgggtcttctgtcgaaccgggtggagcggtcggagatcaggcccggcgaccacatctacacctggcgggccgtctacgcctactcccaccacggtatttatgtcgggggaagcaaagtggtccattttacacgtaagaaagaaactgaaacttcagattcatcagactccacctccagcctgatctcagagatttcatcagagtgccaaacattccctgattgtggatttcagctgtctaatagtggtgttgtcctcacttgcttggactgtttcctccgcaacggctccctctattgcttcgagtatggagtgccatctgcagttttccttgcaaagattcgtggggggacctgcaccattgccgaatcagacccaccagaagttgttgtccatcgagcgatgtacctgcttcaaaatggttttggaaactacgacatgtttgagaagaactgcgaagacttcgcactctactgcaagactgggcttctacctgttgaggagcctggcattgggactagtgggcaagcttcttctgctattggtgtgccgttggcagctcttctgtccactccgttcaagcttcttctgctggtccgcttggaatggccactgtcactgctgggatgtactgtgctggcagatacattactgacataggagtaaggaaggacgtagcaaaagttgaagtggagaaattatcatcgcaccccggtttccaccttgttgaagatgaagaatcagtcaacaagcgatcagaaaaaccaaagaccttgctccctatgaagaggaaacgagaaaggtgactgcgaagcacagcttaggaggatgaacttctcttcccttcaattggtgtcgaattgtggataatttgggatatgataataagactcggtatagatatgtgccttgcgaatgtatcataattggattaggcgcacccctcacctgatcaactgtaactgccttataaattcaatcaaattgctatataatgtagatttttcttctttgtgaggtttcagtcttctgctgcaattaataacagttataatattttttactgatctgggagatcactgtatctgtattctgtagttacaacttacaaggtagagcaaactatcggcaatggcgttttcatcaggtatactgtacgaaaagtgaatataaaaaattgagcagagcttgtttttgg

SEQ ID NO: 32430 - protein, 219 aa, Zea mays subsp. mays
  peptide (1)..(219): Ceres Seq. ID no. 12342087
  misc_feature (99)..(179): Pfam Name: Pfam Description:  NC domain
  misc_feature (1)..(197): NCBI GI NO: 18378812 NR Description: Expressed protein; protein id: At1g01225
  misc_feature (1)..(197): NCBI GI NO: 21592684 NR Description: unknown [Arabidopsis thaliana]
  misc_feature (1)..(197): NCBI GI NO: 22328196 NR Description: unknown protein; protein id: At4g00905.1
  misc_feature (1)..(196): NCBI GI NO: 18415178 NR Description: putative protein; protein id: At5g06370
  misc_feature (1)..(196): NCBI GI NO: 18396282 NR Description: expressed protein; protein id: At3g02700
  misc_feature (1)..(196): NCBI GI NO: 21594170 NR Description: unknown [Arabidopsis thaliana]
  misc_feature (1)..(179): NCBI GI NO: 15237330 NR Description: putative protein; protein id: At5g16360.1
  misc_feature (32)..(196): NCBI GI NO: 9758417 NR Description: gb|AAF32477
  misc_feature (1)..(193): NCBI GI NO: 15237327 NR Description: putative protein; protein id: At5g16330.1
MGLLSNRVERSEIRPGDHIYTWRAVYAYSHHGIYVGGSKVVHFTRKKETETSDSSDSTSSLISEISSECQTFPDCGFQLSNSGVVLTCLDCFLRNGSLYCFEYGVPSAVFLAKIRGGTCTIAESDPPEVVVHRAMYLLQNGFGNYDMFEKNCEDFALYCKTGLLPVEEPGIGTSGQASSAIGVPLAALLSTPFKLLLLVRLEWPLSLLGCTVLADTLLT

SEQ ID NO: 32431 - protein, 115 aa, Zea mays subsp. mays
  peptide (1)..(115): Ceres Seq. ID no. 12342088
MECHLQFSLQRFVGGPAPLPNQTHQKLLSIERCTCFKMVLETTTCLRRTAKTSHSTARLGFYLLRSLALGLVGKLLLLLVCRWQLFCPLRSSFFCWSAWNGHCHCWDVLCWQIHY

SEQ ID NO: 32432 - DNA, 1417 bp, Zea mays subsp. mays
  misc_feature (1)..(1417): Ceres Seq. ID no. 12353388
actcggccactcgacaccaccctccgcgctccgcatccgctcctccctctgctgccgtgccggtgccgctagccatccccacttctcacccgccccctctcctctactgccgccagccgcaacaaagatatggatagagcggccgcgacagccgcagacattatcgtcatgatcccatcgctctcgccttcgcctttgtagcactacctcctcgtccatccgcccccctatttcgtcccactcgggttgctagatcggactggatctctctgcccgtttcttggagcagagatggccgaaatgaccgtgactgtcgcggccgccaaaagcaccctccggacgtgccccggcgcccgccgtgctgcggttcttggtcggtggatgcctcttgcaccagcggcgcccgccaacttgaaattgttctctccagctgtgagggttccaagggctacttcccctgcggcggttgaggatgggagcaacactgatatagtccctatcccgaaagttataatagaccaagactcagatccggatgcaaccattgtagaaataaccttgggtgatcgtcttggcgatctccttgatacgatgagtgcgctaaagaacttggggctaaatgttgttaaagctagtgtctgtctcgattctactggcaagcatatcaagtttgctataactagagcgttcactggccgtaaaattgatgatccagagttgttagaagcagttcgactgacgatcattaacaacatgatacagtatcatccagagtccagcagtcaattggctatgggggcaacttttgggccagaagcccctacggaagaggttgatgtggatatagcaacccacatagatatctatgatgatggccctgaaagaagcttacttgtggtggaaacagcggatcgtccagggttactggttgaccttgttaagatcatctcggacatcagcattaatgtccaatctggagagtttgacactgaggggctactggctaaagcaaaattccatgtcagctacaggggcagaacactgaccgaggctttacaacaggttctttctaatagcttgcgctatttcttgaggcggccgacaacagaggacgccagcttctagccagatagatgatcatgaagcctcccaactttcttatgtggtggtattcacatgaattgaataccatcgtcaaagcatttgaaacacgcacaataatttgttaagatgggggcaattgtacttgatgttatggcaccacaccaattcgaagtattttttgttccaaggcaggggaatctgttgtatccaagtgcagaagattgctattcttaatcatgtaataacacattattattttgctacttgggatacaccgtttggtggtaaataagatggaatattgtgggggccc

SEQ ID NO: 32433 - protein, 277 aa, Zea mays subsp. mays
  peptide (1)..(277): Ceres Seq. ID no. 12353389
  misc_feature (199)..(268): Pfam Name: Pfam Description:  ACT domain
  misc_feature (52)..(277): NCBI GI NO: 18394414 NR Description: expressed protein; protein id: At1g16880
  misc_feature (23)..(277): NCBI GI NO: 15238305 NR Description: putative protein; protein id: At5g04740
  misc_feature (23)..(277): NCBI GI NO: 21592963 NR Description: unknown [Arabidopsis thaliana]
MAEMTVTVAAAKSTLRTCPGARRAAVLGRWMPLAPAAPANLKLFSPAVRVPRATSPAAVEDGSNTDIVPIPKVIIDQDSDPDATIVEITLGDRLGDLLDTMSALKNLGLNVVKASVCLDSTGKHIKFAITRAFTGRKIDDPELLEAVRLTIINNMIQYHPESSSQLAMGATFGPEAPTEEVDVDIATHIDIYDDGPERSLLVVETADRPGLLVDLVKIISDISINVQSGEFDTEGLLAKAKFHVSYRGRTLTEALQQVLSNSLRYFLRRPTTEDASF

SEQ ID NO: 32434 - protein, 274 aa, Zea mays subsp. mays
  peptide (1)..(274): Ceres Seq. ID no. 12353390
  misc_feature (196)..(265): Pfam Name: Pfam Description:  ACT domain
  misc_feature (49)..(274): NCBI GI NO: 18394414 NR Description: expressed protein; protein id: At1g16880
  misc_feature (20)..(274): NCBI GI NO: 15238305 NR Description: putative protein; protein id: At5g04740
  misc_feature (20)..(274): NCBI GI NO: 21592963 NR Description: unknown [Arabidopsis thaliana]
MTVTVAAAKSTLRTCPGARRAAVLGRWMPLAPAAPANLKLFSPAVRVPRATSPAAVEDGSNTDIVPIPKVIIDQDSDPDATIVEITLGDRLGDLLDTMSALKNLGLNVVKASVCLDSTGKHIKFAITRAFTGRKIDDPELLEAVRLTIINNMIQYHPESSSQLAMGATFGPEAPTEEVDVDIATHIDIYDDGPERSLLVVETADRPGLLVDLVKIISDISINVQSGEFDTEGLLAKAKFHVSYRGRTLTEALQQVLSNSLRYFLRRPTTEDASF

SEQ ID NO: 32435 - protein, 247 aa, Zea mays subsp. mays
  peptide (1)..(247): Ceres Seq. ID no. 12353391
  misc_feature (169)..(238): Pfam Name: Pfam Description:  ACT domain
  misc_feature (22)..(247): NCBI GI NO: 18394414 NR Description: expressed protein; protein id: At1g16880
  misc_feature (1)..(247): NCBI GI NO: 15238305 NR Description: putative protein; protein id: At5g04740
  misc_feature (1)..(247): NCBI GI NO: 21592963 NR Description: unknown [Arabidopsis thaliana]
MPLAPAAPANLKLFSPAVRVPRATSPAAVEDGSNTDIVPIPKVIIDQDSDPDATIVEITLGDRLGDLLDTMSALKNLGLNVVKASVCLDSTGKHIKFAITRAFTGRKIDDPELLEAVRLTIINNMIQYHPESSSQLAMGATFGPEAPTEEVDVDIATHIDIYDDGPERSLLVVETADRPGLLVDLVKIISDISINVQSGEFDTEGLLAKAKFHVSYRGRTLTEALQQVLSNSLRYFLRRPTTEDASF

SEQ ID NO: 32436 - DNA, 2887 bp, Zea mays subsp. mays
  misc_feature (1)..(2887): Ceres Seq. ID no. 13635664
ggctgagaccgctcagcgacaaggagatttcaaggggggacccggcggagtgggagtgcatcaacgacactaccatcatctcccggagcaccttcccggaccggcccactgctccgactgcgtattcgttcgatagggtatttcgttctgactgtactaccaaagaagtatatgaggaagggaccaaagcagttgccctctctgtagttagtggcattaactcaagtgtttttgcatatggtcaaacaagtagtggaaaaacatacaccatgactggaataacggaatatacagcagcagatatctatgattacattgccaagcatgaagagagagcgtttgtattgaaattttcagcaatcgaaatatataacgaagttgtaagggatcttcttagtgcagaaaacacatcgcttagactttgggatgatgcagagaagggaacatgtgtagagaaccttacagaggtgaccttgagggattcagaccacctgaaagaacttattctacgtgtgaagctcaaaaggaggaccggagagacatacttaaatgaaaacagctccagatcacaccaaatacttaaactgactattgaaagttctgctcatgagttcttgggtaaggacaagtcaacaacacttgttgctagtgtgaacttcgttgatttggctggaagtgaacgtgcatcccaggcattatcagctgggactaggctgaaggaaggttgtcatattaatagaagtctacttaccctaggaactggtattcggaaactaagcaaggtaagaaatgggcacataccataccgagattcaaagctcacgcgcatattcaccttctctaggaggcaatgcaagaacagcaattatttgtacaatgagcccagcccggagccatatggacagtcaaggaataccttgttgtttgcaagttgtgcaaaggaagtggtgacaaatgcccaggttaatgtcgttatgtctgataaggcactggttaagcaattacaaaaagaacttgcaaggttggagagtgaattgcgatgcccagcttcatattctggtcttgaagcattagtgagagaaaaagataatcaaatccggaagatggataaagaaattaaggaactgaagttacatcgtgatcttgctcagtctagactgcaagatttgctcaaggttgttggagataaccacggttcgaagcaccccctggcttcttctgcaagaaattttacttttgatgttcctcagccatgtgaggatgagcaatcgacgacatcagaagctttcagcagtggccaaattttaggcttcaaggcgcctgacacacaaagagattataggtcacagcaatctgaaaatgatgtgcagtttgctacccctcttagctattcaatcagcagtcccccattcagtgggatgcctccaactaatggcagaaatgataactctcatatatctgatgaagattcagaggatctttgcaaagaagtacggtgcatagagaccaatgaaacagaagaaaatgaatgcttagagtcgtcagctgtgggaagcaatagtctgcaagattcaaatttagcttccagcatgcatgggaacgacaatacaaatcgatctgtgaattctggacggaatgatgcatcttctattaccctggaacaacatctggagaatgtcaaaaaaccgtttgccaatcctggcatggatctgggatcctctacacgtaactcgtcaagctcaaaagtaattggcagaagcaggagctgtaggtctctgatgggttctactctgttggaagacttggagaaagaagtttgcacccctccaagcagaagtttcatggactacccagggaggcccgaaacatgtcaaagaagggtacccgcactgaactacgatgcagagagtgaagctttatccagggcaggatcaatgctatctgaaattaccaccacgaggggtggactgaaggaaaacagctctgctgctggtgatacagaatttgttgctggcataggtgaatttgtcgcggagctaaaagaaatggcccagggtcataatggagaattggctgaagggaccataaggagcgtggggctggatcccattatggatatcttgcaatcaccttctcgctggcctttggaattcgagaagaaacagcaggagatcattgacctgtggcatggatgcaacgtttccttggtccacaggacttactttttcctgctgttcaaaggggacccagccgacgccatttacatggaagtggagcttaggaggttatcatttctcaagaacacatactccaacggaagcatggggtatgatatggtggcaggcagcttgagcacttctctggtttcaagtgcaaagaaactgcaacgcgagagggagatgctctgcaggcagatgcagaagcggctgacgatccaggaacgggagagcctgtacaccaagtggggagtctcgctgtcctccaagaggaggcggctgcaggtcgctcggcgcctttggacggagaccagggacctggagcatgtgagggagagcgcgtccctcgtggccagactgatcgggctcctggagcctgggaaggcgctgagggagatgtttggtctgagcttcgcgccgcagcagtccacccggaggtcgcacagtagttggcggtatggccgttcttctctagactgactgagctcgaaagacgcagctgacaaaaaaacaacaacagttattccgttgttttcgttttgtgtagtgcctgatttttttgctgtcctctcggaaaatagaaattcctgaacattttgtgaccagtctgcgagaaaatttggtagcattttcaagatttattgatgtttacaatttggaaaccgtcaacg

SEQ ID NO: 32437 - protein, 897 aa, Zea mays subsp. mays
  peptide (1)..(897): Ceres Seq. ID no. 13635665
  misc_feature (464)..(892): NCBI GI NO: 15208447 NR Description: kinesin heavy chain [Zea mays]
  misc_feature (80)..(395): NCBI GI NO: 15208447 NR Description: kinesin heavy chain [Zea mays]
  misc_feature (1)..(395): NCBI GI NO: 30693419 NR Description: expressed protein [Arabidopsis thaliana]
  misc_feature (676)..(896): NCBI GI NO: 30693419 NR Description: expressed protein [Arabidopsis thaliana]
  misc_feature (1)..(524): NCBI GI NO: 30698217 NR Description: kinesin heavy chain DNA binding protein-related
  misc_feature (694)..(896): NCBI GI NO: 30698217 NR Description: kinesin heavy chain DNA binding protein-related
  misc_feature (1)..(506): NCBI GI NO: 18416291 NR Description: hypothetical protein [Arabidopsis thaliana]
  misc_feature (485)..(894): NCBI GI NO: 18416291 NR Description: hypothetical protein [Arabidopsis thaliana]
  misc_feature (1)..(400): NCBI GI NO: 15234898 NR Description: kinesin like protein [Arabidopsis thaliana]
  misc_feature (607)..(896): NCBI GI NO: 15234898 NR Description: kinesin like protein [Arabidopsis thaliana]
LRPLSDKEISRGDPAEWECINDTTIISRSTFPDRPTAPTAYSFDRVFRSDCTTKEVYEEGTKAVALSVVSGINSSVFAYGQTSSGKTYTMTGITEYTAADIYDYIAKHEERAFVLKFSAIEIYNEVVRDLLSAENTSLRLWDDAEKGTCVENLTEVTLRDSDHLKELILRVKLKRRTGETYLNENSSRSHQILKLTIESSAHEFLGKDKSTTLVASVNFVDLAGSERASQALSAGTRLKEGCHINRSLLTLGTGIRKLSKVRNGHIPYRDSKLTRIFTFSRRQCKNSNYLYNEPSPEPYGQSRNTLLFASCAKEVVTNAQVNVVMSDKALVKQLQKELARLESELRCPASYSGLEALVREKDNQIRKMDKEIKELKLHRDLAQSRLQDLLKVVGDNHGSKHPLASSARNFTFDVPQPCEDEQSTTSEAFSSGQILGFKAPDTQRDYRSQQSENDVQFATPLSYSISSPPFSGMPPTNGRNDNSHISDEDSEDLCKEVRCIETNETEENECLESSAVGSNSLQDSNLASSMHGNDNTNRSVNSGRNDASSITLEQHLENVKKPFANPGMDLGSSTRNSSSSKVIGRSRSCRSLMGSTLLEDLEKEVCTPPSRSFMDYPGRPETCQRRVPALNYDAESEALSRAGSMLSEITTTRGGLKENSSAAGDTEFVAGIGEFVAELKEMAQGHNGELAEGTIRSVGLDPIMDILQSPSRWPLEFEKKQQEIIDLWHGCNVSLVHRTYFFLLFKGDPADAIYMEVELRRLSFLKNTYSNGSMGYDMVAGSLSTSLVSSAKKLQREREMLCRQMQKRLTIQERESLYTKWGVSLSSKRRRLQVARRLWTETRDLEHVRESASLVARLIGLLEPGKALREMFGLSFAPQQSTRRSHSSWRYGRSSLD

SEQ ID NO: 32438 - protein, 808 aa, Zea mays subsp. mays
  peptide (1)..(808): Ceres Seq. ID no. 13635666
  misc_feature (375)..(803): NCBI GI NO: 15208447 NR Description: kinesin heavy chain [Zea mays]
  misc_feature (1)..(306): NCBI GI NO: 15208447 NR Description: kinesin heavy chain [Zea mays]
  misc_feature (1)..(306): NCBI GI NO: 30693419 NR Description: expressed protein [Arabidopsis thaliana]
  misc_feature (587)..(807): NCBI GI NO: 30693419 NR Description: expressed protein [Arabidopsis thaliana]
  misc_feature (1)..(435): NCBI GI NO: 30698217 NR Description: kinesin heavy chain DNA binding protein-related
  misc_feature (605)..(807): NCBI GI NO: 30698217 NR Description: kinesin heavy chain DNA binding protein-related
  misc_feature (1)..(417): NCBI GI NO: 18416291 NR Description: hypothetical protein [Arabidopsis thaliana]
  misc_feature (396)..(805): NCBI GI NO: 18416291 NR Description: hypothetical protein [Arabidopsis thaliana]
  misc_feature (1)..(311): NCBI GI NO: 15234898 NR Description: kinesin like protein [Arabidopsis thaliana]
  misc_feature (518)..(807): NCBI GI NO: 15234898 NR Description: kinesin like protein [Arabidopsis thaliana]
MTGITEYTAADIYDYIAKHEERAFVLKFSAIEIYNEVVRDLLSAENTSLRLWDDAEKGTCVENLTEVTLRDSDHLKELILRVKLKRRTGETYLNENSSRSHQILKLTIESSAHEFLGKDKSTTLVASVNFVDLAGSERASQALSAGTRLKEGCHINRSLLTLGTGIRKLSKVRNGHIPYRDSKLTRIFTFSRRQCKNSNYLYNEPSPEPYGQSRNTLLFASCAKEVVTNAQVNVVMSDKALVKQLQKELARLESELRCPASYSGLEALVREKDNQIRKMDKEIKELKLHRDLAQSRLQDLLKVVGDNHGSKHPLASSARNFTFDVPQPCEDEQSTTSEAFSSGQILGFKAPDTQRDYRSQQSENDVQFATPLSYSISSPPFSGMPPTNGRNDNSHISDEDSEDLCKEVRCIETNETEENECLESSAVGSNSLQDSNLASSMHGNDNTNRSVNSGRNDASSITLEQHLENVKKPFANPGMDLGSSTRNSSSSKVIGRSRSCRSLMGSTLLEDLEKEVCTPPSRSFMDYPGRPETCQRRVPALNYDAESEALSRAGSMLSEITTTRGGLKENSSAAGDTEFVAGIGEFVAELKEMAQGHNGELAEGTIRSVGLDPIMDILQSPSRWPLEFEKKQQEIIDLWHGCNVSLVHRTYFFLLFKGDPADAIYMEVELRRLSFLKNTYSNGSMGYDMVAGSLSTSLVSSAKKLQREREMLCRQMQKRLTIQERESLYTKWGVSLSSKRRRLQVARRLWTETRDLEHVRESASLVARLIGLLEPGKALREMFGLSFAPQQSTRRSHSSWRYGRSSLD

SEQ ID NO: 32439 - protein, 573 aa, Zea mays subsp. mays
  peptide (1)..(573): Ceres Seq. ID no. 13635667
  misc_feature (140)..(568): NCBI GI NO: 15208447 NR Description: kinesin heavy chain [Zea mays]
  misc_feature (1)..(71): NCBI GI NO: 15208447 NR Description: kinesin heavy chain [Zea mays]
  misc_feature (1)..(71): NCBI GI NO: 30693419 NR Description: expressed protein [Arabidopsis thaliana]
  misc_feature (352)..(572): NCBI GI NO: 30693419 NR Description: expressed protein [Arabidopsis thaliana]
  misc_feature (1)..(200): NCBI GI NO: 30698217 NR Description: kinesin heavy chain DNA binding protein-related
  misc_feature (370)..(572): NCBI GI NO: 30698217 NR Description: kinesin heavy chain DNA binding protein-related
  misc_feature (1)..(182): NCBI GI NO: 18416291 NR Description: hypothetical protein [Arabidopsis thaliana]
  misc_feature (161)..(570): NCBI GI NO: 18416291 NR Description: hypothetical protein [Arabidopsis thaliana]
  misc_feature (1)..(76): NCBI GI NO: 15234898 NR Description: kinesin like protein [Arabidopsis thaliana]
  misc_feature (283)..(572): NCBI GI NO: 15234898 NR Description: kinesin like protein [Arabidopsis thaliana]
MSDKALVKQLQKELARLESELRCPASYSGLEALVREKDNQIRKMDKEIKELKLHRDLAQSRLQDLLKVVGDNHGSKHPLASSARNFTFDVPQPCEDEQSTTSEAFSSGQILGFKAPDTQRDYRSQQSENDVQFATPLSYSISSPPFSGMPPTNGRNDNSHISDEDSEDLCKEVRCIETNETEENECLESSAVGSNSLQDSNLASSMHGNDNTNRSVNSGRNDASSITLEQHLENVKKPFANPGMDLGSSTRNSSSSKVIGRSRSCRSLMGSTLLEDLEKEVCTPPSRSFMDYPGRPETCQRRVPALNYDAESEALSRAGSMLSEITTTRGGLKENSSAAGDTEFVAGIGEFVAELKEMAQGHNGELAEGTIRSVGLDPIMDILQSPSRWPLEFEKKQQEIIDLWHGCNVSLVHRTYFFLLFKGDPADAIYMEVELRRLSFLKNTYSNGSMGYDMVAGSLSTSLVSSAKKLQREREMLCRQMQKRLTIQERESLYTKWGVSLSSKRRRLQVARRLWTETRDLEHVRESASLVARLIGLLEPGKALREMFGLSFAPQQSTRRSHSSWRYGRSSLD

SEQ ID NO: 32440 - DNA, 1006 bp, Zea mays subsp. mays
  misc_feature (1)..(1006): Ceres Seq. ID no. 12368995
aaaaaactgagtaaaaaaacacaagaacataaccgcagcaataacaatatacacaaagacgggagagagaagagagatggcggaagcgacgccgtacgaggagcagcggcggaggcaggtggaggcgaacaaacggaagctggaggagctgcagctccaccacctctctgctgccatcagagaggccgccgccgccgccaagccctcgctggtcaagaagcggaaggcgcgggtgcctctcgacgtcgccgacgccgtgatggagccagtacggcggtccggccggctcgccaacctcccggataagcccgtgtaccgcgagaaggttcccgattttgggatgaagattaggaggacgtacggatcggtgagaagagatctgaccaaccgggtgtacgcgaccgacgatgcgaggagctacgccatctctaaggcggaggatctggagcaagagctggactccagcttccccatcttcatcaagcccatgacccagtcccatgtcaccgggggcttctggctgggccttccgattcatttctgccggaagtatctgcccaagcgtgacgagatgatcaccctggtggatgaggatgatgacgagtccgacacgctgtacctcgcaatgaagcgggggctcagtgctggatggagagggtttgccgtccagcagaagctggtggatggagattgcctggtcttccagctgattgagcaaacaaagttcaaggtctacataactagagcaagttcctactacgaaagcgaggactgatgaaactagtagcttgtaatctggtgattggagctcagttatggaggtggctgcgttggacaagcttgcatctgggaatcgctggggtgtcttgaaactttttggtggcagaaagttagctgatgtatgaaacccagtatctcctaccaattgttgctgatttgtgtacttcttgggcttaccacttgcacggttcagaaacctgcactatgtaagggggttgttggtggc

SEQ ID NO: 32441 - protein, 232 aa, Zea mays subsp. mays
  peptide (1)..(232): Ceres Seq. ID no. 12368996
  misc_feature (134)..(225): Pfam Name: Pfam Description:  B3 DNA binding domain
  misc_feature (5)..(225): NCBI GI NO: 15217278 NR Description: Unknown protein [Oryza sativa]
  misc_feature (7)..(225): NCBI GI NO: 9294620 NR Description: gene_id:MVI11.9~unknown protein
  misc_feature (15)..(230): NCBI GI NO: 30694114 NR Description: expressed protein [Arabidopsis thaliana]
  misc_feature (4)..(225): NCBI GI NO: 15237157 NR Description: unknown protein; protein id: At5g58280.1
  misc_feature (116)..(212): NCBI GI NO: 34904376 NR Description: unnamed protein product
  misc_feature (15)..(149): NCBI GI NO: 10177273 NR Description: gene_id:MJB21.7~unknown protein
MAEATPYEEQRRRQVEANKRKLEELQLHHLSAAIREAAAAAKPSLVKKRKARVPLDVADAVMEPVRRSGRLANLPDKPVYREKVPDFGMKIRRTYGSVRRDLTNRVYATDDARSYAISKAEDLEQELDSSFPIFIKPMTQSHVTGGFWLGLPIHFCRKYLPKRDEMITLVDEDDDESDTLYLAMKRGLSAGWRGFAVQQKLVDGDCLVFQLIEQTKFKVYITRASSYYESED

SEQ ID NO: 32442 - protein, 171 aa, Zea mays subsp. mays
  peptide (1)..(171): Ceres Seq. ID no. 12368997
  misc_feature (73)..(164): Pfam Name: Pfam Description:  B3 DNA binding domain
  misc_feature (1)..(164): NCBI GI NO: 15217278 NR Description: Unknown protein [Oryza sativa]
  misc_feature (1)..(164): NCBI GI NO: 9294620 NR Description: gene_id:MVI11.9~unknown protein
  misc_feature (1)..(169): NCBI GI NO: 30694114 NR Description: expressed protein [Arabidopsis thaliana]
  misc_feature (1)..(164): NCBI GI NO: 15237157 NR Description: unknown protein; protein id: At5g58280.1
  misc_feature (55)..(151): NCBI GI NO: 34904376 NR Description: unnamed protein product
  misc_feature (1)..(88): NCBI GI NO: 10177273 NR Description: gene_id:MJB21.7~unknown protein
MEPVRRSGRLANLPDKPVYREKVPDFGMKIRRTYGSVRRDLTNRVYATDDARSYAISKAEDLEQELDSSFPIFIKPMTQSHVTGGFWLGLPIHFCRKYLPKRDEMITLVDEDDDESDTLYLAMKRGLSAGWRGFAVQQKLVDGDCLVFQLIEQTKFKVYITRASSYYESED

SEQ ID NO: 32443 - protein, 144 aa, Zea mays subsp. mays
  peptide (1)..(144): Ceres Seq. ID no. 12368998
  misc_feature (46)..(137): Pfam Name: Pfam Description:  B3 DNA binding domain
  misc_feature (1)..(137): NCBI GI NO: 15217278 NR Description: Unknown protein [Oryza sativa]
  misc_feature (1)..(137): NCBI GI NO: 9294620 NR Description: gene_id:MVI11.9~unknown protein
  misc_feature (1)..(142): NCBI GI NO: 30694114 NR Description: expressed protein [Arabidopsis thaliana]
  misc_feature (1)..(137): NCBI GI NO: 15237157 NR Description: unknown protein; protein id: At5g58280.1
  misc_feature (28)..(124): NCBI GI NO: 34904376 NR Description: unnamed protein product
  misc_feature (1)..(61): NCBI GI NO: 10177273 NR Description: gene_id:MJB21.7~unknown protein
MKIRRTYGSVRRDLTNRVYATDDARSYAISKAEDLEQELDSSFPIFIKPMTQSHVTGGFWLGLPIHFCRKYLPKRDEMITLVDEDDDESDTLYLAMKRGLSAGWRGFAVQQKLVDGDCLVFQLIEQTKFKVYITRASSYYESED

SEQ ID NO: 32444 - DNA, 754 bp, Zea mays subsp. mays
  misc_feature (1)..(754): Ceres Seq. ID no. 12413763
aaaaaaccaaaagcagaggggaaagtgccgtcagctctgactctcgggcacttggctgacgacccgttctctctttgcaactgcaactgcaacgcaccaagaaactgccggcgatcgatcggggcaaggagataaacatggtgcacgggaagctggaggtcctcctcgtctccgccaagggactcgaggacaccgatttcctcaataacatggaccccttcgtgatccttacctgccgcacccaagagcagaaaagcagcgtcgcaaatggagcaggaagcgagcccgaatggaacgagaccttcgtcttcaccgtctccgacgacaccccgcagctgcacctcaagatcatggacagcgacctcaccaacgacgatttcgtcggcgaacgaaccatccccctggaggccgtgtttcaggaaggcagccttcccccggcggttcacccggtcgtcaaggaggagaagtactgcggagaggtcaagctcgcgctcaccttcactccagcagcggaaactcgccgccctgatgacaacgaggaggggccgccttacagcagctggagttgatctatctgccatgggatgcatgcatcatatatatccaccaagagaagagaggataattaattaatctactcaagagaagaatcagtgttgctgttatgcgaccctctatctatctatatatatgtgcttaatttgtcatgaacgactgccaatataaaataaactattcagagttgtttgcacgt

SEQ ID NO: 32445 - protein, 143 aa, Zea mays subsp. mays
  peptide (1)..(143): Ceres Seq. ID no. 12413764
  misc_feature (6)..(86): Pfam Name: Pfam Description:  C2 domain
  misc_feature (1)..(143): NCBI GI NO: 7489756 NR Description: hypothetical protein - maize
  misc_feature (1)..(128): NCBI GI NO: 5565983 NR Description: unknown [Zea mays]
  misc_feature (1)..(143): NCBI GI NO: 38345558 NR Description: OSJNBa0032F06.15
  misc_feature (1)..(142): NCBI GI NO: 21553977 NR Description: putative elicitor-responsive gene
  misc_feature (1)..(142): NCBI GI NO: 15221718 NR Description: putative elicitor-responsive gene
  misc_feature (1)..(135): NCBI GI NO: 11358958 NR Description: elicitor-responsive gene 3 [imported] - rice
  misc_feature (1)..(134): NCBI GI NO: 3860331 NR Description: hypothetical protein [Cicer arietinum]
  misc_feature (4)..(128): NCBI GI NO: 7489474 NR Description: FIERG2 protein - rice
  misc_feature (4)..(128): NCBI GI NO: 21998841 NR Description: RPP17-1 [Oryza sativa (japonica cultivar-group)]
  misc_feature (4)..(128): NCBI GI NO: 7489473 NR Description: FIERG1 protein - rice
MVHGKLEVLLVSAKGLEDTDFLNNMDPFVILTCRTQEQKSSVANGAGSEPEWNETFVFTVSDDTPQLHLKIMDSDLTNDDFVGERTIPLEAVFQEGSLPPAVHPVVKEEKYCGEVKLALTFTPAAETRRPDDNEEGPPYSSWS

SEQ ID NO: 32446 - protein, 121 aa, Zea mays subsp. mays
  peptide (1)..(121): Ceres Seq. ID no. 12413765
MEQEASPNGTRPSSSPSPTTPRSCTSRSWTATSPTTISSANEPSPWRPCFRKAAFPRRFTRSSRRRSTAERSSSRSPSLQQRKLAALMTTRRGRLTAAGVDLSAMGCMHHIYPPREERIIN

SEQ ID NO: 32447 - protein, 119 aa, Zea mays subsp. mays
  peptide (1)..(119): Ceres Seq. ID no. 12413766
  misc_feature (1)..(62): Pfam Name: Pfam Description:  C2 domain
  misc_feature (1)..(119): NCBI GI NO: 7489756 NR Description: hypothetical protein - maize
  misc_feature (1)..(104): NCBI GI NO: 5565983 NR Description: unknown [Zea mays]
  misc_feature (1)..(119): NCBI GI NO: 38345558 NR Description: OSJNBa0032F06.15
  misc_feature (1)..(118): NCBI GI NO: 21553977 NR Description: putative elicitor-responsive gene
  misc_feature (1)..(118): NCBI GI NO: 15221718 NR Description: putative elicitor-responsive gene
  misc_feature (1)..(111): NCBI GI NO: 11358958 NR Description: elicitor-responsive gene 3 [imported] - rice
  misc_feature (1)..(110): NCBI GI NO: 3860331 NR Description: hypothetical protein [Cicer arietinum]
  misc_feature (1)..(104): NCBI GI NO: 7489474 NR Description: FIERG2 protein - rice
  misc_feature (1)..(104): NCBI GI NO: 21998841 NR Description: RPP17-1 [Oryza sativa (japonica cultivar-group)]
  misc_feature (1)..(104): NCBI GI NO: 7489473 NR Description: FIERG1 protein - rice
MDPFVILTCRTQEQKSSVANGAGSEPEWNETFVFTVSDDTPQLHLKIMDSDLTNDDFVGERTIPLEAVFQEGSLPPAVHPVVKEEKYCGEVKLALTFTPAAETRRPDDNEEGPPYSSWS

SEQ ID NO: 32448 - DNA, 1357 bp, Zea mays subsp. mays
  misc_feature (1)..(1357): Ceres Seq. ID no. 12413779
agatcagatccgacaactcgccctcccgtctttccctctctctcctcccaccacacccggtcgtcgttgtcgcggcgtgagcgagcgagaggggaaaacccaaaaccctagcaccccccgccccgtcgccgacggccgccggagtagagagatggcggtggacgaggtgaactcggtctacgtcggcggccttccctacgaggccaacgaggagatgcttcgcgacgccttcgggtactacggcaccatcgtctccgtcaaggtgattaatgatcatgctgtcaaaggcaagtgttatggttttgttactttcactcaccccagagctactgagcaagcaattgcgggcatggacggcaagaaattaggcaaccgtattgttcgagtaaatgaagtgcgtacaagaggcccccgcgattttggccgagatggtttcagacgagatccaagaaggtatggtagagatccatactgggacagaagggacagggaacggagctatgatcgtgaaagagatccctaccatgacagggatagtgatagatcccgtgagcatgatagagaaagagattatgaacatggtggatttaatagagaaattgactatcccatggaccgagatcgtgaaggagatgagagacgtcctagagaacatgatcgtacagcagaaatgcataatgtggattcagataatgacaaagataaggaacatgtatcaagaaaaaggttcagccgcccaaaaggtcgtgatagcagagatttatcaagttccagtgatggtcttcaaaatgatggaaaacatcagttggataaaactattcagatgcgcgaggaccttgaaaatgagattaaccagattaaggataaaatatctgggaaagaacagcacattgcagatttgcagaagaaagctcagaaactagaggatgaactggttgccgcacggaaagtctcttcagaacgacagttggcggttacagacctgtacaaacatttcctccaacttcaggactacaatgatagggtcaaaacagctgaacagaggctgcagtctcttgttgatgctgccttggtcgagctcgacatggccgaagatgctactaccagagatggctcgatgtacgagaacggcgtgctttgaacacccaactgccatgggtttgtgtggttgctgatttgttagatttgtagtttgcgtctgccatgtaatagaaccgcactgtaactagaaacaggaaaaatgttttgtgtaagggtcggagaatctgctgtcgtggtccttgagcccggatttctctttcgtagttggattcattaaccggcctgagtattcctgttaccgtatgttttgagcgtg

SEQ ID NO: 32449 - protein, 379 aa, Zea mays subsp. mays
  peptide (1)..(379): Ceres Seq. ID no. 12413780
  misc_feature (59)..(129): Pfam Name: a.k.a. RRM, RBD, or RNP domain Pfam Description: RNA recognition motif.
  misc_feature (51)..(359): NCBI GI NO: 21553602 NR Description: glycine-rich RNA-binding protein-like
  misc_feature (51)..(359): NCBI GI NO: 18420085 NR Description: glycine-rich RNA-binding protein - like
  misc_feature (54)..(198): NCBI GI NO: 28856196 NR Description: Similar to cold inducible RNA binding protein
  misc_feature (53)..(257): NCBI GI NO: 28279759 NR Description: Similar to splicing factor, arginine/serine-rich 2
  misc_feature (44)..(291): NCBI GI NO: 23483169 NR Description: u1 small nuclear ribonucleoprotein 70 kDa
  misc_feature (150)..(310): NCBI GI NO: 23482058 NR Description: hypothetical protein [Plasmodium yoelii yoelii]
  misc_feature (130)..(371): NCBI GI NO: 23508822 NR Description: eukaryotic translation initiation factor 3 subunit10
  misc_feature (59)..(221): NCBI GI NO: 25144919 NR Description: pre-mRNA splicing SR Protein RSP-6 (20
  misc_feature (45)..(153): NCBI GI NO: 20257707 NR Description: glycine-rich RNA binding protein [Zea mays]
  misc_feature (60)..(167): NCBI GI NO: 6911146 NR Description: putative glycine-rich RNA-binding protein 2
DQIRQLALPSFPLSPPTTPGRRCRGVSEREGKTQNPSTPRPVADGRRSREMAVDEVNSVYVGGLPYEANEEMLRDAFGYYGTIVSVKVINDHAVKGKCYGFVTFTHPRATEQAIAGMDGKKLGNRIVRVNEVRTRGPRDFGRDGFRRDPRRYGRDPYWDRRDRERSYDRERDPYHDRDSDRSREHDRERDYEHGGFNREIDYPMDRDREGDERRPREHDRTAEMHNVDSDNDKDKEHVSRKRFSRPKGRDSRDLSSSSDGLQNDGKHQLDKTIQMREDLENEINQIKDKISGKEQHIADLQKKAQKLEDELVAARKVSSERQLAVTDLYKHFLQLQDYNDRVKTAEQRLQSLVDAALVELDMAEDATTRDGSMYENGVL

SEQ ID NO: 32450 - protein, 329 aa, Zea mays subsp. mays
  peptide (1)..(329): Ceres Seq. ID no. 12413781
  misc_feature (9)..(79): Pfam Name: a.k.a. RRM, RBD, or RNP domain Pfam Description: RNA recognition motif.
  misc_feature (1)..(309): NCBI GI NO: 21553602 NR Description: glycine-rich RNA-binding protein-like
  misc_feature (1)..(309): NCBI GI NO: 18420085 NR Description: glycine-rich RNA-binding protein - like
  misc_feature (4)..(148): NCBI GI NO: 28856196 NR Description: Similar to cold inducible RNA binding protein
  misc_feature (3)..(207): NCBI GI NO: 28279759 NR Description: Similar to splicing factor, arginine/serine-rich 2
  misc_feature (1)..(241): NCBI GI NO: 23483169 NR Description: u1 small nuclear ribonucleoprotein 70 kDa
  misc_feature (100)..(260): NCBI GI NO: 23482058 NR Description: hypothetical protein [Plasmodium yoelii yoelii]
  misc_feature (80)..(321): NCBI GI NO: 23508822 NR Description: eukaryotic translation initiation factor 3 subunit10
  misc_feature (9)..(171): NCBI GI NO: 25144919 NR Description: pre-mRNA splicing SR Protein RSP-6 (20
  misc_feature (1)..(103): NCBI GI NO: 20257707 NR Description: glycine-rich RNA binding protein [Zea mays]
  misc_feature (10)..(117): NCBI GI NO: 6911146 NR Description: putative glycine-rich RNA-binding protein 2
MAVDEVNSVYVGGLPYEANEEMLRDAFGYYGTIVSVKVINDHAVKGKCYGFVTFTHPRATEQAIAGMDGKKLGNRIVRVNEVRTRGPRDFGRDGFRRDPRRYGRDPYWDRRDRERSYDRERDPYHDRDSDRSREHDRERDYEHGGFNREIDYPMDRDREGDERRPREHDRTAEMHNVDSDNDKDKEHVSRKRFSRPKGRDSRDLSSSSDGLQNDGKHQLDKTIQMREDLENEINQIKDKISGKEQHIADLQKKAQKLEDELVAARKVSSERQLAVTDLYKHFLQLQDYNDRVKTAEQRLQSLVDAALVELDMAEDATTRDGSMYENGVL

SEQ ID NO: 32451 - protein, 308 aa, Zea mays subsp. mays
  peptide (1)..(308): Ceres Seq. ID no. 12413782
  misc_feature (1)..(58): Pfam Name: a.k.a. RRM, RBD, or RNP domain Pfam Description: RNA recognition motif.
  misc_feature (1)..(288): NCBI GI NO: 21553602 NR Description: glycine-rich RNA-binding protein-like
  misc_feature (1)..(288): NCBI GI NO: 18420085 NR Description: glycine-rich RNA-binding protein - like
  misc_feature (1)..(127): NCBI GI NO: 28856196 NR Description: Similar to cold inducible RNA binding protein
  misc_feature (1)..(186): NCBI GI NO: 28279759 NR Description: Similar to splicing factor, arginine/serine-rich 2
  misc_feature (1)..(220): NCBI GI NO: 23483169 NR Description: u1 small nuclear ribonucleoprotein 70 kDa
  misc_feature (79)..(239): NCBI GI NO: 23482058 NR Description: hypothetical protein [Plasmodium yoelii yoelii]
  misc_feature (59)..(300): NCBI GI NO: 23508822 NR Description: eukaryotic translation initiation factor 3 subunit10
  misc_feature (1)..(150): NCBI GI NO: 25144919 NR Description: pre-mRNA splicing SR Protein RSP-6 (20
  misc_feature (1)..(82): NCBI GI NO: 20257707 NR Description: glycine-rich RNA binding protein [Zea mays]
  misc_feature (1)..(96): NCBI GI NO: 6911146 NR Description: putative glycine-rich RNA-binding protein 2
MLRDAFGYYGTIVSVKVINDHAVKGKCYGFVTFTHPRATEQAIAGMDGKKLGNRIVRVNEVRTRGPRDFGRDGFRRDPRRYGRDPYWDRRDRERSYDRERDPYHDRDSDRSREHDRERDYEHGGFNREIDYPMDRDREGDERRPREHDRTAEMHNVDSDNDKDKEHVSRKRFSRPKGRDSRDLSSSSDGLQNDGKHQLDKTIQMREDLENEINQIKDKISGKEQHIADLQKKAQKLEDELVAARKVSSERQLAVTDLYKHFLQLQDYNDRVKTAEQRLQSLVDAALVELDMAEDATTRDGSMYENGVL

SEQ ID NO: 32452 - DNA, 1747 bp, Zea mays subsp. mays
  misc_feature (1)..(1747): Ceres Seq. ID no. 12566487
gcacgagaccattacctagaacatcctaatcgaaaactactgtagccgctgctgctcctctcctcccatctcaccacacaccgcagccccagcaagatcgcgcggaggccatggcgaagcccaagccttcctccgccggcgccaagccgaccgcggctgcgccaccggttacagtgcactcggcgctggtcacctacacctccatgctcgcgctcctctccctctgcccgcccttcgtcatcctcctgtggtacacgatggtgcacgcggacggatcggtggtgcggacttacgagcacctcagggatcacggcgtgctcgaggggctcaaggccatctggcccatgcccaccctcgtcgcgtggaagatcatcttcggcttcgggctcttcgaggccgtcctacagctgctgctccctgggaagcgcttcgaagggcccatctcgcctgccgggaacgtgccggtctacaaggcaaatggcttacaagcatatgcagtgaccttgataacttaccttggtttgtggtggttcggtatatttaaccctgcaatagtgtatgatcacttgggggagatatactctgctcttgtttttggaagctttgtgttctgtatttttctctacataaagggccatgtatttccatcttcatctgactctggatcctctgggaatgtgataattgacttctactggggtatggagctgtaccctcggattggcaagtactttgatatcaaagtattcaccaactgtcgtttcggtatgatgtcctgggctgttcttgccgtaacctattgcataaagcagtatgaaatgaatggcagagttgctgattctatgcttgtgaatactgcacttatgttgatctatatcactaagttcttttggtgggaatctggatattggtgtactatggacattgctcatgatagagctggtttctatatctgctggggatgcttggtatgggttccatccatatatacttcccctggaatgtaccttgtaaaccaccctttgaatttgggcccccagctagcactctcaattcttctagctggaatgttgtgcatatacataaactatgattgtgaccgtcagcgccaagaatttcgacggacgaatgggaaatgctcggtctggggcaaggctccatctaagattgttgcctcttatcagactacaaagggagaaactaaaaccagtcttctcttgacttctggatggtggggcttgtcacgtcacttccactatgtcccagagatactatctgcatttttctggactgttccagctcttttcaatcacttcctaccatacttctacgtgatctttctgactatattattgtttgaccgagcaaagagggatgatgaccggtgctcatcaaagtacgggaagtactggaagatttactgcaacaaagtaccatacagagtcattcctggcatttactgagcatctcgagttctggacgactcttgatattaagctcaacagatgccacgatatccagtcttcataccgatttgctactgattgtgtaatgtcgctggtaggcttgggctgtacgcagtattaggtgtaggcaacttggcttttggcatttaccttgtatgtgtcgtgtatctagggctggggcttgctccttcagttgttagacagtagggggtaatctcaggggtgcaatgtactccctccgtcctaaaataaaagcatatctagtatttaaattttgtttc

SEQ ID NO: 32453 - protein, 450 aa, Zea mays subsp. mays
  peptide (1)..(450): Ceres Seq. ID no. 12566488
  misc_feature (21)..(450): Pfam Name: Pfam Description:  Ergosterol biosynthesis ERG4/ERG24 family
  misc_feature (16)..(450): NCBI GI NO: 39726086 NR Description: sterol delta-7 reductase [Tropaeolum majus]
  misc_feature (21)..(450): NCBI GI NO: 15222967 NR Description: sterol delta7 reductase; protein id: At1g50430
  misc_feature (21)..(450): NCBI GI NO: 1245182 NR Description: sterol delta-7 reductase
  misc_feature (19)..(447): NCBI GI NO: 29654463 NR Description: ergosterol biosynthesis ERG4/ERG24 family protein
  misc_feature (31)..(450): NCBI GI NO: 27924199 NR Description: Similar to 7-dehydrocholesterol reductase
  misc_feature (1)..(450): NCBI GI NO: 38969866 NR Description: 7-dehydrocholesterol reductase
  misc_feature (108)..(450): NCBI GI NO: 6681179 NR Description: 7-dehydrocholesterol reductase [Mus musculus]
  misc_feature (108)..(450): NCBI GI NO: 11693158 NR Description: 7-dehydrocholesterol reductase [Rattus norvegicus]
  misc_feature (108)..(450): NCBI GI NO: 3171089 NR Description: 7-dehydrocholesterol reductase [Homo sapiens]
  misc_feature (108)..(450): NCBI GI NO: 4503321 NR Description: 7-dehydrocholesterol reductase
MAKPKPSSAGAKPTAAAPPVTVHSALVTYTSMLALLSLCPPFVILLWYTMVHADGSVVRTYEHLRDHGVLEGLKAIWPMPTLVAWKIIFGFGLFEAVLQLLLPGKRFEGPISPAGNVPVYKANGLQAYAVTLITYLGLWWFGIFNPAIVYDHLGEIYSALVFGSFVFCIFLYIKGHVFPSSSDSGSSGNVIIDFYWGMELYPRIGKYFDIKVFTNCRFGMMSWAVLAVTYCIKQYEMNGRVADSMLVNTALMLIYITKFFWWESGYWCTMDIAHDRAGFYICWGCLVWVPSIYTSPGMYLVNHPLNLGPQLALSILLAGMLCIYINYDCDRQRQEFRRTNGKCSVWGKAPSKIVASYQTTKGETKTSLLLTSGWWGLSRHFHYVPEILSAFFWTVPALFNHFLPYFYVIFLTILLFDRAKRDDDRCSSKYGKYWKIYCNKVPYRVIPGIY

SEQ ID NO: 32454 - protein, 419 aa, Zea mays subsp. mays
  peptide (1)..(419): Ceres Seq. ID no. 12566489
  misc_feature (1)..(419): Pfam Name: Pfam Description:  Ergosterol biosynthesis ERG4/ERG24 family
  misc_feature (1)..(419): NCBI GI NO: 39726086 NR Description: sterol delta-7 reductase [Tropaeolum majus]
  misc_feature (1)..(419): NCBI GI NO: 15222967 NR Description: sterol delta7 reductase; protein id: At1g50430
  misc_feature (1)..(419): NCBI GI NO: 1245182 NR Description: sterol delta-7 reductase
  misc_feature (1)..(416): NCBI GI NO: 29654463 NR Description: ergosterol biosynthesis ERG4/ERG24 family protein
  misc_feature (1)..(419): NCBI GI NO: 27924199 NR Description: Similar to 7-dehydrocholesterol reductase
  misc_feature (1)..(419): NCBI GI NO: 38969866 NR Description: 7-dehydrocholesterol reductase
  misc_feature (77)..(419): NCBI GI NO: 6681179 NR Description: 7-dehydrocholesterol reductase [Mus musculus]
  misc_feature (77)..(419): NCBI GI NO: 11693158 NR Description: 7-dehydrocholesterol reductase [Rattus norvegicus]
  misc_feature (77)..(419): NCBI GI NO: 3171089 NR Description: 7-dehydrocholesterol reductase [Homo sapiens]
  misc_feature (77)..(419): NCBI GI NO: 20138066 NR Description: 7-dehydrocholesterol reductase
MLALLSLCPPFVILLWYTMVHADGSVVRTYEHLRDHGVLEGLKAIWPMPTLVAWKIIFGFGLFEAVLQLLLPGKRFEGPISPAGNVPVYKANGLQAYAVTLITYLGLWWFGIFNPAIVYDHLGEIYSALVFGSFVFCIFLYIKGHVFPSSSDSGSSGNVIIDFYWGMELYPRIGKYFDIKVFTNCRFGMMSWAVLAVTYCIKQYEMNGRVADSMLVNTALMLIYITKFFWWESGYWCTMDIAHDRAGFYICWGCLVWVPSIYTSPGMYLVNHPLNLGPQLALSILLAGMLCIYINYDCDRQRQEFRRTNGKCSVWGKAPSKIVASYQTTKGETKTSLLLTSGWWGLSRHFHYVPEILSAFFWTVPALFNHFLPYFYVIFLTILLFDRAKRDDDRCSSKYGKYWKIYCNKVPYRVIPGIY

SEQ ID NO: 32455 - protein, 401 aa, Zea mays subsp. mays
  peptide (1)..(401): Ceres Seq. ID no. 12566490
  misc_feature (1)..(401): Pfam Name: Pfam Description:  Ergosterol biosynthesis ERG4/ERG24 family
  misc_feature (1)..(401): NCBI GI NO: 39726086 NR Description: sterol delta-7 reductase [Tropaeolum majus]
  misc_feature (1)..(401): NCBI GI NO: 15222967 NR Description: sterol delta7 reductase; protein id: At1g50430
  misc_feature (1)..(401): NCBI GI NO: 1245182 NR Description: sterol delta-7 reductase
  misc_feature (1)..(398): NCBI GI NO: 29654463 NR Description: ergosterol biosynthesis ERG4/ERG24 family protein
  misc_feature (1)..(401): NCBI GI NO: 27924199 NR Description: Similar to 7-dehydrocholesterol reductase
  misc_feature (1)..(401): NCBI GI NO: 38969866 NR Description: 7-dehydrocholesterol reductase
  misc_feature (59)..(401): NCBI GI NO: 6681179 NR Description: 7-dehydrocholesterol reductase [Mus musculus]
  misc_feature (59)..(401): NCBI GI NO: 11693158 NR Description: 7-dehydrocholesterol reductase [Rattus norvegicus]
  misc_feature (59)..(401): NCBI GI NO: 3171089 NR Description: 7-dehydrocholesterol reductase [Homo sapiens]
  misc_feature (59)..(401): NCBI GI NO: 4503321 NR Description: 7-dehydrocholesterol reductase
MVHADGSVVRTYEHLRDHGVLEGLKAIWPMPTLVAWKIIFGFGLFEAVLQLLLPGKRFEGPISPAGNVPVYKANGLQAYAVTLITYLGLWWFGIFNPAIVYDHLGEIYSALVFGSFVFCIFLYIKGHVFPSSSDSGSSGNVIIDFYWGMELYPRIGKYFDIKVFTNCRFGMMSWAVLAVTYCIKQYEMNGRVADSMLVNTALMLIYITKFFWWESGYWCTMDIAHDRAGFYICWGCLVWVPSIYTSPGMYLVNHPLNLGPQLALSILLAGMLCIYINYDCDRQRQEFRRTNGKCSVWGKAPSKIVASYQTTKGETKTSLLLTSGWWGLSRHFHYVPEILSAFFWTVPALFNHFLPYFYVIFLTILLFDRAKRDDDRCSSKYGKYWKIYCNKVPYRVIPGIY

SEQ ID NO: 32456 - DNA, 1272 bp, Zea mays subsp. mays
  misc_feature (1)..(1272): Ceres Seq. ID no. 13500491
atccatcagtgtggactgtcgaaccgggggatgggttgggacgttgggtcctggtccacgtgaccacgtctagcagtagcaggctctcgaaactcacgttcccgtgtcgctcaactggcacaggactggaccccgtcccgtacggcatcgcaccccgcagccgcaggccgcatcttcctcgcgtgctctgccctctgtgcctgcccattcgttgatcccatcggcttccccttcctcttccccgatccccttcctcccccgatcccatccaattccacttccacaccccgggcctcgccgccgacgccgacgccgacgccgccggccatgtccaagtacggcaccattcccacctcctcctccgcgggcggagggcccgtgcccctcggcggcgcctccccgctcgatttcatctcccgcgccaaggctcggggcgcctcggcgctggcgacgcgccggccctggcgcgagctcgtggacgtccacgccgtcggcctgcccccgagcctcggcgacgcgtacctccgcgtgcgcgccaacctcgcccacttcgccatgaactacgccatcgtcgtcctcgtcgtcgtcttcctctccctcctctggcaccccgtctccctcatcgtcttcctcgtctgcatgctcgcctggctcgtcctctacttcctccgcgacgagcccctcgtcctcttcggccgcgtcgtcgccgacggctacgtccttgccgtgctcgccgtcgtcacgctcgtcctgctgctcctcaccgacgccactgccaacatcctctcctcgctgctcatcggcctcgtcctcgtcctcgtccacgccgcgctgcacaaggcggaggacaacgccgccgacgaggccgaccgctggtacgcgccggtgtcacagcagccgtcgcactgaggatctgaatgtggccattcggcgccttggctgtgatcctattctgtactgtttccgagttcctccagctgcgcaagctgggccatccccatctcatctgcgatgaaaaccctgtccttgttgattgtgattcacttgctgccggttccatgggaagttttggatccagcgatgacgcagggctgttaaacttgttctccacgcccagcccatttctgtgatacgtttaaagcgtctcgttcacgtgtatcaaatccggactgaagtctagtgtacattttgagttggagaaatgtgatgccagggacctgcattcagattttatcgacgccatgcatgtaggcaagcgatgctgatatttct

SEQ ID NO: 32457 - protein, 193 aa, Zea mays subsp. mays; identical to SEQ ID NO: 31275
  peptide (1)..(193): Ceres Seq. ID no. 13500492
  misc_feature (1)..(182): NCBI GI NO: 34903576 NR Description: P0419B01.1
  misc_feature (1)..(179): NCBI GI NO: 21617895 NR Description: unknown [Arabidopsis thaliana]
  misc_feature (1)..(179): NCBI GI NO: 18400140 NR Description: expressed protein [Arabidopsis thaliana]
  misc_feature (1)..(179): NCBI GI NO: 18405248 NR Description: expressed protein [Arabidopsis thaliana]
  misc_feature (23)..(179): NCBI GI NO: 15231332 NR Description: expressed protein [Arabidopsis thaliana]
  misc_feature (23)..(174): NCBI GI NO: 15220814 NR Description: expressed protein [Arabidopsis thaliana]
  misc_feature (1)..(174): NCBI GI NO: 40539036 NR Description: putative prenylated rab acceptor protein
  misc_feature (1)..(179): NCBI GI NO: 21594668 NR Description: unknown [Arabidopsis thaliana]
  misc_feature (1)..(181): NCBI GI NO: 15239101 NR Description: expressed protein [Arabidopsis thaliana]
  misc_feature (1)..(181): NCBI GI NO: 18072825 NR Description: prenylated Rab receptor 2 [Arabidopsis thaliana]

SEQ ID NO: 32458 - protein, 117 aa, Zea mays subsp. mays
  peptide (1)..(117): Ceres Seq. ID no. 13500493
  misc_feature (1)..(106): NCBI GI NO: 34903576 NR Description: P0419B01.1
  misc_feature (1)..(103): NCBI GI NO: 21617895 NR Description: unknown [Arabidopsis thaliana]
  misc_feature (1)..(103): NCBI GI NO: 18400140 NR Description: expressed protein [Arabidopsis thaliana]
  misc_feature (1)..(103): NCBI GI NO: 18405248 NR Description: expressed protein [Arabidopsis thaliana]
  misc_feature (1)..(103): NCBI GI NO: 15231332 NR Description: expressed protein [Arabidopsis thaliana]
  misc_feature (1)..(98): NCBI GI NO: 15220814 NR Description: expressed protein [Arabidopsis thaliana]
  misc_feature (1)..(98): NCBI GI NO: 40539036 NR Description: putative prenylated rab acceptor protein
  misc_feature (1)..(103): NCBI GI NO: 21594668 NR Description: unknown [Arabidopsis thaliana]
  misc_feature (1)..(105): NCBI GI NO: 15239101 NR Description: expressed protein [Arabidopsis thaliana]
  misc_feature (1)..(105): NCBI GI NO: 18072825 NR Description: prenylated Rab receptor 2 [Arabidopsis thaliana]
MNYAIVVLVVVFLSLLWHPVSLIVFLVCMLAWLVLYFLRDEPLVLFGRVVADGYVLAVLAVVTLVLLLLTDATANILSSLLIGLVLVLVHAALHKAEDNAADEADRWYAPVSQQPSH

SEQ ID NO: 32459 - DNA, 1792 bp, Zea mays subsp. mays
  misc_feature (1)..(1792): Ceres Seq. ID no. 12412110
aaatcctcctcctcctcctgccgcagcccgcagggaggtggagttgtcaacgtgccgaggactggagcgcccgcgtccggcgtctctataaacgagaccgcccggccatttggtctgctcctctctgttctcccctgcctgcctgcttccagctgcatctctctccgccgagaccgagaggaggaggaggcaagggaggcatccctgacgtacggacggcggccatggggacgcaggcgccggagaactaccccgccgagaaggtacaggacgcgaggagcgcgcgggagaaggccatcgacgactggctcccgatcacctcgtcgcggaacgccaagtggtggtactccgccttccacaatgtcaccgccatggtcggcgccggcgtgctcagcctgccctacgccatgtccgagcttggctggggccctggcatcgcggtgctggtggtgtcgtgggtgatcacgctgtacacgctgtggcagatggtggagatgcacgagatggtccccgggaagcggttcgaccgttaccacgagctggggcagcacgcgttcggggaccggctgggcctgtggatcgtggtgccgcagcagctggtcgtcgaggtgggcgtgaacatcgtgtacatggtgaccggcggcaagtccctgaagaagttccacgacgtggctggtgtgcggcgacacgggggtgtgcgaggggaaggacaacatcaagaccacctacttcatcatgatcttcgcgtccgtccacttcgtcctctcgcagctccccaacttcaactccatctccggcgtctccctcgccgccgccgtcatgtcgctcagctactccaccatcgcgtggggcgcgtcggtgcacaaggggaggatgtcgggcgtcgactaccacctgcgcgcgaccaccacgccggggaaggtgttcggcttcttcggcgcgctgggggacgtggcgttcgcctacgccggccacaacgtggtgctggagatccaggccaccatcccgtccacccccgacaagccgtccaagaagcccatgtggaagggcgtggtggtcgcctacgtcgtggtggcgctctgctacttccccgtcgcgctcatcggctactgggcgttcggaaacacggtcgaggacaacatcctcatcacgctcagcaagcccaagtggctcatcgcgctcgccaacatgatggtcgtcgtccatgtcatcggcagctaccagatctatgccatgccggtgtttgacatgatagagaccgtgctggtgaagaagctgcgcttccctcccggcctcacgctgcgtctgatcgctcggaccctctatgttgcgttcacgatgttcatagccatcaccttccccttcttcggtgggctgctcggtttcttcggcgggttcgccttcgcgccgaccacctatttccttccctgcgtcatgtggctcgcaatctacaagcccaagaggttcagcctctcctggttgaccaactggatgtgcatcattcttggggtgctcctgatgattctgtcgcccatcggagggctccggcaaataataatggacgcgaaaacctaccagttctactcgtgagctaccaccagccatgacttgtaagcacgattggagaaatctgtcaaagcctcaaccacgagtttttgtttttgttttttgtcatgccaaacacatacatatacgtactgtttttttaatattcaaaggtgttcttcgtggcttgcgtgtgtacagtattatgtgtatgagggagacataagtttaatgatgctggctgtct

SEQ ID NO: 32460 - protein, 414 aa, Zea mays subsp. mays
  peptide (1)..(414): Ceres Seq. ID no. 12412111
  misc_feature (90)..(223): NCBI GI NO: 18395471 NR Description: putative lysine/histidine-specific permease
  misc_feature (81)..(223): NCBI GI NO: 15220504 NR Description: putative amino acid permease; protein id:At1g67640
  misc_feature (95)..(224): NCBI GI NO: 12597815 NR Description: lysine and histidine specific transporter
  misc_feature (95)..(224): NCBI GI NO: 22330117 NR Description: lysine and histidine specific transporter,putative
  misc_feature (75)..(223): NCBI GI NO: 2576361 NR Description: lysine and histidine specific transporter
  misc_feature (84)..(219): NCBI GI NO: 7489096 NR Description: amino acid permease 1 - wood tobacco
  misc_feature (89)..(224): NCBI GI NO: 15219896 NR Description: lysine and histidine specific transporter,putative
  misc_feature (86)..(224): NCBI GI NO: 6091720 NR Description: putative amino acid permease
  misc_feature (99)..(224): NCBI GI NO: 15232176 NR Description: putative amino acid permease; protein id:At3g01760
  misc_feature (100)..(223): NCBI GI NO: 15220283 NR Description: lysine and histidine specific transporter,putative
ILLLLLPQPAGRWSCQRAEDWSARVRRLYKRDRPAIWSAPLCSPLPACFQLHLSPPRPRGGGGKGGIPDVRTAAMGTQAPENYPAEKVQDARSAREKAIDDWLPITSSRNAKWWYSAFHNVTAMVGAGVLSLPYAMSELGWGPGIAVLVVSWVITLYTLWQMVEMHEMVPGKRFDRYHELGQHAFGDRLGLWIVVPQQLVVEVGVNIVYMVTGGKSLKKFHDVAGVRRHGGVRGEGQHQDHLLHHDLRVRPLRPLAAPQLQLHLRRLPRRRRHVAQLLHHRVGRVGAQGEDVGRRLPPARDHHAGEGVRLLRRAGGRGVRLRRPQRGAGDPGHHPVHPRQAVQEAHVEGRGGRLRRGGALLLPRRAHRLLGVRKHGRGQHPHHAQQAQVAHRARQHDGRRPCHRQLPDLCHAGV

SEQ ID NO: 32461 - protein, 340 aa, Zea mays subsp. mays
  peptide (1)..(340): Ceres Seq. ID no. 12412112
  misc_feature (16)..(149): NCBI GI NO: 18395471 NR Description: putative lysine/histidine-specific permease
  misc_feature (7)..(149): NCBI GI NO: 15220504 NR Description: putative amino acid permease; protein id:At1g67640
  misc_feature (21)..(150): NCBI GI NO: 12597815 NR Description: lysine and histidine specific transporter
  misc_feature (21)..(150): NCBI GI NO: 22330117 NR Description: lysine and histidine specific transporter,putative
  misc_feature (1)..(149): NCBI GI NO: 2576361 NR Description: lysine and histidine specific transporter
  misc_feature (10)..(145): NCBI GI NO: 7489096 NR Description: amino acid permease 1 - wood tobacco
  misc_feature (15)..(150): NCBI GI NO: 15219896 NR Description: lysine and histidine specific transporter,putative
  misc_feature (12)..(150): NCBI GI NO: 6091720 NR Description: putative amino acid permease
  misc_feature (25)..(150): NCBI GI NO: 15232176 NR Description: putative amino acid permease; protein id:At3g01760
  misc_feature (26)..(149): NCBI GI NO: 15220283 NR Description: lysine and histidine specific transporter,putative
MGTQAPENYPAEKVQDARSAREKAIDDWLPITSSRNAKWWYSAFHNVTAMVGAGVLSLPYAMSELGWGPGIAVLVVSWVITLYTLWQMVEMHEMVPGKRFDRYHELGQHAFGDRLGLWIVVPQQLVVEVGVNIVYMVTGGKSLKKFHDVAGVRRHGGVRGEGQHQDHLLHHDLRVRPLRPLAAPQLQLHLRRLPRRRRHVAQLLHHRVGRVGAQGEDVGRRLPPARDHHAGEGVRLLRRAGGRGVRLRRPQRGAGDPGHHPVHPRQAVQEAHVEGRGGRLRRGGALLLPRRAHRLLGVRKHGRGQHPHHAQQAQVAHRARQHDGRRPCHRQLPDLCHAGV

SEQ ID NO: 32462 - protein, 291 aa, Zea mays subsp. mays
  peptide (1)..(291): Ceres Seq. ID no. 12412113
  misc_feature (1)..(100): NCBI GI NO: 18395471 NR Description: putative lysine/histidine-specific permease
  misc_feature (1)..(100): NCBI GI NO: 15220504 NR Description: putative amino acid permease; protein id:At1g67640
  misc_feature (1)..(101): NCBI GI NO: 12597815 NR Description: lysine and histidine specific transporter
  misc_feature (1)..(101): NCBI GI NO: 22330117 NR Description: lysine and histidine specific transporter,putative
  misc_feature (1)..(100): NCBI GI NO: 2576361 NR Description: lysine and histidine specific transporter
  misc_feature (1)..(96): NCBI GI NO: 7489096 NR Description: amino acid permease 1 - wood tobacco
  misc_feature (1)..(101): NCBI GI NO: 15219896 NR Description: lysine and histidine specific transporter,putative
  misc_feature (1)..(101): NCBI GI NO: 6091720 NR Description: putative amino acid permease
  misc_feature (1)..(101): NCBI GI NO: 15232176 NR Description: putative amino acid permease; protein id:At3g01760
  misc_feature (1)..(100): NCBI GI NO: 15220283 NR Description: lysine and histidine specific transporter,putative
MVGAGVLSLPYAMSELGWGPGIAVLVVSWVITLYTLWQMVEMHEMVPGKRFDRYHELGQHAFGDRLGLWIVVPQQLVVEVGVNIVYMVTGGKSLKKFHDVAGVRRHGGVRGEGQHQDHLLHHDLRVRPLRPLAAPQLQLHLRRLPRRRRHVAQLLHHRVGRVGAQGEDVGRRLPPARDHHAGEGVRLLRRAGGRGVRLRRPQRGAGDPGHHPVHPRQAVQEAHVEGRGGRLRRGGALLLPRRAHRLLGVRKHGRGQHPHHAQQAQVAHRARQHDGRRPCHRQLPDLCHAGV

SEQ ID NO: 32463 - DNA, 1836 bp, Zea mays subsp. mays
  misc_feature (1)..(1836): Ceres Seq. ID no. 12412106
aacacaactgcacaaaagcacaagcctccctcccggctccccacctcgcagcgtccgccggcacaccacctctgactcctctccctccgcggcctccgtttcttccctcattctccgcaaaccctaatcccaatggctgcctccgccaggactaccagctcgttgccctacctagtcgccgtctcctcccccgcggctcaccgccacggggccagccacccgatccgcgcctcggtgggggaggcgacaatggacgtggtgtcggaggcggagctgcgggagaaagggttcttggggatgcggaaaacgaaactggtgtgcacggtggggcccgcctgcgtcgaggcgctgccggcgctggcgcgcggcgggatgggcgtggcgcggatcaacctctgccacggtggccgggagtggcatcgtgccgccatgcgctctgtgcggaggctcaacgaggagggaggattctgcgtgacgcttatggtcgacaccgagggttcccagctcctcgtcgcggaccacggaggcgccacctcagtcaaggccgaggatgggtcagagtggatatttacaaacaaaaaagctgatgaagcccatcagttcacaatgcatgtgaattttgataagttttctgaaggcattttggttggtgatgagcttgtaatagatggtggaatggcaacatttgaagttactgagaaaataggaaatgatttgcgctgtaagtgcacggacccaggattgggctgacatcgaatttgggatagctgaaggagttgattgcattgctctatcatttgtaaatgatgctaatgatataaagcagttgaaagcttacctctctagaagatcgttagagcacatcaaagtatttgcaaagattgagagtctagaatctctcaagaacctgaaagacatcatagaggcatctgatggagttatggtagcacgaggggatcttggagttcagattcctcttgaacagatcccagccattcaagaatcaattgttaaactatgtagacacctgaacaagcctgtgatagttgcttctcagcttctcgaatcaatggttgaatacccaacaccaactcgagcagaggtggccgatgtttcggaagcagtgcggcaatatgcagacgctgtgatgctatcagcagagtcagctataggtgcatatccccaaaaagcgctatctgtacttcgtgcagccagtgaaaggatggaatcatggagccgtgaggaaaacatgcagaaacttcttccacggcatcagcttgcaattgcattgcctgaccggatctcagagcagatttgcagctgtgctgtagaaatggcaaacaaccttgctgtggatgccatatttgtctacacaaagcatggtcacatggcatcacttctatcgcgcaaccgacccaaccctcccatattcgcgttcactgataatgccaattcaagaaagagcatgaacctctactcgggagtgattccacttcatctaccattgtcaaatagcatggaggataacttcaacaaaaccatcagcctgatgaggtcgaagggttcagtgaaacccggagacacggtcttggtggtatcagattctgatctaaaccaaccttgtgctgccacctcggtgttccaatccattcaggtccggctagtggagtaggttccatgagatgagatcctactagccgtttggttggctaaaatgtaacgtaaccaactactactatgcgttaccattgcaaaccattcccaccgtctataattagatcctatttccatctccaaataaagattgaaccactgcgattacagtggtgtctgatt

SEQ ID NO: 32464 - protein, 320 aa, Zea mays subsp. mays
  peptide (1)..(320): Ceres Seq. ID no. 12412107
  misc_feature (199)..(298): Pfam Name: Pfam Description:  Pyruvate kinase, alpha/beta domain
  misc_feature (1)..(320): NCBI GI NO: 29788835 NR Description: putative pyruvate kinase
  misc_feature (1)..(298): NCBI GI NO: 2497539 NR Description: Pyruvate kinase isozyme A, chloroplast precursor
  misc_feature (1)..(298): NCBI GI NO: 2129963 NR Description: pyruvate kinase (EC 2
  misc_feature (1)..(298): NCBI GI NO: 18403597 NR Description: pyruvate kinase, putative; protein id: At3g22960
  misc_feature (1)..(298): NCBI GI NO: 21537361 NR Description: pyruvate kinase, putative [Arabidopsis thaliana]
  misc_feature (1)..(298): NCBI GI NO: 2497541 NR Description: Pyruvate kinase isozyme A, chloroplast precursor
  misc_feature (1)..(298): NCBI GI NO: 7434450 NR Description: pyruvate kinase (EC 2
  misc_feature (1)..(298): NCBI GI NO: 34393488 NR Description: putative Pyruvate kinase isozyme A
  misc_feature (1)..(298): NCBI GI NO: 21954080 NR Description: putative pyruvate kinase [Arabidopsis thaliana]
  misc_feature (1)..(320): NCBI GI NO: 37537030 NR Description: putative pyruvate kinase
MICAVSARTQDWADIEFGIAEGVDCIALSFVNDANDIKQLKAYLSRRSLEHIKVFAKIESLESLKNLKDIIEASDGVMVARGDLGVQIPLEQIPAIQESIVKLCRHLNKPVIVASQLLESMVEYPTPTRAEVADVSEAVRQYADAVMLSAESAIGAYPQKALSVLRAASERMESWSREENMQKLLPRHQLAIALPDRISEQICSCAVEMANNLAVDAIFVYTKHGHMASLLSRNRPNPPIFAFTDNANSRKSMNLYSGVIPLHLPLSNSMEDNFNKTISLMRSKGSVKPGDTVLVVSDSDLNQPCAATSVFQSIQVRLVE

SEQ ID NO: 32465 - protein, 243 aa, Zea mays subsp. mays
  peptide (1)..(243): Ceres Seq. ID no. 12412108
  misc_feature (122)..(221): Pfam Name: Pfam Description:  Pyruvate kinase, alpha/beta domain
  misc_feature (1)..(243): NCBI GI NO: 29788835 NR Description: putative pyruvate kinase
  misc_feature (1)..(221): NCBI GI NO: 2497539 NR Description: Pyruvate kinase isozyme A, chloroplast precursor
  misc_feature (1)..(221): NCBI GI NO: 2129963 NR Description: pyruvate kinase (EC 2
  misc_feature (1)..(221): NCBI GI NO: 18403597 NR Description: pyruvate kinase, putative; protein id: At3g22960
  misc_feature (1)..(221): NCBI GI NO: 21537361 NR Description: pyruvate kinase, putative [Arabidopsis thaliana]
  misc_feature (1)..(221): NCBI GI NO: 2497541 NR Description: Pyruvate kinase isozyme A, chloroplast precursor
  misc_feature (1)..(221): NCBI GI NO: 7434450 NR Description: pyruvate kinase (EC 2
  misc_feature (1)..(221): NCBI GI NO: 34393488 NR Description: putative Pyruvate kinase isozyme A
  misc_feature (1)..(221): NCBI GI NO: 21954080 NR Description: putative pyruvate kinase [Arabidopsis thaliana]
  misc_feature (1)..(243): NCBI GI NO: 37537030 NR Description: putative pyruvate kinase
MVARGDLGVQIPLEQIPAIQESIVKLCRHLNKPVIVASQLLESMVEYPTPTRAEVADVSEAVRQYADAVMLSAESAIGAYPQKALSVLRAASERMESWSREENMQKLLPRHQLAIALPDRISEQICSCAVEMANNLAVDAIFVYTKHGHMASLLSRNRPNPPIFAFTDNANSRKSMNLYSGVIPLHLPLSNSMEDNFNKTISLMRSKGSVKPGDTVLVVSDSDLNQPCAATSVFQSIQVRLVE

SEQ ID NO: 32466 - protein, 205 aa, Zea mays subsp. mays
  peptide (1)..(205): Ceres Seq. ID no. 12412109
  misc_feature (1)..(204): NCBI GI NO: 29788835 NR Description: putative pyruvate kinase
  misc_feature (40)..(204): NCBI GI NO: 2497539 NR Description: Pyruvate kinase isozyme A, chloroplast precursor
  misc_feature (1)..(204): NCBI GI NO: 2129963 NR Description: pyruvate kinase (EC 2
  misc_feature (1)..(204): NCBI GI NO: 18403597 NR Description: pyruvate kinase, putative; protein id: At3g22960
  misc_feature (1)..(204): NCBI GI NO: 21537361 NR Description: pyruvate kinase, putative [Arabidopsis thaliana]
  misc_feature (1)..(204): NCBI GI NO: 2497541 NR Description: Pyruvate kinase isozyme A, chloroplast precursor
  misc_feature (79)..(204): NCBI GI NO: 7434450 NR Description: pyruvate kinase (EC 2
  misc_feature (81)..(204): NCBI GI NO: 34393488 NR Description: putative Pyruvate kinase isozyme A
  misc_feature (1)..(203): NCBI GI NO: 37537030 NR Description: putative pyruvate kinase
  misc_feature (14)..(203): NCBI GI NO: 2497542 NR Description: Pyruvate kinase isozyme G, chloroplast precursor
MAASARTTSSLPYLVAVSSPAAHRHGASHPIRASVGEATMDVVSEAELREKGFLGMRKTKLVCTVGPACVEALPALARGGMGVARINLCHGGREWHRAAMRSVRRLNEEGGFCVTLMVDTEGSQLLVADHGGATSVKAEDGSEWIFTNKKADEAHQFTMHVNFDKFSEGILVGDELVIDGGMATFEVTEKIGNDLRCKCTDPGLG

SEQ ID NO: 32467 - DNA, 767 bp, Zea mays subsp. mays
  misc_feature (1)..(767): Ceres Seq. ID no. 12342167
aagacctcctattcaccatgccgaccgaagagggttccgacggcggtggcggcgccggagccggagccggggagaagaagagctcgcaggcgcccgcaaagcctggagcgtgcggcgccgcaaagttcctcgcggggttgccgtcgcgcggcaacttctcttccggctccgccccctccaatctgggagggttcagggtttacgtctgcgagcacagcacagatcccccagaaggacaagttataaagacggattcaacgaatattttaatcaggcatctccagttgaacaagcagaagactgagggcaaagatgtggattccagaactgtcggcgaaaacaacagagggaaaagatctgctgccagaagtttggatgtcaacaattcagcaaagaaggctaacttgggtacttcatctggatcatcagcctatgaggaaatttctggcttttcacaacacacactgcagtcatttacagtggagagattgcgtgcacttctacgacaaagtggtcgatcgaccaaaggcaaaaaggatgaactgattgctcgcttacgggagtcgcagggttgacatgaatctggtacttgtttagtcaatcaaaccccttcaggcagggttacacgaccaaatgagtaccatgctgtacttgtcaatggctgctctgcctagatttaatacaatgtaatggcatatgtaggttgagactttgccggaccttattatactcagaatttgttaactagctgttacctgtcagtagtc

SEQ ID NO: 32468 - protein, 190 aa, Zea mays subsp. mays
  peptide (1)..(190): Ceres Seq. ID no. 12342168
  misc_feature (24)..(178): NCBI GI NO: 15242782 NR Description: unknown protein; protein id: At5g63460.1
DLLFTMPTEEGSDGGGGAGAGAGEKKSSQAPAKPGACGAAKFLAGLPSRGNFSSGSAPSNLGGFRVYVCEHSTDPPEGQVIKTDSTNILIRHLQLNKQKTEGKDVDSRTVGENNRGKRSAARSLDVNNSAKKANLGTSSGSSAYEEISGFSQHTLQSFTVERLRALLRQSGRSTKGKKDELIARLRESQG

SEQ ID NO: 32469 - protein, 185 aa, Zea mays subsp. mays
  peptide (1)..(185): Ceres Seq. ID no. 12342169
  misc_feature (19)..(173): NCBI GI NO: 15242782 NR Description: unknown protein; protein id: At5g63460.1
MPTEEGSDGGGGAGAGAGEKKSSQAPAKPGACGAAKFLAGLPSRGNFSSGSAPSNLGGFRVYVCEHSTDPPEGQVIKTDSTNILIRHLQLNKQKTEGKDVDSRTVGENNRGKRSAARSLDVNNSAKKANLGTSSGSSAYEEISGFSQHTLQSFTVERLRALLRQSGRSTKGKKDELIARLRESQG

SEQ ID NO: 32470 - protein, 100 aa, Zea mays subsp. mays
  peptide (1)..(100): Ceres Seq. ID no. 12342170
RPPIHHADRRGFRRRWRRRSRSRGEEELAGARKAWSVRRRKVPRGVAVARQLLFRLRPLQSGRVQGLRLRAQHRSPRRTSYKDGFNEYFNQASPVEQAED

SEQ ID NO: 32471 - DNA, 1273 bp, Zea mays subsp. mays
  misc_feature (1)..(1273): Ceres Seq. ID no. 12412098
aacatagtttcgtcgtggaacaagaggcggagaagcaggtcactcgaccagctaaatccctgggtgtacaagccggctgagctatggcaggcgaaggagcaggagcaccaccacccgccgcccaagaagcgcagctgcaccatggtgttcacgctcaaggagatggaggaggcgaccaacctgttcagcgaccgcaacctcatcggcaagggcggcttcggccgggtttacagaggcgtgctcaaggatggccagatcgtcgccgtcaagaagatggagctgccgacttgcaagcaggccgacggcgagcgcgagttccgggtggagatcgacatcctgagcaggctagaccaccccaacctggtcacgctcatcggctactgcgccgacggcaagcaccggttcgtggtgtacgagtacatgcccaggggcaacctccaggacatcctcaacggcattggggaggtgaggatggactggccgctgcgcctgcggatcgcgctgggagcggcgcgggcgctggcctacctgcactccagcacggccgtcggcgtccccgtcgtccacagggacttcaagtccagcaacatcctcctcaccgaccactacgaggcaaagatctcggacttcgggctcgccaagctgctgcagcaggaccaggacctgcacaccaccaccagggtgctgggcacgttcggctacttcgaccccgaatacgcgctgacagggaagctgacgctgcagagcgacgtgtacgcgttcggcgtggtgctgctgggagctgctgacggggcggcgggccatcgacctgagccaggggccgcaggagcagaacctcatcgtcggcatccaccaggtggtgggcgaccgcaagaagctgcgcaaggtggtggaccgggacatgcccaggggctcctacacgctggagtcggtgtccatgttcgccgcgctcgccgcgcgctgcgtctgcttcgacagcgccgcccgcccgcccatgcaggactgcgtcaaggagctccagttcatcatgtacgctaacatgaagatatgatcactctcgcgggtgcaaaccgcgcgtgggttttctttacttttgagacgggggcggggcatgcggacgatgctgctggattgcaagcaattgcaggtccgcagcttttgtttggttgatgaaacgaattgtctaaaaaggctttatacagttacttgctagtggtgctcgtttggtagagcttgtagctctagtcaaaccagttctactggtgatttctcc

SEQ ID NO: 32472 - protein, 345 aa, Zea mays subsp. mays
  peptide (1)..(345): Ceres Seq. ID no. 12412099
  misc_feature (2)..(264): NCBI GI NO: 30102706 NR Description: At1g24030 [Arabidopsis thaliana]
  misc_feature (55)..(264): NCBI GI NO: 25287587 NR Description: protein T23E23.18
  misc_feature (55)..(264): NCBI GI NO: 15221649 NR Description: protein kinase, putative; protein id: At1g24030.1
  misc_feature (50)..(264): NCBI GI NO: 8778594 NR Description: F5M15.3 [Arabidopsis thaliana]
  misc_feature (50)..(264): NCBI GI NO: 15217992 NR Description: protein kinase, putative; protein id: At1g20650.1
  misc_feature (50)..(264): NCBI GI NO: 11259782 NR Description: protein kinase-like - Arabidopsis thaliana
  misc_feature (50)..(264): NCBI GI NO: 30679773 NR Description: protein kinase family [Arabidopsis thaliana]
  misc_feature (49)..(273): NCBI GI NO: 34899302 NR Description: putative protein serine/threonine kinase
  misc_feature (49)..(273): NCBI GI NO: 34395193 NR Description: putative protein serine/threonine kinase
  misc_feature (43)..(264): NCBI GI NO: 34394036 NR Description: putative protein serine/threonine kinase BNK1
NIVSSWNKRRRSRSLDQLNPWVYKPAELWQAKEQEHHHPPPKKRSCTMVFTLKEMEEATNLFSDRNLIGKGGFGRVYRGVLKDGQIVAVKKMELPTCKQADGEREFRVEIDILSRLDHPNLVTLIGYCADGKHRFVVYEYMPRGNLQDILNGIGEVRMDWPLRLRIALGAARALAYLHSSTAVGVPVVHRDFKSSNILLTDHYEAKISDFGLAKLLQQDQDLHTTTRVLGTFGYFDPEYALTGKLTLQSDVYAFGVVLLGAADGAAGHRPEPGAAGAEPHRRHPPGGGRPQEAAQGGGPGHAQGLLHAGVGVHVRRARRALRLLRQRRPPAHAGLRQGAPVHHVR

SEQ ID NO: 32473 - protein, 298 aa, Zea mays subsp. mays
  peptide (1)..(298): Ceres Seq. ID no. 12412100
  misc_feature (1)..(217): NCBI GI NO: 30102706 NR Description: At1g24030 [Arabidopsis thaliana]
  misc_feature (8)..(217): NCBI GI NO: 25287587 NR Description: protein T23E23.18
  misc_feature (8)..(217): NCBI GI NO: 15221649 NR Description: protein kinase, putative; protein id: At1g24030.1
  misc_feature (3)..(217): NCBI GI NO: 8778594 NR Description: F5M15.3 [Arabidopsis thaliana]
  misc_feature (3)..(217): NCBI GI NO: 15217992 NR Description: protein kinase, putative; protein id: At1g20650.1
  misc_feature (3)..(217): NCBI GI NO: 11259782 NR Description: protein kinase-like - Arabidopsis thaliana
  misc_feature (3)..(217): NCBI GI NO: 30679773 NR Description: protein kinase family [Arabidopsis thaliana]
  misc_feature (2)..(226): NCBI GI NO: 34899302 NR Description: putative protein serine/threonine kinase
  misc_feature (2)..(226): NCBI GI NO: 34395193 NR Description: putative protein serine/threonine kinase
  misc_feature (1)..(217): NCBI GI NO: 34394036 NR Description: putative protein serine/threonine kinase BNK1
MVFTLKEMEEATNLFSDRNLIGKGGFGRVYRGVLKDGQIVAVKKMELPTCKQADGEREFRVEIDILSRLDHPNLVTLIGYCADGKHRFVVYEYMPRGNLQDILNGIGEVRMDWPLRLRIALGAARALAYLHSSTAVGVPVVHRDFKSSNILLTDHYEAKISDFGLAKLLQQDQDLHTTTRVLGTFGYFDPEYALTGKLTLQSDVYAFGVVLLGAADGAAGHRPEPGAAGAEPHRRHPPGGGRPQEAAQGGGPGHAQGLLHAGVGVHVRRARRALRLLRQRRPPAHAGLRQGAPVHHVR

SEQ ID NO: 32474 - protein, 291 aa, Zea mays subsp. mays
  peptide (1)..(291): Ceres Seq. ID no. 12412101
  misc_feature (1)..(210): NCBI GI NO: 30102706 NR Description: At1g24030 [Arabidopsis thaliana]
  misc_feature (1)..(210): NCBI GI NO: 25287587 NR Description: protein T23E23.18
  misc_feature (1)..(210): NCBI GI NO: 15221649 NR Description: protein kinase, putative; protein id: At1g24030.1
  misc_feature (1)..(210): NCBI GI NO: 8778594 NR Description: F5M15.3 [Arabidopsis thaliana]
  misc_feature (1)..(210): NCBI GI NO: 15217992 NR Description: protein kinase, putative; protein id: At1g20650.1
  misc_feature (1)..(210): NCBI GI NO: 11259782 NR Description: protein kinase-like - Arabidopsis thaliana
  misc_feature (1)..(210): NCBI GI NO: 30679773 NR Description: protein kinase family [Arabidopsis thaliana]
  misc_feature (1)..(219): NCBI GI NO: 34899302 NR Description: putative protein serine/threonine kinase
  misc_feature (1)..(219): NCBI GI NO: 34395193 NR Description: putative protein serine/threonine kinase
  misc_feature (1)..(210): NCBI GI NO: 34394036 NR Description: putative protein serine/threonine kinase BNK1
MEEATNLFSDRNLIGKGGFGRVYRGVLKDGQIVAVKKMELPTCKQADGEREFRVEIDILSRLDHPNLVTLIGYCADGKHRFVVYEYMPRGNLQDILNGIGEVRMDWPLRLRIALGAARALAYLHSSTAVGVPVVHRDFKSSNILLTDHYEAKISDFGLAKLLQQDQDLHTTTRVLGTFGYFDPEYALTGKLTLQSDVYAFGVVLLGAADGAAGHRPEPGAAGAEPHRRHPPGGGRPQEAAQGGGPGHAQGLLHAGVGVHVRRARRALRLLRQRRPPAHAGLRQGAPVHHVR

SEQ ID NO: 32475 - DNA, 1342 bp, Zea mays subsp. mays
  misc_feature (1)..(1342): Ceres Seq. ID no. 12412086
atcgattaatctcctcccccctcaacaaccgcgagatcttcagctaccgctctctccggtcgcgtttgcatccgcattcctcagatccagattcgagccccagccccgcttcgagatccagctagctctctatcaagcatccggcggagcgagcagcggggggctcggcgagagagaagatgaagcggaagacgcggaacaagatcatcgtatggacactggccctggctgcagtggcgattctggtgggcggcacgattgcgctggtgctcacggcggggacgtggaaggccaagataaagaagtcgcaggagaagatctgtaacaaggggtgggagtgctcggggagcaagtactgctgcaacgacaccatcaccgacttcttcaaggtgtaccagttcgagaacctcttcgccaagcgcaacacccccgtcgcgcacgccgtcgggttctgggactaccaggccttcatcaccgccgcggccctcttcgagccccaggggttctgcaccaccggcggcaagcagatgcagatgatggagctctgcgccttcctcgggcacgtcggcgccaagacttcatgtgggtacggcgtggcgaccggcgggccgacggcatgggggctgtgctacaaccacgagatgagccccgaccagacctactgcgacaagacctacacccagtacccctgcgtcgagggcgccgagtactacggccgaggcgcgattcctgtctactggaactacaactacggcgctgccggtgacgggatcaaggcggatctgctccaccacccagagtacctggagcagaacgcgacgctggcattcatggcggcgatgtggcggtggatgacgccgatcaagaagagccagccgtcggcgcacgacgccttcgtgggcaactggaagccgaccaagaacgacacgctcagcaaacgcctgcctgggttcggcgccaccatgaacatactctacggcgagtcgatctgcggcaagggatacgtcgacgccatgaacgttataatctcgcactaccagtattaccttgacctcatgggcgtcggccgtgagcactctggcgacaaccgtgattgcgccgagcaggcaccgttcaacccctccagcccgacggatgaccagaagcagcagcaatcaggaagctaagacggacggactcattgcgccattgccactgatcaagcttccacagcgctagattgagctacagattcttcaggatgcgtgaagctgcatgcatcgtgttgatgttgttttgaatagactgtatgtactgtctatgtgaattgcgagatttgtggttatttactaccatgttgtcc

SEQ ID NO: 32476 - protein, 328 aa, Zea mays subsp. mays
  peptide (1)..(328): Ceres Seq. ID no. 12412087
  misc_feature (15)..(320): NCBI GI NO: 27817867 NR Description: OJ1081_B12.16
  misc_feature (15)..(316): NCBI GI NO: 15221283 NR Description: glycosyl hydrolase family 19
  misc_feature (11)..(316): NCBI GI NO: 15228911 NR Description: glycosyl hydrolase family 19
  misc_feature (48)..(318): NCBI GI NO: 17932710 NR Description: putative chitinase [Musa acuminata]
  misc_feature (73)..(312): NCBI GI NO: 7798632 NR Description: class I chitinase [Arabis holboellii]
  misc_feature (43)..(319): NCBI GI NO: 21780274 NR Description: chitinase KBchit5-3-1 [Leucaena leucocephala]
  misc_feature (43)..(317): NCBI GI NO: 1705807 NR Description: Endochitinase A2 precursor
  misc_feature (74)..(312): NCBI GI NO: 17932712 NR Description: putative chitinase [Musa acuminata]
  misc_feature (3)..(315): NCBI GI NO: 116347 NR Description: ENDOCHITINASE PRECURSOR
  misc_feature (53)..(319): NCBI GI NO: 3334147 NR Description: ENDOCHITINASE 1 PRECURSOR
MKRKTRNKIIVWTLALAAVAILVGGTIALVLTAGTWKAKIKKSQEKICNKGWECSGSKYCCNDTITDFFKVYQFENLFAKRNTPVAHAVGFWDYQAFITAAALFEPQGFCTTGGKQMQMMELCAFLGHVGAKTSCGYGVATGGPTAWGLCYNHEMSPDQTYCDKTYTQYPCVEGAEYYGRGAIPVYWNYNYGAAGDGIKADLLHHPEYLEQNATLAFMAAMWRWMTPIKKSQPSAHDAFVGNWKPTKNDTLSKRLPGFGATMNILYGESICGKGYVDAMNVIISHYQYYLDLMGVGREHSGDNRDCAEQAPFNPSSPTDDQKQQQSGS

SEQ ID NO: 32477 - protein, 212 aa, Zea mays subsp. mays
  peptide (1)..(212): Ceres Seq. ID no. 12412088
  misc_feature (1)..(204): NCBI GI NO: 27817867 NR Description: OJ1081_B12.16
  misc_feature (1)..(200): NCBI GI NO: 15221283 NR Description: glycosyl hydrolase family 19
  misc_feature (1)..(200): NCBI GI NO: 15228911 NR Description: glycosyl hydrolase family 19
  misc_feature (1)..(202): NCBI GI NO: 17932710 NR Description: putative chitinase [Musa acuminata]
  misc_feature (1)..(196): NCBI GI NO: 7798632 NR Description: class I chitinase [Arabis holboellii]
  misc_feature (1)..(203): NCBI GI NO: 21780274 NR Description: chitinase KBchit5-3-1 [Leucaena leucocephala]
  misc_feature (1)..(201): NCBI GI NO: 1705807 NR Description: Endochitinase A2 precursor
  misc_feature (1)..(196): NCBI GI NO: 17932712 NR Description: putative chitinase [Musa acuminata]
  misc_feature (1)..(199): NCBI GI NO: 116347 NR Description: ENDOCHITINASE PRECURSOR
  misc_feature (1)..(203): NCBI GI NO: 3334147 NR Description: ENDOCHITINASE 1 PRECURSOR
MQMMELCAFLGHVGAKTSCGYGVATGGPTAWGLCYNHEMSPDQTYCDKTYTQYPCVEGAEYYGRGAIPVYWNYNYGAAGDGIKADLLHHPEYLEQNATLAFMAAMWRWMTPIKKSQPSAHDAFVGNWKPTKNDTLSKRLPGFGATMNILYGESICGKGYVDAMNVIISHYQYYLDLMGVGREHSGDNRDCAEQAPFNPSSPTDDQKQQQSGS

SEQ ID NO: 32478 - protein, 210 aa, Zea mays subsp. mays
  peptide (1)..(210): Ceres Seq. ID no. 12412089
  misc_feature (1)..(202): NCBI GI NO: 27817867 NR Description: OJ1081_B12.16
  misc_feature (1)..(198): NCBI GI NO: 15221283 NR Description: glycosyl hydrolase family 19
  misc_feature (1)..(198): NCBI GI NO: 15228911 NR Description: glycosyl hydrolase family 19
  misc_feature (1)..(200): NCBI GI NO: 17932710 NR Description: putative chitinase [Musa acuminata]
  misc_feature (1)..(194): NCBI GI NO: 7798632 NR Description: class I chitinase [Arabis holboellii]
  misc_feature (1)..(201): NCBI GI NO: 21780274 NR Description: chitinase KBchit5-3-1 [Leucaena leucocephala]
  misc_feature (1)..(199): NCBI GI NO: 1705807 NR Description: Endochitinase A2 precursor
  misc_feature (1)..(194): NCBI GI NO: 17932712 NR Description: putative chitinase [Musa acuminata]
  misc_feature (1)..(197): NCBI GI NO: 116347 NR Description: ENDOCHITINASE PRECURSOR
  misc_feature (1)..(201): NCBI GI NO: 3334147 NR Description: ENDOCHITINASE 1 PRECURSOR
MMELCAFLGHVGAKTSCGYGVATGGPTAWGLCYNHEMSPDQTYCDKTYTQYPCVEGAEYYGRGAIPVYWNYNYGAAGDGIKADLLHHPEYLEQNATLAFMAAMWRWMTPIKKSQPSAHDAFVGNWKPTKNDTLSKRLPGFGATMNILYGESICGKGYVDAMNVIISHYQYYLDLMGVGREHSGDNRDCAEQAPFNPSSPTDDQKQQQSGS

SEQ ID NO: 32479 - DNA, 935 bp, Zea mays subsp. mays
  misc_feature (1)..(935): Ceres Seq. ID no. 12414433
agtttatgggctggaatgggccgctcaaactggcccgttacgtgaatttggcggggctgccgctgggatccgagacgtggtggctgcacagcgacgtccgtgggagcgggcgggcgactgcaggcagagggtttcgtccgaaccctagtgtcctccacacgccgtcgccatggccgccgcccgcgccgccctccgcctgcagcgccagtgcctcgccgccaacccctttctcttctccgggcatggcctccgctaccgcaagcttgaggtcatcctcaccacgactattgataagctggggaaagcaggcgaggtggtcaaggtggcgcctggccacttccgcaaccaccttatgcccaagatgctcgcagtcccgaacctggacaaattcgccatactaatccgagagcagcgcaagctctatcaacgcgaagaggaggtcgcggtgaaacaagtcacggagaaagatgatgatgcacggctacaggaagaaagaatgaagcagtaccaaacggcagcaaagcggctagataacgcactcttggtgttgaggaggttcatctcgactggaaacgagctgcgtactcctgtaacaaaagacgaaattgtttccgaggtggcgaggcagctcaacatcaacatccatccggagaacctgcatctgcagtcacctttggcgtcgctcggcgaatttgagttgcccctccggttaccgcagaacataccgtgcccagaaggtaagctccagtggactctgaaggtgaagatcaggagaaaatgagcgcaggaactggggaagtttcttttgcccccccacaatctggtgtatggtaccaaaccattgttagctccgaaacaatggtaccaaaccattggttatgcaagtttagctccgaaacatttttttctgatgtataataaaagagtaaggttgc

SEQ ID NO: 32480 - protein, 203 aa, Zea mays subsp. mays
  peptide (1)..(203): Ceres Seq. ID no. 12414434
  misc_feature (32)..(81): Pfam Name: Pfam Description:  Ribosomal protein L9, N-terminal domain
  misc_feature (18)..(201): NCBI GI NO: 15237342 NR Description: putative protein; protein id: At5g53070.1
  misc_feature (30)..(99): NCBI GI NO: 22299956 NR Description: 50S ribosomal protein L9
MAAARAALRLQRQCLAANPFLFSGHGLRYRKLEVILTTTIDKLGKAGEVVKVAPGHFRNHLMPKMLAVPNLDKFAILIREQRKLYQREEEVAVKQVTEKDDDARLQEERMKQYQTAAKRLDNALLVLRRFISTGNELRTPVTKDEIVSEVARQLNINIHPENLHLQSPLASLGEFELPLRLPQNIPCPEGKLQWTLKVKIRRK

SEQ ID NO: 32481 - protein, 142 aa, Zea mays subsp. mays
  peptide (1)..(142): Ceres Seq. ID no. 12414435
  misc_feature (1)..(140): NCBI GI NO: 15237342 NR Description: putative protein; protein id: At5g53070.1
  misc_feature (1)..(38): NCBI GI NO: 22299956 NR Description: 50S ribosomal protein L9
MPKMLAVPNLDKFAILIREQRKLYQREEEVAVKQVTEKDDDARLQEERMKQYQTAAKRLDNALLVLRRFISTGNELRTPVTKDEIVSEVARQLNINIHPENLHLQSPLASLGEFELPLRLPQNIPCPEGKLQWTLKVKIRRK

SEQ ID NO: 32482 - protein, 139 aa, Zea mays subsp. mays
  peptide (1)..(139): Ceres Seq. ID no. 12414436
  misc_feature (1)..(137): NCBI GI NO: 15237342 NR Description: putative protein; protein id: At5g53070.1
  misc_feature (1)..(35): NCBI GI NO: 22299956 NR Description: 50S ribosomal protein L9
MLAVPNLDKFAILIREQRKLYQREEEVAVKQVTEKDDDARLQEERMKQYQTAAKRLDNALLVLRRFISTGNELRTPVTKDEIVSEVARQLNINIHPENLHLQSPLASLGEFELPLRLPQNIPCPEGKLQWTLKVKIRRK

SEQ ID NO: 32483 - DNA, 1599 bp, Zea mays subsp. mays
  misc_feature (1)..(1599): Ceres Seq. ID no. 12340954
aggtcgatcactcgctgcgcgcctccacccttttccaccccgccgccgaagccaccgtgccgctagccttccccgccgccgcaaaatggccgcctccgcgcgacccctggttaccgtgagggccctggagggcgacatggccacggactccgccggtgttccgctggcggacgtcctccgcgcaccgatccgcccggacatcgttcgcttcgtccacaagctcctgtcctgcaacagccgccaaccctatgcggtgtcgcgtcgcgccggacaccagacctccgcggagtcctggggcacggggcgtgcggtatcccgtatcccccgcgttcctggcggtggtacccaccgcgccggccagggagcgttcggcaacatgtgtcgtggtggacgcatgttcgcgcccaccaagatctggcgccgctggcaccgtcgcgtcaacatacaccttcgccgtgtcgccatcgcctccgcactctccgccaccgccgttccgtcccttgttctcgcacgtggccaccgcgtggagtctgtgcccgagctcccgctggtcgtttcggactccgcggagtccattgagaagacagcccaggccatcaatatcctcaaacagctcggtgcctacgccgatgctgagaaggccaaggattctgttggcatccgccccggcaagggcaagatgcgcaaccgccgctacatcaatcgtaagggacccctcgttgtctacggcactgagggctctaaggtcgtcaaggcctttcgcaacctccctggcgttgatgttgccaatgtcgagcgcctcaacctgctcgatctcgcccctggtggccaccttggccggttcgtcatctggaccgagtgcgcattcaagaagctggatgaggtgtacggtaccttcaacgcaccatcagcgaagaagaagggtttcgtgctcccgaggcccaagatggcaaacgctgacctatccaggcttatcaactctgacgaggtgcaatctgtagtgaagcccatcaataaggatgtgaagcgtagggagcctaggaagaacccactgaataatatggctgcagtgctcaagctgaacccgtacctcggtactgcacgcaagatggcagccctagccgaggcagcgcgtgtcaaggccaggaagcagaagcttgattccaagaggaccaagctcagcccagaggaggcttctaaggtcaaggctgctggaaaggcgtggtacaagaccatggtttcagacagcgactacacagagtttgagaacttcaccaagtggcttggtgttacacagtgattgtctggtccaacccttattgttttgccaattcagagattatgattttgatcgctgttgtcaaatatcctttgttattggtatattctgacattagttttggctttggtagtttttttttaccgctggatgtttacttccagacacctattacaccttttatggaaacgaagtatatcgattctcaacactcaccgtgcttctgtttttggcagtattggttactcgagtattcatgttcagttgtattagtgtatgcattttctttgtgcccttctgtttgttgggtatataatagt

SEQ ID NO: 32484 - protein, 432 aa, Zea mays subsp. mays
  peptide (1)..(432): Ceres Seq. ID no. 12340955
  misc_feature (53)..(295): Pfam Name: Pfam Description:  Ribosomal protein L4/L1 family
  misc_feature (29)..(432): NCBI GI NO: 34897236 NR Description: putative 60S ribosomal protein L1
  misc_feature (29)..(432): NCBI GI NO: 34393487 NR Description: putative 60S ribosomal protein L4/L1
  misc_feature (30)..(432): NCBI GI NO: 15232723 NR Description: putative 60S ribosomal protein L1
  misc_feature (30)..(432): NCBI GI NO: 17367847 NR Description: 60S ribosomal protein L4 (L1)
  misc_feature (30)..(432): NCBI GI NO: 21593543 NR Description: 60S ribosomal protein L4-B (L1)
  misc_feature (30)..(432): NCBI GI NO: 15242558 NR Description: 60S ribosomal protein - like; protein id:At5g02870
  misc_feature (30)..(432): NCBI GI NO: 26450328 NR Description: putative 60S ribosomal protein
  misc_feature (126)..(432): NCBI GI NO: 13605831 NR Description: AT5g02870/F9G14_180 [Arabidopsis thaliana]
  misc_feature (32)..(399): NCBI GI NO: 1350686 NR Description: 60S RIBOSOMAL PROTEIN L4 (L1)
  misc_feature (78)..(432): NCBI GI NO: 6441068 NR Description: 60S ribosomal protein L4 [Chlamydomonas sp. HS-5]
GRSLAARLHPFPPRRRSHRAASLPRRRKMAASARPLVTVRALEGDMATDSAGVPLADVLRAPIRPDIVRFVHKLLSCNSRQPYAVSRRAGHQTSAESWGTGRAVSRIPRVPGGGTHRAGQGAFGNMCRGGRMFAPTKIWRRWHRRVNIHLRRVAIASALSATAVPSLVLARGHRVESVPELPLVVSDSAESIEKTAQAINILKQLGAYADAEKAKDSVGIRPGKGKMRNRRYINRKGPLVVYGTEGSKVVKAFRNLPGVDVANVERLNLLDLAPGGHLGRFVIWTECAFKKLDEVYGTFNAPSAKKKGFVLPRPKMANADLSRLINSDEVQSVVKPINKDVKRREPRKNPLNNMAAVLKLNPYLGTARKMAALAEAARVKARKQKLDSKRTKLSPEEASKVKAAGKAWYKTMVSDSDYTEFENFTKWLGVTQ

SEQ ID NO: 32485 - protein, 404 aa, Zea mays subsp. mays
  peptide (1)..(404): Ceres Seq. ID no. 12340956
  misc_feature (25)..(267): Pfam Name: Pfam Description:  Ribosomal protein L4/L1 family
  misc_feature (1)..(404): NCBI GI NO: 34897236 NR Description: putative 60S ribosomal protein L1
  misc_feature (1)..(404): NCBI GI NO: 34393487 NR Description: putative 60S ribosomal protein L4/L1
  misc_feature (2)..(404): NCBI GI NO: 15232723 NR Description: putative 60S ribosomal protein L1
  misc_feature (2)..(404): NCBI GI NO: 17367847 NR Description: 60S ribosomal protein L4 (L1)
  misc_feature (2)..(404): NCBI GI NO: 21593543 NR Description: 60S ribosomal protein L4-B (L1)
  misc_feature (2)..(404): NCBI GI NO: 15242558 NR Description: 60S ribosomal protein - like; protein id:At5g02870
  misc_feature (2)..(404): NCBI GI NO: 26450328 NR Description: putative 60S ribosomal protein
  misc_feature (98)..(404): NCBI GI NO: 13605831 NR Description: AT5g02870/F9G14_180 [Arabidopsis thaliana]
  misc_feature (4)..(371): NCBI GI NO: 1350686 NR Description: 60S RIBOSOMAL PROTEIN L4 (L1)
  misc_feature (50)..(404): NCBI GI NO: 6441068 NR Description: 60S ribosomal protein L4 [Chlamydomonas sp. HS-5]
MAASARPLVTVRALEGDMATDSAGVPLADVLRAPIRPDIVRFVHKLLSCNSRQPYAVSRRAGHQTSAESWGTGRAVSRIPRVPGGGTHRAGQGAFGNMCRGGRMFAPTKIWRRWHRRVNIHLRRVAIASALSATAVPSLVLARGHRVESVPELPLVVSDSAESIEKTAQAINILKQLGAYADAEKAKDSVGIRPGKGKMRNRRYINRKGPLVVYGTEGSKVVKAFRNLPGVDVANVERLNLLDLAPGGHLGRFVIWTECAFKKLDEVYGTFNAPSAKKKGFVLPRPKMANADLSRLINSDEVQSVVKPINKDVKRREPRKNPLNNMAAVLKLNPYLGTARKMAALAEAARVKARKQKLDSKRTKLSPEEASKVKAAGKAWYKTMVSDSDYTEFENFTKWLGVTQ

SEQ ID NO: 32486 - protein, 387 aa, Zea mays subsp. mays
  peptide (1)..(387): Ceres Seq. ID no. 12340957
  misc_feature (8)..(250): Pfam Name: Pfam Description:  Ribosomal protein L4/L1 family
  misc_feature (1)..(387): NCBI GI NO: 34897236 NR Description: putative 60S ribosomal protein L1
  misc_feature (1)..(387): NCBI GI NO: 34393487 NR Description: putative 60S ribosomal protein L4/L1
  misc_feature (1)..(387): NCBI GI NO: 15232723 NR Description: putative 60S ribosomal protein L1
  misc_feature (1)..(387): NCBI GI NO: 17367847 NR Description: 60S ribosomal protein L4 (L1)
  misc_feature (1)..(387): NCBI GI NO: 21593543 NR Description: 60S ribosomal protein L4-B (L1)
  misc_feature (1)..(387): NCBI GI NO: 15242558 NR Description: 60S ribosomal protein - like; protein id:At5g02870
  misc_feature (1)..(387): NCBI GI NO: 26450328 NR Description: putative 60S ribosomal protein
  misc_feature (81)..(387): NCBI GI NO: 13605831 NR Description: AT5g02870/F9G14_180 [Arabidopsis thaliana]
  misc_feature (1)..(354): NCBI GI NO: 1350686 NR Description: 60S RIBOSOMAL PROTEIN L4 (L1)
  misc_feature (33)..(387): NCBI GI NO: 6441068 NR Description: 60S ribosomal protein L4 [Chlamydomonas sp. HS-5]
MATDSAGVPLADVLRAPIRPDIVRFVHKLLSCNSRQPYAVSRRAGHQTSAESWGTGRAVSRIPRVPGGGTHRAGQGAFGNMCRGGRMFAPTKIWRRWHRRVNIHLRRVAIASALSATAVPSLVLARGHRVESVPELPLVVSDSAESIEKTAQAINILKQLGAYADAEKAKDSVGIRPGKGKMRNRRYINRKGPLVVYGTEGSKVVKAFRNLPGVDVANVERLNLLDLAPGGHLGRFVIWTECAFKKLDEVYGTFNAPSAKKKGFVLPRPKMANADLSRLINSDEVQSVVKPINKDVKRREPRKNPLNNMAAVLKLNPYLGTARKMAALAEAARVKARKQKLDSKRTKLSPEEASKVKAAGKAWYKTMVSDSDYTEFENFTKWLGVTQ

SEQ ID NO: 32487 - DNA, 645 bp, Zea mays subsp. mays
  misc_feature (1)..(645): Ceres Seq. ID no. 12405959
tatccagtcgcatctccctctccgaaatcaaggtagcgtacaccgctgcagtttctagagccctctctgccactcgtgatcccactagtcacaatgcctgccctcgccaagcccgcctcccgcaccgccaagcccgccgcggctccgaagccgaagcctgccgccgccaagccgaaggcggccaccgctggtgcctcccacccgccttacttcgagatgatcaaggaggctatcacggcgctcaaggagagggcaggcattgtgactagtgggatcccaaggtgtctggccatgatttggctcgttgggtcgaaaaggaaaagcaaatgattgacaaggagatggagcgaggggtggtctaccttatgggggaagccaatgtcattgcaggaccagaatcatctgccgcaaagaagatagtggtagactatgtctacgcattcttgaggaagaacttgacggagggggagaaggtgctctccattccgaaagaccaactactcaaagtagggataacatacgagatatagggattatgctgggcctcaagttacaatcctatgtatcaacttggcctttagtcataaagtttatgtatatcgagagattcaagattcaatgtaaattattcaattttattccttc

SEQ ID NO: 32488 - protein, 88 aa, Zea mays subsp. mays
  peptide (1)..(88): Ceres Seq. ID no. 12405960
  misc_feature (56)..(88): NCBI GI NO: 7489431 NR Description: probable potassium transport protein - barley
SSRISLSEIKVAYTAAVSRALSATRDPTSHNACPRQARLPHRQARRGSEAEACRRQAEGGHRWCLPPALLRDDQGGYHGAQGEGRHCD

SEQ ID NO: 32489 - protein, 78 aa, Zea mays subsp. mays
  peptide (1)..(78): Ceres Seq. ID no. 12405961
  misc_feature (1)..(63): NCBI GI NO: 22135471 NR Description: histone H1-like protein HON101 [Zea mays]
MPALAKPASRTAKPAAAPKPKPAAAKPKAATAGASHPPYFEMIKEAITALKERAGIVTSGIPRCLAMIWLVGSKRKSK

SEQ ID NO: 32490 - protein, 67 aa, Zea mays subsp. mays
  peptide (1)..(67): Ceres Seq. ID no. 12405962
  misc_feature (1)..(67): Pfam Name: Pfam Description:  K+ potassium transporter
  misc_feature (1)..(67): NCBI GI NO: 12862378 NR Description: high-affinity potassium transporter
  misc_feature (1)..(67): NCBI GI NO: 12862382 NR Description: high-affinity potassium transporter
  misc_feature (1)..(67): NCBI GI NO: 12862380 NR Description: high-affinity potassium transporter
  misc_feature (1)..(67): NCBI GI NO: 12862384 NR Description: high-affinity potassium transporter
  misc_feature (1)..(67): NCBI GI NO: 7489431 NR Description: probable potassium transport protein - barley
  misc_feature (1)..(67): NCBI GI NO: 18426983 NR Description: putative potassium transporter
  misc_feature (1)..(67): NCBI GI NO: 21740625 NR Description: OSJNBb0012E08.7
  misc_feature (1)..(67): NCBI GI NO: 34538929 NR Description: KUP1 [Oryza sativa (japonica cultivar-group)]
  misc_feature (1)..(67): NCBI GI NO: 38093744 NR Description: putative potassium transporter
  misc_feature (1)..(67): NCBI GI NO: 38175466 NR Description: putative high-affinity potassium transporter
MIDKEMERGVVYLMGEANVIAGPESSAAKKIVVDYVYAFLRKNLTEGEKVLSIPKDQLLKVGITYEI

SEQ ID NO: 32491 - DNA, 1005 bp, Zea mays subsp. mays
  misc_feature (1)..(1005): Ceres Seq. ID no. 12413435
ctcgcatcgcatcgatcctcccatctgcgcacccgcaagcctattctccgcacctcctcaggtgaccgggaagatgatgccgttgagccaaaccgacttctcgccgtcgcagttcacctcctcccagaatgccgccgccgactccaccacgccttccaagatgcgcggcgcgtccagcaccatgccgctcaccgtgaagcaggtcgtcgacgcgcagcagtctggcacgggcgagaagggcgctccgttcatcgtcaatggcgtcgagatggctaacattcgacttgtggggatggtcaatgccaaggtggagcggacgaccgatgtgaccttcacgctcgacgatggcaccggccgcctcgatttcatcagatgggtgaatgatgcttcagattcttttgaaactgctgctattcagaatggtatgtacattgcggtcattggaagcctcaagggactgcaagagaggaagcgtgctactgctttctcaatcaggcctataaccgatttcaatgaggttacgctgcatttcattcagtgtgttcggatgcatatagagaacattgaattaaaggctggcagtcctgcacgaatcagttcttctatgggagtgtcattctcaaatggattcagtgaatcaagcacaccgacatctttgaaatccagtcccgcaccggtgaccagcgggtcatccgatactgatctgcacacgcaggtcctgaatttttttaatgaaccagcgaacctcgagagtgagcatggggtgcacgttgatgaagtactcaagcggttcaaacttttgccgaagaagcagatcacggatgctattgattacaatatggactcggggcgtctttactcaacaattgatgaattccactacaaggcaacttaaccgatttgaaggccagcctgctggaaatggcagaggactaagtatcacttgtactaaaccaaagtctggaaatgtcatgttgtgtcatgaaatgcatggttggtttatgg

SEQ ID NO: 32492 - protein, 297 aa, Zea mays subsp. mays
  peptide (1)..(297): Ceres Seq. ID no. 12413436
  misc_feature (93)..(167): Pfam Name: Pfam Description:  OB-fold nucleic acid binding domain
  misc_feature (25)..(296): NCBI GI NO: 9801268 NR Description: replication protein A2 [Oryza sativa]
  misc_feature (25)..(296): NCBI GI NO: 13516746 NR Description: replication protein A 30kDa
  misc_feature (33)..(295): NCBI GI NO: 18400560 NR Description: putative replication protein A1
  misc_feature (33)..(297): NCBI GI NO: 18396383 NR Description: putative replication factor A
  misc_feature (33)..(297): NCBI GI NO: 6728969 NR Description: putative replication factor A
  misc_feature (33)..(189): NCBI GI NO: 25347925 NR Description: probable replication protein A1
  misc_feature (34)..(297): NCBI GI NO: 2498847 NR Description: REPLICATION PROTEIN A 32 KD SUBUNIT
  misc_feature (34)..(297): NCBI GI NO: 34871794 NR Description: p32-subunit of replication protein A
  misc_feature (34)..(185): NCBI GI NO: 19074286 NR Description: REPLICATION FACTOR A PROTEIN 2 (32KDA SUBUNIT)
SHRIDPPICAPASLFSAPPQVTGKMMPLSQTDFSPSQFTSSQNAAADSTTPSKMRGASSTMPLTVKQVVDAQQSGTGEKGAPFIVNGVEMANIRLVGMVNAKVERTTDVTFTLDDGTGRLDFIRWVNDASDSFETAAIQNGMYIAVIGSLKGLQERKRATAFSIRPITDFNEVTLHFIQCVRMHIENIELKAGSPARISSSMGVSFSNGFSESSTPTSLKSSPAPVTSGSSDTDLHTQVLNFFNEPANLESEHGVHVDEVLKRFKLLPKKQITDAIDYNMDSGRLYSTIDEFHYKAT

SEQ ID NO: 32493 - protein, 273 aa, Zea mays subsp. mays
  peptide (1)..(273): Ceres Seq. ID no. 12413437
  misc_feature (69)..(143): Pfam Name: Pfam Description:  OB-fold nucleic acid binding domain
  misc_feature (1)..(272): NCBI GI NO: 9801268 NR Description: replication protein A2 [Oryza sativa]
  misc_feature (1)..(272): NCBI GI NO: 13516746 NR Description: replication protein A 30kDa
  misc_feature (9)..(271): NCBI GI NO: 18400560 NR Description: putative replication protein A1
  misc_feature (9)..(273): NCBI GI NO: 18396383 NR Description: putative replication factor A
  misc_feature (9)..(273): NCBI GI NO: 6728969 NR Description: putative replication factor A
  misc_feature (9)..(165): NCBI GI NO: 25347925 NR Description: probable replication protein A1
  misc_feature (10)..(273): NCBI GI NO: 2498847 NR Description: REPLICATION PROTEIN A 32 KD SUBUNIT
  misc_feature (10)..(273): NCBI GI NO: 34871794 NR Description: p32-subunit of replication protein A
  misc_feature (10)..(161): NCBI GI NO: 19074286 NR Description: REPLICATION FACTOR A PROTEIN 2 (32KDA SUBUNIT)
MMPLSQTDFSPSQFTSSQNAAADSTTPSKMRGASSTMPLTVKQVVDAQQSGTGEKGAPFIVNGVEMANIRLVGMVNAKVERTTDVTFTLDDGTGRLDFIRWVNDASDSFETAAIQNGMYIAVIGSLKGLQERKRATAFSIRPITDFNEVTLHFIQCVRMHIENIELKAGSPARISSSMGVSFSNGFSESSTPTSLKSSPAPVTSGSSDTDLHTQVLNFFNEPANLESEHGVHVDEVLKRFKLLPKKQITDAIDYNMDSGRLYSTIDEFHYKAT

SEQ ID NO: 32494 - protein, 272 aa, Zea mays subsp. mays
  peptide (1)..(272): Ceres Seq. ID no. 12413438
  misc_feature (68)..(142): Pfam Name: Pfam Description:  OB-fold nucleic acid binding domain
  misc_feature (1)..(271): NCBI GI NO: 9801268 NR Description: replication protein A2 [Oryza sativa]
  misc_feature (1)..(271): NCBI GI NO: 13516746 NR Description: replication protein A 30kDa
  misc_feature (8)..(270): NCBI GI NO: 18400560 NR Description: putative replication protein A1
  misc_feature (8)..(272): NCBI GI NO: 18396383 NR Description: putative replication factor A
  misc_feature (8)..(272): NCBI GI NO: 6728969 NR Description: putative replication factor A
  misc_feature (8)..(164): NCBI GI NO: 25347925 NR Description: probable replication protein A1
  misc_feature (9)..(272): NCBI GI NO: 2498847 NR Description: REPLICATION PROTEIN A 32 KD SUBUNIT
  misc_feature (9)..(272): NCBI GI NO: 34871794 NR Description: p32-subunit of replication protein A
  misc_feature (9)..(160): NCBI GI NO: 19074286 NR Description: REPLICATION FACTOR A PROTEIN 2 (32KDA SUBUNIT)
MPLSQTDFSPSQFTSSQNAAADSTTPSKMRGASSTMPLTVKQVVDAQQSGTGEKGAPFIVNGVEMANIRLVGMVNAKVERTTDVTFTLDDGTGRLDFIRWVNDASDSFETAAIQNGMYIAVIGSLKGLQERKRATAFSIRPITDFNEVTLHFIQCVRMHIENIELKAGSPARISSSMGVSFSNGFSESSTPTSLKSSPAPVTSGSSDTDLHTQVLNFFNEPANLESEHGVHVDEVLKRFKLLPKKQITDAIDYNMDSGRLYSTIDEFHYKAT

SEQ ID NO: 32495 - DNA, 957 bp, Zea mays subsp. mays
  misc_feature (1)..(957): Ceres Seq. ID no. 12345627
aggagctgcccttcctcgtcttccacgctcgtcagtcatcagcatctcagcacccagagtcgacaaaattgaagaacatctagccggcgaaacatgagggggaagctcgacgagtgctgggacgagtgctgcgacaagtggggcgagtggaagtactgcctgctgtgcctcggcatcgtggtggccatcgtcctcatcgtggtgttcgtcgccgccttcggtttcgtgcgccacatcgacgtctccgtggacgacgcttcgctgacgcggttcgagctggcgacgtcgccggtgacgtcgctgtcgtacaacctgtccgtgaccctggtgatccgcaacccgaactgggccatgagcctcaagaacaccaagccgctggaggcgcagtacaagttcgacgaccagatgttcgaccgcttccagctggccgacaagggcgacaagcaccccgcccggcaagaccagagtgtaccacatcgcgcccccgggcacgacgagtagcgtcatgctcgggaacgccggcgaggccgagttccggaaggagaacgccacggggacgttccaggtggaggtggccgtcgacggggaggtgcgctacacggcgcgctacaccaagtgcaagatccaggcgtcgtgcccgctcaagctgcagctggcgccgccgggcaccgccgccgtcgtgttccagaaggtcacgtgcaagctcgccaaggcggagaagaactgttagatctagcttgcatagctggtggcatggcacacaagccttattgcattgcgttcgtgttgcgcggttttgtattcgtccatcggtggtggcgacgatttgattatgtttgttgacttttgttctgattgctgtgtgtggtgtgctcggttaatcaggatttctgctgtctgtacccgtgtgattgcaattttgcgcggaatgtgatctgtttcagctcagtttgtctg

SEQ ID NO: 32496 - protein, 135 aa, Zea mays subsp. mays
  peptide (1)..(135): Ceres Seq. ID no. 12345628
  misc_feature (7)..(120): NCBI GI NO: 34900810 NR Description: hypothetical protein~predicted by FGENESH etc.
  misc_feature (3)..(134): NCBI GI NO: 34900820 NR Description: hypothetical protein~predicted by FGENESH etc.
  misc_feature (6)..(135): NCBI GI NO: 34900798 NR Description: hypothetical protein~predicted by GENSCAN etc.
  misc_feature (8)..(124): NCBI GI NO: 40714669 NR Description: putative harpin inducing protein
MRGKLDECWDECCDKWGEWKYCLLCLGIVVAIVLIVVFVAAFGFVRHIDVSVDDASLTRFELATSPVTSLSYNLSVTLVIRNPNWAMSLKNTKPLEAQYKFDDQMFDRFQLADKGDKHPARQDQSVPHRAPGHDE

SEQ ID NO: 32497 - protein, 74 aa, Zea mays subsp. mays
  peptide (1)..(74): Ceres Seq. ID no. 12345629
  misc_feature (1)..(74): NCBI GI NO: 34900810 NR Description: hypothetical protein~predicted by FGENESH etc.
  misc_feature (1)..(74): NCBI GI NO: 34900820 NR Description: hypothetical protein~predicted by FGENESH etc.
  misc_feature (1)..(74): NCBI GI NO: 34900798 NR Description: hypothetical protein~predicted by GENSCAN etc.
  misc_feature (1)..(73): NCBI GI NO: 40714669 NR Description: putative harpin inducing protein
  misc_feature (1)..(73): NCBI GI NO: 40714673 NR Description: putative harpin inducing protein
MLGNAGEAEFRKENATGTFQVEVAVDGEVRYTARYTKCKIQASCPLKLQLAPPGTAAVVFQKVTCKLAKAEKNC

SEQ ID NO: 32498 - DNA, 1462 bp, Zea mays subsp. mays
  misc_feature (1)..(1462): Ceres Seq. ID no. 13579635
cccaacctcatcttctctccctttgctcggaacgcacacaccgcccggtctccgatctccgatccccgatcccctcgtcgatccaagatgcagatcttcgtcaagactctcactggaaagactatcaccctcgaggtggagtcctctgacaccattgacaacgtcaaggccaagatccaggacaaggaaggcattcccccggaccagcagcggctcatcttcgctggcaagcagctcgaggacgggcgcacacttgccgactacaacatccagaaggagagcaccctccaccttgttctccgcctcaggggaggcatgcagatcttcgtcaagaccctcactggaaagactatcaccctcgaggtggagtcttctgacaccatcgacaacgtcaaggccaagatccaggacaaggaggggattcctccggaccagcagcgcctgatctttgctggcaagcagctcgaggacgggcgcacgctggccgactacaacattcagaaggagagcaccctccacttggtgttgcgtctcaggggcggcatgcagatcttcgtgaagactctgactggcaagactatcacccttgaggtcgagtcttctgataccattgacaatgtcaaggccaagatccaggacaaggagggcatccctccggaccagcagcggctcatttttgccggcaagcagctcgaggacgggcgcacgcttgccgactacaacattcagaaggagagcaccctccacttggtgctgcgtctcaggggtggcatgcagatcttcgtgaagacacttactggcaagacgatcacccttgaggtggagtcctcggacaccatcgacaatgtcaaggccaagatccaggacaaggagggcattccaccggaccagcagcgcctgatctttgctggcaagcagctggaggatggccgtaccctcgccgactacaacatccagaaggagagcaccctccacctggtcgtccgcttgcgaggtggtatgcagatctttgtgaagaccttgactggcaagaccataaccctggaggttgagagctccgacaccatcgacaacgtgaaggcgaagatccaggacaaagagggcatccctccagaccagcagcgtctgatctttgccggcaagcagctggaggatggccgcaccctagcagactacaacatccagaaggagagcactctccacctggtgctccgcctccgcggtggtcagtaagccatggttcatttaagctgctgctgtacctgggtatctgcgtcgtctggtgccctctggtgtacctctatatggatgtcgtcgtctaataaacatctgtggtttgtgtgtcatgaatcgtggttgtggcttcgttggtttaatggacctgttgtgtcctctgtgttgtacccaaaactcttctgcagcagtatggcttgaatccttatgaagtttgatatttgaactt

SEQ ID NO: 32499 - protein, 410 aa, Zea mays subsp. mays
  peptide (1)..(410): Ceres Seq. ID no. 13579636
  misc_feature (30)..(103): Pfam Name: Pfam Description:  Ubiquitin family
  misc_feature (27)..(410): NCBI GI NO: 100934 NR Description: polyubiquitin - maize
  misc_feature (27)..(410): NCBI GI NO: 481477 NR Description: polyubiquitin 6 - rice
  misc_feature (30)..(410): NCBI GI NO: 899608 NR Description: polyubiquitin
  misc_feature (27)..(409): NCBI GI NO: 902584 NR Description: polyubiquitin containing 7 ubiquitin monomers
  misc_feature (27)..(410): NCBI GI NO: 902584 NR Description: polyubiquitin containing 7 ubiquitin monomers
  misc_feature (30)..(410): NCBI GI NO: 4809266 NR Description: polyubiquitin [Sporobolus stapfianus]
  misc_feature (27)..(409): NCBI GI NO: 100524 NR Description: polyubiquitin 6 - common sunflower
  misc_feature (27)..(409): NCBI GI NO: 16660462 NR Description: polyubiquitin OUB2 [Olea europaea]
  misc_feature (27)..(409): NCBI GI NO: 4115337 NR Description: ubiquitin [Pisum sativum]
  misc_feature (27)..(409): NCBI GI NO: 100934 NR Description: polyubiquitin - maize
PNLIFSPFARNAHTARSPISDPRSPRRSKMQIFVKTLTGKTITLEVESSDTIDNVKAKIQDKEGIPPDQQRLIFAGKQLEDGRTLADYNIQKESTLHLVLRLRGGMQIFVKTLTGKTITLEVESSDTIDNVKAKIQDKEGIPPDQQRLIFAGKQLEDGRTLADYNIQKESTLHLVLRLRGGMQIFVKTLTGKTITLEVESSDTIDNVKAKIQDKEGIPPDQQRLIFAGKQLEDGRTLADYNIQKESTLHLVLRLRGGMQIFVKTLTGKTITLEVESSDTIDNVKAKIQDKEGIPPDQQRLIFAGKQLEDGRTLADYNIQKESTLHLVVRLRGGMQIFVKTLTGKTITLEVESSDTIDNVKAKIQDKEGIPPDQQRLIFAGKQLEDGRTLADYNIQKESTLHLVLRLRGGQ

SEQ ID NO: 32500 - protein, 381 aa, Zea mays subsp. mays
  peptide (1)..(381): Ceres Seq. ID no. 13579637
  misc_feature (1)..(74): Pfam Name: Pfam Description:  Ubiquitin family
  misc_feature (1)..(381): NCBI GI NO: 100934 NR Description: polyubiquitin - maize
  misc_feature (1)..(381): NCBI GI NO: 481477 NR Description: polyubiquitin 6 - rice
  misc_feature (1)..(381): NCBI GI NO: 899608 NR Description: polyubiquitin
  misc_feature (1)..(380): NCBI GI NO: 902584 NR Description: polyubiquitin containing 7 ubiquitin monomers
  misc_feature (1)..(381): NCBI GI NO: 902584 NR Description: polyubiquitin containing 7 ubiquitin monomers
  misc_feature (1)..(381): NCBI GI NO: 4809266 NR Description: polyubiquitin [Sporobolus stapfianus]
  misc_feature (1)..(380): NCBI GI NO: 100524 NR Description: polyubiquitin 6 - common sunflower
  misc_feature (1)..(380): NCBI GI NO: 418854 NR Description: polyubiquitin 6 - parsley
  misc_feature (1)..(380): NCBI GI NO: 16660462 NR Description: polyubiquitin OUB2 [Olea europaea]
  misc_feature (1)..(380): NCBI GI NO: 4115337 NR Description: ubiquitin [Pisum sativum]
MQIFVKTLTGKTITLEVESSDTIDNVKAKIQDKEGIPPDQQRLIFAGKQLEDGRTLADYNIQKESTLHLVLRLRGGMQIFVKTLTGKTITLEVESSDTIDNVKAKIQDKEGIPPDQQRLIFAGKQLEDGRTLADYNIQKESTLHLVLRLRGGMQIFVKTLTGKTITLEVESSDTIDNVKAKIQDKEGIPPDQQRLIFAGKQLEDGRTLADYNIQKESTLHLVLRLRGGMQIFVKTLTGKTITLEVESSDTIDNVKAKIQDKEGIPPDQQRLIFAGKQLEDGRTLADYNIQKESTLHLVVRLRGGMQIFVKTLTGKTITLEVESSDTIDNVKAKIQDKEGIPPDQQRLIFAGKQLEDGRTLADYNIQKESTLHLVLRLRGGQ

SEQ ID NO: 32501 - protein, 305 aa, Zea mays subsp. mays
  peptide (1)..(305): Ceres Seq. ID no. 13579638
  misc_feature (1)..(74): Pfam Name: Pfam Description:  Ubiquitin family
  misc_feature (1)..(305): NCBI GI NO: 100934 NR Description: polyubiquitin - maize
  misc_feature (1)..(305): NCBI GI NO: 481477 NR Description: polyubiquitin 6 - rice
  misc_feature (1)..(305): NCBI GI NO: 899608 NR Description: polyubiquitin
  misc_feature (1)..(304): NCBI GI NO: 902584 NR Description: polyubiquitin containing 7 ubiquitin monomers
  misc_feature (1)..(305): NCBI GI NO: 902584 NR Description: polyubiquitin containing 7 ubiquitin monomers
  misc_feature (1)..(305): NCBI GI NO: 4809266 NR Description: polyubiquitin [Sporobolus stapfianus]
  misc_feature (1)..(304): NCBI GI NO: 100524 NR Description: polyubiquitin 6 - common sunflower
  misc_feature (1)..(304): NCBI GI NO: 16660462 NR Description: polyubiquitin OUB2 [Olea europaea]
  misc_feature (1)..(304): NCBI GI NO: 4115337 NR Description: ubiquitin [Pisum sativum]
  misc_feature (1)..(304): NCBI GI NO: 170352 NR Description: hexameric polyubiquitin
MQIFVKTLTGKTITLEVESSDTIDNVKAKIQDKEGIPPDQQRLIFAGKQLEDGRTLADYNIQKESTLHLVLRLRGGMQIFVKTLTGKTITLEVESSDTIDNVKAKIQDKEGIPPDQQRLIFAGKQLEDGRTLADYNIQKESTLHLVLRLRGGMQIFVKTLTGKTITLEVESSDTIDNVKAKIQDKEGIPPDQQRLIFAGKQLEDGRTLADYNIQKESTLHLVVRLRGGMQIFVKTLTGKTITLEVESSDTIDNVKAKIQDKEGIPPDQQRLIFAGKQLEDGRTLADYNIQKESTLHLVLRLRGGQ

SEQ ID NO: 32502 - DNA, 1984 bp, Zea mays subsp. mays
  misc_feature (1)..(1984): Ceres Seq. ID no. 12405663
agtccgtagccgcttgccctgttcgcatcttcgcgcgtggcgcacaccgctccagctctccttcgacgggcacggccgagccgccttcgtcttggccgcagcggtgcgcgctctccatggcgtcctaattagcctagccgcaacgccgcgcccgtgcctgcgaagtagggtgtaaagttttgtatatgatgccaggcatggatgaaccccttcttggcaatggtcttaagaccagcgggaaaagagagagcctggtagtggccgaggtcagaaaacagatgtaccttgctgggccactcatcgctgcatggatcctacagaacattgtccagatgatatctatcatgtttgtcggtcaccttggtgagcttgccctctccagtgcctccatcgccacctcctttgcaggcgttactggcttcagcttattgtctggcatggcgagcagcttggacacactgtgtgggcaatcgttcggggcaaagcagtactatcttcttggcatctacaagcagagggcaatccttgtgctcactctagtcagccttgtggttgcgattatttggtcatacactggacagatccttctactctttggtcaggatccagagattgcagctggggcagggagctatatccggtggatgattcctgcgctatttgtgtatggtccactacagtgccatgtccggtttctgcaaacgcagaacatagtcctcccagtgatgctgagctcaggtgccacagcactgaaccatctgctggtgtgctggctgctggtgtacaagattggtatgggcaacaagggtgctgccttggccaatgccatctcatactttaccaatgtatcaatcctggcaatttacgtcaggcttgcaccagcctgtagaaacacctggagagggttctcaaaggaggcttttcatgacataaccagcttcttgaggcttggtattccatctgcgctgatggtttgcttggagtggtggtcatttgagctcctggtacttctttctggacttctccccaatccaaagcttgagacatcggttttgtccatttccttaaacacaggctctttagcgtttatgatcccttttgggcttagcgcagccataagcacccgtgtttcaaatgaacttggtgctgggcgaccccatgctgcccatctggctacccgtgtggtcatggtgctggccatcgtggttggcgtattaatcggactagctatgattttggtgcgcaatatctgggggtatgcatacagtaatgagaaggaggtggtcaaatacatctccaaaatgatgccgatcctagccgtgtcattcttgttcgattgcgtgcagtgtgttctttcaggtgttgctaggggctgtggatggcaaaagattggggcttgtgttaatcttggtgcatactaccttataggaattccagctgccttctgtttcgcctttatgtaccatctaggtggaatgggactttggttgggaataatctgcgcactcgtcatacagatgctattgcttctcacaattaccttgtgcagcaactgggagaaagaagctttgaaggcaaaggacagagtatttagtacatccgtaccagctgacatgatgacatgatatttctgaagatatttttttgaaggaaatgcccatgaaactttgccaaggaacatactaagaattggttgttcagattcaaggcctttctccatgccatcagaatgatgcttgggtctagtaatagctcctgagcagtctgttttttacttttggtcaatactcaatacatggaagatgtttggtttgaagaaccacgccatcctagatgaggtggtatattataagttgatataacggctccatactagttattgaggaatgagacgatgattatctcatgtaataataatgcttttccccctctagttattgatgtaagacaattgaggcaaatgaacaaaatgtcacatttgatt

SEQ ID NO: 32503 - protein, 479 aa, Zea mays subsp. mays
  peptide (1)..(479): Ceres Seq. ID no. 12405664
  misc_feature (37)..(197): Pfam Name: Pfam Description:  MatE
  misc_feature (3)..(477): NCBI GI NO: 38346676 NR Description: OSJNBa0069D17.7
  misc_feature (5)..(460): NCBI GI NO: 22138480 NR Description: hypothetical protein
  misc_feature (11)..(474): NCBI GI NO: 37533148 NR Description: putative transmembrane protein
  misc_feature (5)..(474): NCBI GI NO: 37533146 NR Description: putative integral membrane protein
  misc_feature (18)..(476): NCBI GI NO: 15237158 NR Description: MATE efflux family protein, putative
  misc_feature (18)..(478): NCBI GI NO: 16797803 NR Description: hypothetical membrane protein-1
  misc_feature (8)..(460): NCBI GI NO: 15226290 NR Description: hypothetical protein; protein id: At2g34360.1
  misc_feature (1)..(471): NCBI GI NO: 15219524 NR Description: putative integral membrane protein
  misc_feature (1)..(471): NCBI GI NO: 21537267 NR Description: putative integral membrane protein
  misc_feature (27)..(468): NCBI GI NO: 15223961 NR Description: hypothetical protein; protein id: At1g71140.1
MMPGMDEPLLGNGLKTSGKRESLVVAEVRKQMYLAGPLIAAWILQNIVQMISIMFVGHLGELALSSASIATSFAGVTGFSLLSGMASSLDTLCGQSFGAKQYYLLGIYKQRAILVLTLVSLVVAIIWSYTGQILLLFGQDPEIAAGAGSYIRWMIPALFVYGPLQCHVRFLQTQNIVLPVMLSSGATALNHLLVCWLLVYKIGMGNKGAALANAISYFTNVSILAIYVRLAPACRNTWRGFSKEAFHDITSFLRLGIPSALMVCLEWWSFELLVLLSGLLPNPKLETSVLSISLNTGSLAFMIPFGLSAAISTRVSNELGAGRPHAAHLATRVVMVLAIVVGVLIGLAMILVRNIWGYAYSNEKEVVKYISKMMPILAVSFLFDCVQCVLSGVARGCGWQKIGACVNLGAYYLIGIPAAFCFAFMYHLGGMGLWLGIICALVIQMLLLLTITLCSNWEKEALKAKDRVFSTSVPADMMT

SEQ ID NO: 32504 - protein, 478 aa, Zea mays subsp. mays
  peptide (1)..(478): Ceres Seq. ID no. 12405665
  misc_feature (36)..(196): Pfam Name: Pfam Description:  MatE
  misc_feature (2)..(476): NCBI GI NO: 38346676 NR Description: OSJNBa0069D17.7
  misc_feature (4)..(459): NCBI GI NO: 22138480 NR Description: hypothetical protein
  misc_feature (10)..(473): NCBI GI NO: 37533148 NR Description: putative transmembrane protein
  misc_feature (4)..(473): NCBI GI NO: 37533146 NR Description: putative integral membrane protein
  misc_feature (17)..(475): NCBI GI NO: 15237158 NR Description: MATE efflux family protein, putative
  misc_feature (17)..(477): NCBI GI NO: 16797803 NR Description: hypothetical membrane protein-1
  misc_feature (7)..(459): NCBI GI NO: 15226290 NR Description: hypothetical protein; protein id: At2g34360.1
  misc_feature (1)..(470): NCBI GI NO: 15219524 NR Description: putative integral membrane protein
  misc_feature (1)..(470): NCBI GI NO: 21537267 NR Description: putative integral membrane protein
  misc_feature (26)..(467): NCBI GI NO: 15223961 NR Description: hypothetical protein; protein id: At1g71140.1
MPGMDEPLLGNGLKTSGKRESLVVAEVRKQMYLAGPLIAAWILQNIVQMISIMFVGHLGELALSSASIATSFAGVTGFSLLSGMASSLDTLCGQSFGAKQYYLLGIYKQRAILVLTLVSLVVAIIWSYTGQILLLFGQDPEIAAGAGSYIRWMIPALFVYGPLQCHVRFLQTQNIVLPVMLSSGATALNHLLVCWLLVYKIGMGNKGAALANAISYFTNVSILAIYVRLAPACRNTWRGFSKEAFHDITSFLRLGIPSALMVCLEWWSFELLVLLSGLLPNPKLETSVLSISLNTGSLAFMIPFGLSAAISTRVSNELGAGRPHAAHLATRVVMVLAIVVGVLIGLAMILVRNIWGYAYSNEKEVVKYISKMMPILAVSFLFDCVQCVLSGVARGCGWQKIGACVNLGAYYLIGIPAAFCFAFMYHLGGMGLWLGIICALVIQMLLLLTITLCSNWEKEALKAKDRVFSTSVPADMMT

SEQ ID NO: 32505 - protein, 475 aa, Zea mays subsp. mays
  peptide (1)..(475): Ceres Seq. ID no. 12405666
  misc_feature (33)..(193): Pfam Name: Pfam Description:  MatE
  misc_feature (1)..(473): NCBI GI NO: 38346676 NR Description: OSJNBa0069D17.7
  misc_feature (1)..(456): NCBI GI NO: 22138480 NR Description: hypothetical protein
  misc_feature (7)..(470): NCBI GI NO: 37533148 NR Description: putative transmembrane protein
  misc_feature (1)..(470): NCBI GI NO: 37533146 NR Description: putative integral membrane protein
  misc_feature (14)..(472): NCBI GI NO: 15237158 NR Description: MATE efflux family protein, putative
  misc_feature (14)..(474): NCBI GI NO: 16797803 NR Description: hypothetical membrane protein-1
  misc_feature (4)..(456): NCBI GI NO: 15226290 NR Description: hypothetical protein; protein id: At2g34360.1
  misc_feature (1)..(467): NCBI GI NO: 15219524 NR Description: putative integral membrane protein
  misc_feature (1)..(467): NCBI GI NO: 21537267 NR Description: putative integral membrane protein
  misc_feature (23)..(464): NCBI GI NO: 15223961 NR Description: hypothetical protein; protein id: At1g71140.1
MDEPLLGNGLKTSGKRESLVVAEVRKQMYLAGPLIAAWILQNIVQMISIMFVGHLGELALSSASIATSFAGVTGFSLLSGMASSLDTLCGQSFGAKQYYLLGIYKQRAILVLTLVSLVVAIIWSYTGQILLLFGQDPEIAAGAGSYIRWMIPALFVYGPLQCHVRFLQTQNIVLPVMLSSGATALNHLLVCWLLVYKIGMGNKGAALANAISYFTNVSILAIYVRLAPACRNTWRGFSKEAFHDITSFLRLGIPSALMVCLEWWSFELLVLLSGLLPNPKLETSVLSISLNTGSLAFMIPFGLSAAISTRVSNELGAGRPHAAHLATRVVMVLAIVVGVLIGLAMILVRNIWGYAYSNEKEVVKYISKMMPILAVSFLFDCVQCVLSGVARGCGWQKIGACVNLGAYYLIGIPAAFCFAFMYHLGGMGLWLGIICALVIQMLLLLTITLCSNWEKEALKAKDRVFSTSVPADMMT

SEQ ID NO: 32506 - DNA, 1867 bp, Zea mays subsp. mays; identical to SEQ ID NO: 27254
  misc_feature (1)..(1867): Ceres Seq. ID no. 12595058

SEQ ID NO: 32507 - protein, 245 aa, Zea mays subsp. mays; identical to SEQ ID NO: 27255
  peptide (1)..(245): Ceres Seq. ID no. 12595059
  misc_feature (78)..(211): NCBI GI NO: 34910020 NR Description: putative purple acid phosphatase
  misc_feature (92)..(211): NCBI GI NO: 11262827 NR Description: acid phosphatase (EC 3.1.3.2) purple 1, precursor
  misc_feature (73)..(211): NCBI GI NO: 27597229 NR Description: purple acid phosphatase [Nicotiana tabacum]
  misc_feature (92)..(211): NCBI GI NO: 11262828 NR Description: acid phosphatase (EC 3.1.3.2) purple 2, precursor
  misc_feature (95)..(211): NCBI GI NO: 15227205 NR Description: putative purple acid phosphatase precursor
  misc_feature (108)..(211): NCBI GI NO: 11262830 NR Description: acid phosphatase (EC 3
  misc_feature (92)..(211): NCBI GI NO: 25752260 NR Description: acid phosphatase (EC 3.1.3.2) purple, precursor
  misc_feature (84)..(210): NCBI GI NO: 7209894 NR Description: purple acid phosphatase [Spirodela punctata]
  misc_feature (77)..(211): NCBI GI NO: 27597239 NR Description: purple acid phosphatase [Nicotiana tabacum]
  misc_feature (122)..(211): NCBI GI NO: 4210712 NR Description: purple acid phosphatase [Ipomoea batatas]

SEQ ID NO: 32508 - protein, 227 aa, Zea mays subsp. mays; identical to SEQ ID NO: 27256
  peptide (1)..(227): Ceres Seq. ID no. 12595060
  misc_feature (1)..(115): NCBI GI NO: 34910020 NR Description: putative purple acid phosphatase
  misc_feature (1)..(115): NCBI GI NO: 11262827 NR Description: acid phosphatase (EC 3.1.3.2) purple 1, precursor
  misc_feature (1)..(115): NCBI GI NO: 27597229 NR Description: purple acid phosphatase [Nicotiana tabacum]
  misc_feature (1)..(115): NCBI GI NO: 11262828 NR Description: acid phosphatase (EC 3.1.3.2) purple 2, precursor
  misc_feature (1)..(115): NCBI GI NO: 15227205 NR Description: putative purple acid phosphatase precursor
  misc_feature (1)..(115): NCBI GI NO: 11262830 NR Description: acid phosphatase (EC 3
  misc_feature (1)..(115): NCBI GI NO: 25752260 NR Description: acid phosphatase (EC 3.1.3.2) purple, precursor
  misc_feature (1)..(115): NCBI GI NO: 7209894 NR Description: purple acid phosphatase [Spirodela punctata]
  misc_feature (1)..(115): NCBI GI NO: 27597239 NR Description: purple acid phosphatase [Nicotiana tabacum]
  misc_feature (1)..(115): NCBI GI NO: 4210712 NR Description: purple acid phosphatase [Ipomoea batatas]

SEQ ID NO: 32509 - protein, 214 aa, Zea mays subsp. mays; identical to SEQ ID NO: 27257
  peptide (1)..(214): Ceres Seq. ID no. 12595061
  misc_feature (1)..(102): NCBI GI NO: 34910020 NR Description: putative purple acid phosphatase
  misc_feature (1)..(102): NCBI GI NO: 11262827 NR Description: acid phosphatase (EC 3.1.3.2) purple 1, precursor
  misc_feature (1)..(102): NCBI GI NO: 27597229 NR Description: purple acid phosphatase [Nicotiana tabacum]
  misc_feature (1)..(102): NCBI GI NO: 11262828 NR Description: acid phosphatase (EC 3.1.3.2) purple 2, precursor
  misc_feature (1)..(102): NCBI GI NO: 15227205 NR Description: putative purple acid phosphatase precursor
  misc_feature (1)..(102): NCBI GI NO: 11262830 NR Description: acid phosphatase (EC 3
  misc_feature (1)..(102): NCBI GI NO: 25752260 NR Description: acid phosphatase (EC 3.1.3.2) purple, precursor
  misc_feature (1)..(102): NCBI GI NO: 7209894 NR Description: purple acid phosphatase [Spirodela punctata]
  misc_feature (1)..(102): NCBI GI NO: 27597239 NR Description: purple acid phosphatase [Nicotiana tabacum]
  misc_feature (1)..(102): NCBI GI NO: 4210712 NR Description: purple acid phosphatase [Ipomoea batatas]

SEQ ID NO: 32510 - protein, 173 aa, Zea mays subsp. mays; identical to SEQ ID NO: 27258
  peptide (1)..(173): Ceres Seq. ID no. 12595062
  misc_feature (6)..(139): NCBI GI NO: 34910020 NR Description: putative purple acid phosphatase
  misc_feature (20)..(139): NCBI GI NO: 11262827 NR Description: acid phosphatase (EC 3.1.3.2) purple 1, precursor
  misc_feature (1)..(139): NCBI GI NO: 27597229 NR Description: purple acid phosphatase [Nicotiana tabacum]
  misc_feature (20)..(139): NCBI GI NO: 11262828 NR Description: acid phosphatase (EC 3.1.3.2) purple 2, precursor
  misc_feature (23)..(139): NCBI GI NO: 15227205 NR Description: putative purple acid phosphatase precursor
  misc_feature (36)..(139): NCBI GI NO: 11262830 NR Description: acid phosphatase (EC 3
  misc_feature (20)..(139): NCBI GI NO: 25752260 NR Description: acid phosphatase (EC 3.1.3.2) purple, precursor
  misc_feature (12)..(138): NCBI GI NO: 7209894 NR Description: purple acid phosphatase [Spirodela punctata]
  misc_feature (5)..(139): NCBI GI NO: 27597239 NR Description: purple acid phosphatase [Nicotiana tabacum]
  misc_feature (50)..(139): NCBI GI NO: 4210712 NR Description: purple acid phosphatase [Ipomoea batatas]

SEQ ID NO: 32511 - DNA, 1711 bp, Zea mays subsp. mays
  misc_feature (1)..(1711): Ceres Seq. ID no. 12361402
aactaaccagctccggcccaaacacagccacgagcacctacacccccccgctgtcacctctccttccatcgccacaggcggcccttctccgcggaagccggcgggccgccgcctcccttacccctctcgctgtgctcctccgcaccgtcattccctagcattccccacgggcgaggtaaagaaacattctcccaccccctccagccccataggtgccaccgggatttctcttgcggttgcttggcccagatctgcggcgcattcggcgtttctgatctcgcgtgcacctcgtttccctcggcggtggatcagtggcggcttggtcgagatgggcgatgcggttgatgacatcatctgtgcaacggatgcggcggtcgccgtcgaggatgcggccagtgggaagcccgcaatgctctctagcttaggggggcagggtgaggaagagcatgaggagaaggacaatgaggacaagtcaggcgagagcgaggtgatcaacccgccagaagacgctggcggggaggccacctcacccctggaagggttgaagcctcgcctttccaaggggaatcaaagccatggacctaatgctgtcaaatcaaagagcccaacgagtggagacgaaggtcagacgaggaaaaaggctcccaattcttctcttcctaaggcacccattgtccaggtgtcccatggtgacgctggtgtcggcagtaataaagatggcaagaatgagtctcgctcatcttccgtggatgcaacattgctggatgactccaaggagaaaaggaaaactcaaaagccattagcacagctcttttccatcaaaagtgacgaagaacagtcaaatggtgagagtgcaaagcctcgaaaagttggcagcattccatcatatggtttcaccttcaagtgtgatgagagatctgaaaaaagaagagagttctattcgaagcttgaggagaagattcatgcaagagagttagaaataagcaatttgcaagcgaaatcaaaggaaactgaagaagcagaactcaaaatgctgagaaagagtttgaacttcaaggcaacaccaatgccaagcttctataaggaaccaactcctgtcaaggttgaattgaaaaagatccccccaacaagagccaaatcgccaaagtttggtcgttctaaaaacaagtccacaccagagactgaagaaaatgctaccgcggaccagcctgcccacctgagcctcgaggagaatgtttctcaaaccggtgtgaaaaaaccaaccccgttgaatccagcaaagaagccccagaggaagtcactccccagactgccatctgaagaaaccggtccgcttgatgccacctcaaggcaacttataaagagcgccaagctggatgcagttagtgctccggagacaggatcagctacaggacaggcacaactacaaggaagtcagacggaaacagattctggtcaggggccagttgaagctggagctaatcctgatgaacaagacgccagcgaacagagtgttgtttagtgaagatcacgatgaccaaaccagctgatttgtgatgtgcatggtgttcctcggctttgtataatattgtgcttgcctgctagagtaacctgtagtctgtattatgttatgtgatatatactactactcctggtttattttcctggaattgagccgtatgttgcttatcaatctagatagcttttgttc

SEQ ID NO: 32512 - protein, 506 aa, Zea mays subsp. mays
  peptide (1)..(506): Ceres Seq. ID no. 12361403
  misc_feature (111)..(502): NCBI GI NO: 18417986 NR Description: putative protein; protein id: At4g32330
  misc_feature (115)..(504): NCBI GI NO: 15224733 NR Description: unknown protein; protein id: At2g25480.1
  misc_feature (157)..(434): NCBI GI NO: 18403980 NR Description: expressed protein; protein id: At2g35880
  misc_feature (230)..(434): NCBI GI NO: 25408425 NR Description: hypothetical protein At2g35880
  misc_feature (122)..(372): NCBI GI NO: 7485356 NR Description: hypothetical protein F10M6
  misc_feature (122)..(372): NCBI GI NO: 7486636 NR Description: hypothetical protein F8B4
  misc_feature (96)..(435): NCBI GI NO: 34897180 NR Description: unknown protein
  misc_feature (145)..(389): NCBI GI NO: 9294199 NR Description: gb|AAF04893
  misc_feature (145)..(389): NCBI GI NO: 15228950 NR Description: unknown protein; protein id: At3g23090.1
  misc_feature (264)..(389): NCBI GI NO: 32395575 NR Description: seed specific protein Bn15D14A [Brassica napus]
TNQLRPKHSHEHLHPPAVTSPSIATGGPSPRKPAGRRLPYPSRCAPPHRHSLAFPTGEVKKHSPTPSSPIGATGISLAVAWPRSAAHSAFLISRAPRFPRRWISGGLVEMGDAVDDIICATDAAVAVEDAASGKPAMLSSLGGQGEEEHEEKDNEDKSGESEVINPPEDAGGEATSPLEGLKPRLSKGNQSHGPNAVKSKSPTSGDEGQTRKKAPNSSLPKAPIVQVSHGDAGVGSNKDGKNESRSSSVDATLLDDSKEKRKTQKPLAQLFSIKSDEEQSNGESAKPRKVGSIPSYGFTFKCDERSEKRREFYSKLEEKIHARELEISNLQAKSKETEEAELKMLRKSLNFKATPMPSFYKEPTPVKVELKKIPPTRAKSPKFGRSKNKSTPETEENATADQPAHLSLEENVSQTGVKKPTPLNPAKKPQRKSLPRLPSEETGPLDATSRQLIKSAKLDAVSAPETGSATGQAQLQGSQTETDSGQGPVEAGANPDEQDASEQSVV

SEQ ID NO: 32513 - protein, 397 aa, Zea mays subsp. mays
  peptide (1)..(397): Ceres Seq. ID no. 12361404
  misc_feature (2)..(393): NCBI GI NO: 18417986 NR Description: putative protein; protein id: At4g32330
  misc_feature (6)..(395): NCBI GI NO: 15224733 NR Description: unknown protein; protein id: At2g25480.1
  misc_feature (48)..(325): NCBI GI NO: 18403980 NR Description: expressed protein; protein id: At2g35880
  misc_feature (121)..(325): NCBI GI NO: 25408425 NR Description: hypothetical protein At2g35880
  misc_feature (13)..(263): NCBI GI NO: 7485356 NR Description: hypothetical protein F10M6
  misc_feature (13)..(263): NCBI GI NO: 7486636 NR Description: hypothetical protein F8B4
  misc_feature (1)..(326): NCBI GI NO: 34897180 NR Description: unknown protein
  misc_feature (36)..(280): NCBI GI NO: 9294199 NR Description: gb|AAF04893
  misc_feature (36)..(280): NCBI GI NO: 15228950 NR Description: unknown protein; protein id: At3g23090.1
  misc_feature (155)..(280): NCBI GI NO: 32395575 NR Description: seed specific protein Bn15D14A [Brassica napus]
MGDAVDDIICATDAAVAVEDAASGKPAMLSSLGGQGEEEHEEKDNEDKSGESEVINPPEDAGGEATSPLEGLKPRLSKGNQSHGPNAVKSKSPTSGDEGQTRKKAPNSSLPKAPIVQVSHGDAGVGSNKDGKNESRSSSVDATLLDDSKEKRKTQKPLAQLFSIKSDEEQSNGESAKPRKVGSIPSYGFTFKCDERSEKRREFYSKLEEKIHARELEISNLQAKSKETEEAELKMLRKSLNFKATPMPSFYKEPTPVKVELKKIPPTRAKSPKFGRSKNKSTPETEENATADQPAHLSLEENVSQTGVKKPTPLNPAKKPQRKSLPRLPSEETGPLDATSRQLIKSAKLDAVSAPETGSATGQAQLQGSQTETDSGQGPVEAGANPDEQDASEQSVV

SEQ ID NO: 32514 - protein, 370 aa, Zea mays subsp. mays
  peptide (1)..(370): Ceres Seq. ID no. 12361405
  misc_feature (1)..(366): NCBI GI NO: 18417986 NR Description: putative protein; protein id: At4g32330
  misc_feature (1)..(368): NCBI GI NO: 15224733 NR Description: unknown protein; protein id: At2g25480.1
  misc_feature (21)..(298): NCBI GI NO: 18403980 NR Description: expressed protein; protein id: At2g35880
  misc_feature (94)..(298): NCBI GI NO: 25408425 NR Description: hypothetical protein At2g35880
  misc_feature (1)..(236): NCBI GI NO: 7485356 NR Description: hypothetical protein F10M6
  misc_feature (1)..(236): NCBI GI NO: 7486636 NR Description: hypothetical protein F8B4
  misc_feature (1)..(299): NCBI GI NO: 34897180 NR Description: unknown protein
  misc_feature (9)..(253): NCBI GI NO: 9294199 NR Description: gb|AAF04893
  misc_feature (9)..(253): NCBI GI NO: 15228950 NR Description: unknown protein; protein id: At3g23090.1
  misc_feature (128)..(253): NCBI GI NO: 32395575 NR Description: seed specific protein Bn15D14A [Brassica napus]
MLSSLGGQGEEEHEEKDNEDKSGESEVINPPEDAGGEATSPLEGLKPRLSKGNQSHGPNAVKSKSPTSGDEGQTRKKAPNSSLPKAPIVQVSHGDAGVGSNKDGKNESRSSSVDATLLDDSKEKRKTQKPLAQLFSIKSDEEQSNGESAKPRKVGSIPSYGFTFKCDERSEKRREFYSKLEEKIHARELEISNLQAKSKETEEAELKMLRKSLNFKATPMPSFYKEPTPVKVELKKIPPTRAKSPKFGRSKNKSTPETEENATADQPAHLSLEENVSQTGVKKPTPLNPAKKPQRKSLPRLPSEETGPLDATSRQLIKSAKLDAVSAPETGSATGQAQLQGSQTETDSGQGPVEAGANPDEQDASEQSVV

SEQ ID NO: 32515 - DNA, 1185 bp, Zea mays subsp. mays
  misc_feature (1)..(1185): Ceres Seq. ID no. 12412074
aattaggcccgcaaacaacaccgctagccatgtggcgccgcgcctcccacctcctcatccgcaccgccgccgccgccgccgccccgacccgccgcctcccacttcctcacccgccgctacccatcgccccaagagtggcctccgcatcctcatcctatgccacagcggtcgcggcgagggcaccgcggacggtagggaccctgctgcggctcaacgacctgtgtgacaacccgggcgcgcggaagcagaagacgcgcaagggacgcgggatcggctccggcaaggggaagacggcgggacgcgggccacaaggggcagaaagcgcgaggcaccgctaggttcggcttcgagggtggccagaccctgctccgccgccgcctgccccgccgtggattcaagaaccccttctcactcacatttcagccctgtggactggggaaaattgcaaaactcataaatgctgggaaaattgattcctctgaattgattaccatgaagacactaaaggaaacaggtgccattgggaagcaaataaaagattgaattcgtttaatgggccgtggagcagaagaaatcaaatggcctattcaccttgaggtgtcaagggcaactgcaagggccaaagctgccgtggaagctgctggtgggacagtaaggctggtgtactacaacaaacttggattccgggcactcctgaaacctgagtggtttgagaagaagggccgcctgttaccaaaagcagcaaggcctccacccaagcagcgagataaggtcgatagcattggccgcctgcccgcgccgacaaagccactccccttcacggtagaggagctggagtttgcagcccagcgtgaggctgcccgcgtgactgcataagatgggagcacgttggcagcacctttttttctgaaagcatgcgccactggatgtgtatcacattagctttagcaggacatgcataagaatggaccgttttgtcttttttttttcttttccctcaaggaatggactgttataaattaaatatccattcattggaatcagatgttgctgtaatttctgaacttaccttggggttttgattgataaatgccattttttctgaataggctcatgtatgatgtcattttacctgccaccttttgatcctgtaatgacaattgagaaatgccgtttatttctgtg

SEQ ID NO: 32516 - protein, 111 aa, Zea mays subsp. mays
  peptide (1)..(111): Ceres Seq. ID no. 12412075
  misc_feature (10)..(109): NCBI GI NO: 34015188 NR Description: putative ribosomal protein L15
  misc_feature (70)..(104): NCBI GI NO: 40747057 NR Description: hypothetical protein AN1095.2
  misc_feature (68)..(107): NCBI GI NO: 22966103 NR Description: hypothetical protein [Rhodospirillum rubrum]
  misc_feature (68)..(111): NCBI GI NO: 27380492 NR Description: 50S ribosomal protein L15
  misc_feature (68)..(111): NCBI GI NO: 22965142 NR Description: hypothetical protein [Rhodopseudomonas palustris]
  misc_feature (38)..(109): NCBI GI NO: 15237756 NR Description: putative protein; protein id: At5g64670
LGPQTTPLAMWRRASHLLIRTAAAAAAPTRRLPLPHPPLPIAPRVASASSSYATAVAARAPRTVGTLLRLNDLCDNPGARKQKTRKGRGIGSGKGKTAGRGPQGAESARHR

SEQ ID NO: 32517 - protein, 107 aa, Zea mays subsp. mays
  peptide (1)..(107): Ceres Seq. ID no. 12412076
  misc_feature (1)..(107): NCBI GI NO: 34015188 NR Description: putative ribosomal protein L15
  misc_feature (1)..(93): NCBI GI NO: 15237756 NR Description: putative protein; protein id: At5g64670
  misc_feature (1)..(72): NCBI GI NO: 6324045 NR Description: Mitochondrial ribosomal protein MRPL10
  misc_feature (1)..(34): NCBI GI NO: 23014069 NR Description: hypothetical protein
  misc_feature (1)..(37): NCBI GI NO: 27380492 NR Description: 50S ribosomal protein L15
  misc_feature (1)..(37): NCBI GI NO: 22965142 NR Description: hypothetical protein [Rhodopseudomonas palustris]
  misc_feature (1)..(34): NCBI GI NO: 22966103 NR Description: hypothetical protein [Rhodospirillum rubrum]
  misc_feature (1)..(97): NCBI GI NO: 12846164 NR Description: unnamed protein product [Mus musculus]
  misc_feature (1)..(97): NCBI GI NO: 12833990 NR Description: unnamed protein product [Mus musculus]
  misc_feature (1)..(97): NCBI GI NO: 34866074 NR Description: similar to mitochondrial ribosomal protein L15
MGRGAEEIKWPIHLEVSRATARAKAAVEAAGGTVRLVYYNKLGFRALLKPEWFEKKGRLLPKAARPPPKQRDKVDSIGRLPAPTKPLPFTVEELEFAAQREAARVTA

SEQ ID NO: 32518 - protein, 102 aa, Zea mays subsp. mays
  peptide (1)..(102): Ceres Seq. ID no. 12412077
  misc_feature (1)..(100): NCBI GI NO: 34015188 NR Description: putative ribosomal protein L15
  misc_feature (61)..(95): NCBI GI NO: 40747057 NR Description: hypothetical protein AN1095.2
  misc_feature (59)..(98): NCBI GI NO: 22966103 NR Description: hypothetical protein [Rhodospirillum rubrum]
  misc_feature (59)..(102): NCBI GI NO: 27380492 NR Description: 50S ribosomal protein L15
  misc_feature (59)..(102): NCBI GI NO: 22965142 NR Description: hypothetical protein [Rhodopseudomonas palustris]
  misc_feature (29)..(100): NCBI GI NO: 15237756 NR Description: putative protein; protein id: At5g64670
MWRRASHLLIRTAAAAAAPTRRLPLPHPPLPIAPRVASASSSYATAVAARAPRTVGTLLRLNDLCDNPGARKQKTRKGRGIGSGKGKTAGRGPQGAESARHR

SEQ ID NO: 32519 - DNA, 1606 bp, Zea mays subsp. mays
  misc_feature (1)..(1606): Ceres Seq. ID no. 12340958
attcggatcgtgccgctgccgctcttcccttctcgtctagtcttgtttttctttcctcctctgttactccacctacagacctactactgccatcgggagggtaagctcttcggagccggagccgggtccacgttaacgccatcgagcgctgcgatgggcagcttaggagggagcgccggtgctggggacggcggcaaggtcgggctgccggcgcttgacgtgacgctcgcgttcccgcaggccacgccctcatcgctcttcccgccagccgtttcggactactaccaatttgatgatttgctgactgatgaagagaaggcactcaggaagaaggtccgaggtatcatggaaaaggaaattgcgcccattatgactgagtactgggagaaggctgaattcccattccatgccattcccagccttgccagtcttggtttagctggtggtacaataaaggggtatgggtgccctggactctcgcttacagctagtgctatttcgatagcagaagttgcacgggtcgatgcgagctgctccacatttattctagtgcactcctcgttggctatgtccacaattgccctttgtggatctgaggctcaaaagcagaaatacttaccatctcttacccagttcaaaactattggttgctgggcattgacagagccagattatggaagtgatgcaagctccctaaggactgcagcaaccaaggtacctggtggttggcatttagatggacaaaaacgctggataggtaacagcacttttgcagatgtcctcatcattttggctaggaatgcagatacaaaccaactaaatggatttattgtaaagaaaggagctcccggtctaaaagccacaaaaattgaaaataaaattggactcagaatggttcaaaatggagacataattctaaataaagtatttgtccctgaggaagacagattaacaggcatcaattcatttcaggatataaacaaggtcctcgctatgtctcgaattatggtggcatggcaaccaataggcatatcaatgggagtttatgacatctgccatcggtatttgaaagaaagaaagcaatttggagctccactggcagcttttcagctcaatcaagaaaagcttgtccgcatgcttggcaacattcaggctatgcttctcgttggatggcgactgtgcaagctgtatgagtcaggcaaaatgacaccaggccggtctagtttaggcaaggcatggacgtccaagaaggccagggaggtggtttctcttgggcgagagctactgggtggcaatggcattttggttgattttcttgtcgccaaggcattttgtgacgtggagcccattttctcgtacgagggcacctatgacattaatagcctggtggctggcagagagatcaccgggatcgcgagcttcaagcctgctgtgtcagcaaaatcacgcctgtgaaagttgtttttttctttgttccccaatgaagacagtagaaatcaaccttatacattcagatgattgggaataagaacggtaggaaagctgtaaaactcgacgtgcttcctcgtatgtactgttctgtttcaaattattcgacgttttgtcg

SEQ ID NO: 32520 - protein, 484 aa, Zea mays subsp. mays
  peptide (1)..(484): Ceres Seq. ID no. 12340959
  misc_feature (219)..(317): Pfam Name: Pfam Description:  Acyl-CoA dehydrogenase, middle domain
  misc_feature (55)..(484): NCBI GI NO: 34896018 NR Description: ESTs AU056822
  misc_feature (69)..(484): NCBI GI NO: 15231059 NR Description: acyl-coA dehydrogenase; protein id: At3g51840
  misc_feature (105)..(474): NCBI GI NO: 31195739 NR Description: ENSANGP00000000259 [Anopheles gambiae]
  misc_feature (89)..(483): NCBI GI NO: 28829336 NR Description: similar to Arabidopsis thaliana (Mouse-ear cress)
  misc_feature (74)..(474): NCBI GI NO: 29827888 NR Description: putative glutaryl-CoA dehydrogenase
  misc_feature (92)..(474): NCBI GI NO: 29827260 NR Description: putative glutaryl-CoA dehydrogenase
  misc_feature (92)..(474): NCBI GI NO: 25026880 NR Description: putative acyl-CoA dehydrogenase
  misc_feature (86)..(474): NCBI GI NO: 15805578 NR Description: glutaryl-CoA dehydrogenase, putative
  misc_feature (76)..(474): NCBI GI NO: 25027279 NR Description: putative glutaryl-CoA dehydrogenase precursor
  misc_feature (93)..(475): NCBI GI NO: 11498596 NR Description: glutaryl-CoA dehydrogenase (gcdH)
IRIVPLPLFPSRLVLFFFPPLLLHLQTYYCHREGKLFGAGAGSTLTPSSAAMGSLGGSAGAGDGGKVGLPALDVTLAFPQATPSSLFPPAVSDYYQFDDLLTDEEKALRKKVRGIMEKEIAPIMTEYWEKAEFPFHAIPSLASLGLAGGTIKGYGCPGLSLTASAISIAEVARVDASCSTFILVHSSLAMSTIALCGSEAQKQKYLPSLTQFKTIGCWALTEPDYGSDASSLRTAATKVPGGWHLDGQKRWIGNSTFADVLIILARNADTNQLNGFIVKKGAPGLKATKIENKIGLRMVQNGDIILNKVFVPEEDRLTGINSFQDINKVLAMSRIMVAWQPIGISMGVYDICHRYLKERKQFGAPLAAFQLNQEKLVRMLGNIQAMLLVGWRLCKLYESGKMTPGRSSLGKAWTSKKAREVVSLGRELLGGNGILVDFLVAKAFCDVEPIFSYEGTYDINSLVAGREITGIASFKPAVSAKSRL

SEQ ID NO: 32521 - protein, 433 aa, Zea mays subsp. mays
  peptide (1)..(433): Ceres Seq. ID no. 12340960
  misc_feature (168)..(266): Pfam Name: Pfam Description:  Acyl-CoA dehydrogenase, middle domain
  misc_feature (4)..(433): NCBI GI NO: 34896018 NR Description: ESTs AU056822
  misc_feature (18)..(433): NCBI GI NO: 15231059 NR Description: acyl-coA dehydrogenase; protein id: At3g51840
  misc_feature (54)..(423): NCBI GI NO: 31195739 NR Description: ENSANGP00000000259 [Anopheles gambiae]
  misc_feature (38)..(432): NCBI GI NO: 28829336 NR Description: similar to Arabidopsis thaliana (Mouse-ear cress)
  misc_feature (23)..(423): NCBI GI NO: 29827888 NR Description: putative glutaryl-CoA dehydrogenase
  misc_feature (41)..(423): NCBI GI NO: 29827260 NR Description: putative glutaryl-CoA dehydrogenase
  misc_feature (41)..(423): NCBI GI NO: 25026880 NR Description: putative acyl-CoA dehydrogenase
  misc_feature (35)..(423): NCBI GI NO: 15805578 NR Description: glutaryl-CoA dehydrogenase, putative
  misc_feature (25)..(423): NCBI GI NO: 25027279 NR Description: putative glutaryl-CoA dehydrogenase precursor
  misc_feature (42)..(424): NCBI GI NO: 11498596 NR Description: glutaryl-CoA dehydrogenase (gcdH)
MGSLGGSAGAGDGGKVGLPALDVTLAFPQATPSSLFPPAVSDYYQFDDLLTDEEKALRKKVRGIMEKEIAPIMTEYWEKAEFPFHAIPSLASLGLAGGTIKGYGCPGLSLTASAISIAEVARVDASCSTFILVHSSLAMSTIALCGSEAQKQKYLPSLTQFKTIGCWALTEPDYGSDASSLRTAATKVPGGWHLDGQKRWIGNSTFADVLIILARNADTNQLNGFIVKKGAPGLKATKIENKIGLRMVQNGDIILNKVFVPEEDRLTGINSFQDINKVLAMSRIMVAWQPIGISMGVYDICHRYLKERKQFGAPLAAFQLNQEKLVRMLGNIQAMLLVGWRLCKLYESGKMTPGRSSLGKAWTSKKAREVVSLGRELLGGNGILVDFLVAKAFCDVEPIFSYEGTYDINSLVAGREITGIASFKPAVSAKSRL

SEQ ID NO: 32522 - protein, 369 aa, Zea mays subsp. mays
  peptide (1)..(369): Ceres Seq. ID no. 12340961
  misc_feature (104)..(202): Pfam Name: Pfam Description:  Acyl-CoA dehydrogenase, middle domain
  misc_feature (1)..(369): NCBI GI NO: 34896018 NR Description: ESTs AU056822
  misc_feature (1)..(369): NCBI GI NO: 15231059 NR Description: acyl-coA dehydrogenase; protein id: At3g51840
  misc_feature (1)..(359): NCBI GI NO: 31195739 NR Description: ENSANGP00000000259 [Anopheles gambiae]
  misc_feature (1)..(368): NCBI GI NO: 28829336 NR Description: similar to Arabidopsis thaliana (Mouse-ear cress)
  misc_feature (1)..(359): NCBI GI NO: 29827888 NR Description: putative glutaryl-CoA dehydrogenase
  misc_feature (1)..(359): NCBI GI NO: 29827260 NR Description: putative glutaryl-CoA dehydrogenase
  misc_feature (1)..(359): NCBI GI NO: 25026880 NR Description: putative acyl-CoA dehydrogenase
  misc_feature (1)..(359): NCBI GI NO: 15805578 NR Description: glutaryl-CoA dehydrogenase, putative
  misc_feature (1)..(359): NCBI GI NO: 25027279 NR Description: putative glutaryl-CoA dehydrogenase precursor
  misc_feature (1)..(360): NCBI GI NO: 11498596 NR Description: glutaryl-CoA dehydrogenase (gcdH)
MEKEIAPIMTEYWEKAEFPFHAIPSLASLGLAGGTIKGYGCPGLSLTASAISIAEVARVDASCSTFILVHSSLAMSTIALCGSEAQKQKYLPSLTQFKTIGCWALTEPDYGSDASSLRTAATKVPGGWHLDGQKRWIGNSTFADVLIILARNADTNQLNGFIVKKGAPGLKATKIENKIGLRMVQNGDIILNKVFVPEEDRLTGINSFQDINKVLAMSRIMVAWQPIGISMGVYDICHRYLKERKQFGAPLAAFQLNQEKLVRMLGNIQAMLLVGWRLCKLYESGKMTPGRSSLGKAWTSKKAREVVSLGRELLGGNGILVDFLVAKAFCDVEPIFSYEGTYDINSLVAGREITGIASFKPAVSAKSRL

SEQ ID NO: 32523 - DNA, 1474 bp, Zea mays subsp. mays
  misc_feature (1)..(1474): Ceres Seq. ID no. 12408280
atctagcaaactgcaaaccaggtcatctctgaatttccccaacaaagagcgagcataaaccccgctatacccgcttccttctctccaatctccggtgctcgcatcccgctccgcctccatgcgccgcggcagttccacgacgccagtcctctcacctctgtcctgacccaacacccgggcggctggaacccgcaggtgcgcttagtgccgctcgaggaggctcgccgtttgctggattcgttctgtcctttgccggccggcattgtgccctccgcggcggcgacaggggcgtgcgcggtgctgctgtaggggagggtgacggccatctccctggtcggccgcggcccgggctggtggcgtgcgaggaagacggattcacaaagcacggtgctccccaagtctagcagggtgtgttgtatggcttccacgctccagctgttgttttccattgccatcacagctttggcctttttcctccacccatgcgcatcgactgatgagttccaccgtgagctctacggttggtccaatggcatcgctacatggtatggcgcagctgatggcgctggaactgacggtggtgcgtgtggataccagaatgctgtggaccagccacctttctcatccatgattgccgctggctgctcttccatctacgactctggcaagggctgtggctcttgctatcaggctgtatgcaccggcaatgacgcttgctccggtaacccggtgactgtcgtcatcaccgacgagtgccccgattgcccgtgtcctgatgagcaggtccacttcgacatgagcgggacagcgttcggtgccttggcgaagcccgggcaggagagccagctgcgtggcgccggcgccatccaaatccagtatacccgggtgcagtgcgagtggcctggcgtggacgtgaccttctcggtggagccgggctccaacccgaactacctggccgtgctgatcgagtacgaggatagcgacagcgacctcgactccgtggacatgatgcagacgcagggcgggacgacggggcagtgggtgccgatgcagcagtcgtggggcgccgtgtggaagatcaactccggctccgtcctccagggccccttcaacatccgcctcaccttcagctctggcagggcgctcgtcgccagcaacgccatacctgcggggtggaacgccggcgtcgcgtaccggtctggcggcgtggctgtgacgagggccaggcccaggagcggtgcctgccggggctacgaggctgccgggacactggatggtttggtgcatcgtcacctcgtcgtgttgttgttactggtgttattgacgctgtgagccgagatgcgatgcaattttgctggttctgggagcgtgcgagtttgggctacatggactgagtagctctgtgtatttttcttgcatcgcatcgtagtggatggattactgcgtcgtattgtggacatgtctggtggttatc

SEQ ID NO: 32524 - protein, 304 aa, Zea mays subsp. mays
  peptide (1)..(304): Ceres Seq. ID no. 12408281
  misc_feature (166)..(250): Pfam Name: Pfam Description:  Pollen allergen
  misc_feature (5)..(304): NCBI GI NO: 16303233 NR Description: beta-expansin [Oryza sativa]
  misc_feature (5)..(304): NCBI GI NO: 16517017 NR Description: beta-expansin [Oryza sativa]
  misc_feature (1)..(261): NCBI GI NO: 21666630 NR Description: beta-expansin [Oryza sativa]
  misc_feature (34)..(261): NCBI GI NO: 16303229 NR Description: beta-expansin 5 [Oryza sativa]
  misc_feature (1)..(261): NCBI GI NO: 1076486 NR Description: cim1 protein - soybean
  misc_feature (34)..(261): NCBI GI NO: 8118428 NR Description: beta-expansin [Oryza sativa]
  misc_feature (1)..(261): NCBI GI NO: 34101047 NR Description: beta-expansin 1 precursor [Hordeum vulgare]
  misc_feature (35)..(261): NCBI GI NO: 16517013 NR Description: beta-expansin [Oryza sativa]
  misc_feature (35)..(261): NCBI GI NO: 40363749 NR Description: putative beta-expansin [Triticum aestivum]
  misc_feature (7)..(261): NCBI GI NO: 12082326 NR Description: beta-expansin [Atriplex lentiformis]
MASTLQLLFSIAITALAFFLHPCASTDEFHRELYGWSNGIATWYGAADGAGTDGGACGYQNAVDQPPFSSMIAAGCSSIYDSGKGCGSCYQAVCTGNDACSGNPVTVVITDECPDCPCPDEQVHFDMSGTAFGALAKPGQESQLRGAGAIQIQYTRVQCEWPGVDVTFSVEPGSNPNYLAVLIEYEDSDSDLDSVDMMQTQGGTTGQWVPMQQSWGAVWKINSGSVLQGPFNIRLTFSSGRALVASNAIPAGWNAGVAYRSGGVAVTRARPRSGACRGYEAAGTLDGLVHRHLVVLLLLVLLTL

SEQ ID NO: 32525 - protein, 234 aa, Zea mays subsp. mays
  peptide (1)..(234): Ceres Seq. ID no. 12408282
  misc_feature (96)..(180): Pfam Name: Pfam Description:  Pollen allergen
  misc_feature (1)..(234): NCBI GI NO: 16303233 NR Description: beta-expansin [Oryza sativa]
  misc_feature (1)..(234): NCBI GI NO: 16517017 NR Description: beta-expansin [Oryza sativa]
  misc_feature (1)..(191): NCBI GI NO: 21666630 NR Description: beta-expansin [Oryza sativa]
  misc_feature (1)..(191): NCBI GI NO: 16303229 NR Description: beta-expansin 5 [Oryza sativa]
  misc_feature (1)..(191): NCBI GI NO: 1076486 NR Description: cim1 protein - soybean
  misc_feature (1)..(191): NCBI GI NO: 8118428 NR Description: beta-expansin [Oryza sativa]
  misc_feature (1)..(191): NCBI GI NO: 34101047 NR Description: beta-expansin 1 precursor [Hordeum vulgare]
  misc_feature (1)..(191): NCBI GI NO: 16517013 NR Description: beta-expansin [Oryza sativa]
  misc_feature (1)..(191): NCBI GI NO: 40363749 NR Description: putative beta-expansin [Triticum aestivum]
  misc_feature (1)..(191): NCBI GI NO: 12082326 NR Description: beta-expansin [Atriplex lentiformis]
MIAAGCSSIYDSGKGCGSCYQAVCTGNDACSGNPVTVVITDECPDCPCPDEQVHFDMSGTAFGALAKPGQESQLRGAGAIQIQYTRVQCEWPGVDVTFSVEPGSNPNYLAVLIEYEDSDSDLDSVDMMQTQGGTTGQWVPMQQSWGAVWKINSGSVLQGPFNIRLTFSSGRALVASNAIPAGWNAGVAYRSGGVAVTRARPRSGACRGYEAAGTLDGLVHRHLVVLLLLVLLTL

SEQ ID NO: 32526 - protein, 178 aa, Zea mays subsp. mays
  peptide (1)..(178): Ceres Seq. ID no. 12408283
  misc_feature (40)..(124): Pfam Name: Pfam Description:  Pollen allergen
  misc_feature (1)..(178): NCBI GI NO: 16303233 NR Description: beta-expansin [Oryza sativa]
  misc_feature (1)..(178): NCBI GI NO: 16517017 NR Description: beta-expansin [Oryza sativa]
  misc_feature (1)..(135): NCBI GI NO: 21666630 NR Description: beta-expansin [Oryza sativa]
  misc_feature (1)..(135): NCBI GI NO: 16303229 NR Description: beta-expansin 5 [Oryza sativa]
  misc_feature (1)..(135): NCBI GI NO: 1076486 NR Description: cim1 protein - soybean
  misc_feature (1)..(135): NCBI GI NO: 8118428 NR Description: beta-expansin [Oryza sativa]
  misc_feature (1)..(135): NCBI GI NO: 34101047 NR Description: beta-expansin 1 precursor [Hordeum vulgare]
  misc_feature (1)..(135): NCBI GI NO: 16517013 NR Description: beta-expansin [Oryza sativa]
  misc_feature (1)..(135): NCBI GI NO: 40363749 NR Description: putative beta-expansin [Triticum aestivum]
  misc_feature (1)..(135): NCBI GI NO: 12082326 NR Description: beta-expansin [Atriplex lentiformis]
MSGTAFGALAKPGQESQLRGAGAIQIQYTRVQCEWPGVDVTFSVEPGSNPNYLAVLIEYEDSDSDLDSVDMMQTQGGTTGQWVPMQQSWGAVWKINSGSVLQGPFNIRLTFSSGRALVASNAIPAGWNAGVAYRSGGVAVTRARPRSGACRGYEAAGTLDGLVHRHLVVLLLLVLLTL

SEQ ID NO: 32527 - DNA, 1573 bp, Zea mays subsp. mays
  misc_feature (1)..(1573): Ceres Seq. ID no. 12412066
aacacactaggagaggtaaaaacgaacgaagttgcatctgggtagacggtagaggcaaccacacaattgccccaaaagtaaatgtcataataggagaaaacaactgtcttgcatcaccacgagcgtgggctctctccttctcgacgacgactgggccaccgtcgctgccgcctgccgccctacgccaggtgccaagcagccaggtgttcttggggcccttcgccggcgacgagcaccaccagctgaaagatggcgaggataccgtctctgaagagcctcaatgcgtttccacatgcggaagagcacttgttgaagaagacttactctggcgctgttgtgacaatttttgggctacttataatgattacactgtttgtgcatgagctgcagttttatcttaccacctacacggtgcatcagatgtctgtagatctgaaacgaggagaaactctgccaatccatatcaatatgtcatttccttctttgccatgtgaagtattgagtgtggatgcaattgacatgtctgggaaacatgaagttgatttgcatacaaatatttggaagcttcgcttggataagtatggccatatcatcggtacagagtacttgtctgacctagttgaaaaggggcatggggcacatcatgatcatgaccatgatcatgaccatcacgatgaacaaaagaagcatgaacaaaccttcaacgaagaagcagaaaaaatgatcaagagtgtgaaacaagcactcggaaatggtgaaggctgccgggtctatgggatgttggatgtgcagagggtggctggtaacttccatatctcagtgcatggtttgaacatttttgttgctgaaaagatttttgaagggtcaaaccatgtgaacgtcagtcatgttatccacgagctgtcatttggcccaaagtatccaggaattcataacccactggatgaaacttcaaggatacttcatgacacaagtggaaccttcaaatactatattaaggttgttccgactgagtataaatatctatcaaagaaagtattgccaacaaatcagttttctgtcactgagtattttcttcccatccgtccaactgacagggcctggccagcggtttacttcctgtatgatctgtcaccaattacagtcaccatcaaagaggaaagaaggaacttccttcattttgtaactcgtctatgtgcagttcttggtggcacatttgccatgacaggaatgcttgaccggtggatgtaccagcttatcaagacagtcaccaactcaaagaccagaagtgtactgcggtaattgcacaagtcacgatggatggaaaaccgttggaagtgtggtaccgtggctaatgaagcccatagatctttgcccgaagctaactgatcaagccatgttgatttttgcatgttttattttcttcgtacatggttaacttataatacgtcgttgtttttttttcatcaactatgttagattaacacagtccacggactacattgttaactatgttggtagtggaactgaaatgccaagccgatcttgatcaaccctatagtcccatcgtgcc

SEQ ID NO: 32528 - protein, 350 aa, Zea mays subsp. mays
  peptide (1)..(350): Ceres Seq. ID no. 12412067
  misc_feature (1)..(350): NCBI GI NO: 34897128 NR Description: unknown protein [Oryza sativa]
  misc_feature (6)..(344): NCBI GI NO: 30686584 NR Description: expressed protein [Arabidopsis thaliana]
  misc_feature (6)..(327): NCBI GI NO: 11036454 NR Description: gb|AAF34232
  misc_feature (156)..(334): NCBI GI NO: 38347102 NR Description: OSJNBa0006M15.17
  misc_feature (4)..(118): NCBI GI NO: 38347102 NR Description: OSJNBa0006M15.17
  misc_feature (146)..(340): NCBI GI NO: 7706278 NR Description: serologically defined breast cancer antigen 84
  misc_feature (1)..(118): NCBI GI NO: 7706278 NR Description: serologically defined breast cancer antigen 84
  misc_feature (146)..(340): NCBI GI NO: 13384938 NR Description: serologically defined breast cancer antigen 84
  misc_feature (1)..(118): NCBI GI NO: 13384938 NR Description: serologically defined breast cancer antigen 84
  misc_feature (146)..(340): NCBI GI NO: 34860248 NR Description: similar to serologically defined breast cancerantigen 84
MARIPSLKSLNAFPHAEEHLLKKTYSGAVVTIFGLLIMITLFVHELQFYLTTYTVHQMSVDLKRGETLPIHINMSFPSLPCEVLSVDAIDMSGKHEVDLHTNIWKLRLDKYGHIIGTEYLSDLVEKGHGAHHDHDHDHDHHDEQKKHEQTFNEEAEKMIKSVKQALGNGEGCRVYGMLDVQRVAGNFHISVHGLNIFVAEKIFEGSNHVNVSHVIHELSFGPKYPGIHNPLDETSRILHDTSGTFKYYIKVVPTEYKYLSKKVLPTNQFSVTEYFLPIRPTDRAWPAVYFLYDLSPITVTIKEERRNFLHFVTRLCAVLGGTFAMTGMLDRWMYQLIKTVTNSKTRSVLR

SEQ ID NO: 32529 - protein, 313 aa, Zea mays subsp. mays
  peptide (1)..(313): Ceres Seq. ID no. 12412068
  misc_feature (1)..(313): NCBI GI NO: 34897128 NR Description: unknown protein [Oryza sativa]
  misc_feature (1)..(307): NCBI GI NO: 30686584 NR Description: expressed protein [Arabidopsis thaliana]
  misc_feature (1)..(290): NCBI GI NO: 11036454 NR Description: gb|AAF34232
  misc_feature (119)..(297): NCBI GI NO: 38347102 NR Description: OSJNBa0006M15.17
  misc_feature (1)..(81): NCBI GI NO: 38347102 NR Description: OSJNBa0006M15.17
  misc_feature (109)..(303): NCBI GI NO: 7706278 NR Description: serologically defined breast cancer antigen 84
  misc_feature (1)..(81): NCBI GI NO: 7706278 NR Description: serologically defined breast cancer antigen 84
  misc_feature (109)..(303): NCBI GI NO: 13384938 NR Description: serologically defined breast cancer antigen 84
  misc_feature (1)..(81): NCBI GI NO: 13384938 NR Description: serologically defined breast cancer antigen 84
  misc_feature (109)..(303): NCBI GI NO: 34860248 NR Description: similar to serologically defined breast cancerantigen 84
MITLFVHELQFYLTTYTVHQMSVDLKRGETLPIHINMSFPSLPCEVLSVDAIDMSGKHEVDLHTNIWKLRLDKYGHIIGTEYLSDLVEKGHGAHHDHDHDHDHHDEQKKHEQTFNEEAEKMIKSVKQALGNGEGCRVYGMLDVQRVAGNFHISVHGLNIFVAEKIFEGSNHVNVSHVIHELSFGPKYPGIHNPLDETSRILHDTSGTFKYYIKVVPTEYKYLSKKVLPTNQFSVTEYFLPIRPTDRAWPAVYFLYDLSPITVTIKEERRNFLHFVTRLCAVLGGTFAMTGMLDRWMYQLIKTVTNSKTRSVLR

SEQ ID NO: 32530 - protein, 293 aa, Zea mays subsp. mays
  peptide (1)..(293): Ceres Seq. ID no. 12412069
  misc_feature (1)..(293): NCBI GI NO: 34897128 NR Description: unknown protein [Oryza sativa]
  misc_feature (1)..(287): NCBI GI NO: 30686584 NR Description: expressed protein [Arabidopsis thaliana]
  misc_feature (1)..(270): NCBI GI NO: 11036454 NR Description: gb|AAF34232
  misc_feature (99)..(277): NCBI GI NO: 38347102 NR Description: OSJNBa0006M15.17
  misc_feature (1)..(61): NCBI GI NO: 38347102 NR Description: OSJNBa0006M15.17
  misc_feature (89)..(283): NCBI GI NO: 7706278 NR Description: serologically defined breast cancer antigen 84
  misc_feature (1)..(61): NCBI GI NO: 7706278 NR Description: serologically defined breast cancer antigen 84
  misc_feature (89)..(283): NCBI GI NO: 13384938 NR Description: serologically defined breast cancer antigen 84
  misc_feature (1)..(61): NCBI GI NO: 13384938 NR Description: serologically defined breast cancer antigen 84
  misc_feature (89)..(283): NCBI GI NO: 34860248 NR Description: similar to serologically defined breast cancerantigen 84
MSVDLKRGETLPIHINMSFPSLPCEVLSVDAIDMSGKHEVDLHTNIWKLRLDKYGHIIGTEYLSDLVEKGHGAHHDHDHDHDHHDEQKKHEQTFNEEAEKMIKSVKQALGNGEGCRVYGMLDVQRVAGNFHISVHGLNIFVAEKIFEGSNHVNVSHVIHELSFGPKYPGIHNPLDETSRILHDTSGTFKYYIKVVPTEYKYLSKKVLPTNQFSVTEYFLPIRPTDRAWPAVYFLYDLSPITVTIKEERRNFLHFVTRLCAVLGGTFAMTGMLDRWMYQLIKTVTNSKTRSVLR

SEQ ID NO: 32531 - DNA, 1257 bp, Zea mays subsp. mays
  misc_feature (1)..(1257): Ceres Seq. ID no. 12412062
attgaaattttccgtttgcaccctaccgagaggtgacgacgagtgaggagtctgtgtgaccagtgctcggcgtcgtcccctgcctctgctagccgctaggcgacgggcccttcgccgggcgacgagcacaccggccctgttaccatggcagcgatgaatactggtatgggaggtttaggtggcaggccgatacatccacaagcaaatccttttggacctgctttgcagggtgctggaccaggattgatccgtactgggctagaaacatatggcggaaggattttagattcaagttctgagtttatgcagagcaatataacacaatatttgtccgaccctcagtactactttcaagtcaacagccagtatgtgaggaacaaactgaaggtcatcttgttccctttcttgcacaggggccactggacaagaataactgaaccagtaggaggaaggctatcctacaaacctccagtccaggatatcaatgcaccggacttgtacatccctttgatggcatttggcacctacattgtagctgctgggtatgccttgggtgttcttggaaggtttacccctgaggcactgaccctacagttttctaaagggatacttgggtggtttctgcaagtcgtcctcatcaaaggtctgctgtactccctgggaagcggtgaagctcccttgctggacatcgtggcgtatgctggatatggcttcgctggcacttcccttgcaatggtggcccgcatcttctggagctacctgtattacttcatcatgccatggttctgcctctgcacgggagtcttccctgtgaagaccatgaagagggttcttctgggcgggccaaggagctacgagagacaccccggccggaaccactacttcctgatcttcttggcggtcgtgcaattccccatgctgttctggctcggcaacatatgtggctgacctttgatcctattggtcgggccacagacctgtttcttcttcttcttcagaataggcatgtgctacttctggcttgctgatgaaacttaggtttatcgtggagatggtacagaactattagctatagatatctgggcaatcgaataaactgtttttgtttctgttagctatagaggcgaaagtaaaaacaatcgtttgggataggataaagatgaactgcttcgtgtgtacccttttgtgtcacgagcggctagccacgaccctgcaatctgatttgttttttaatgatcactgctacttgatctttcc

SEQ ID NO: 32532 - protein, 267 aa, Zea mays subsp. mays
  peptide (1)..(267): Ceres Seq. ID no. 12412063
  misc_feature (17)..(265): NCBI GI NO: 38346458 NR Description: OSJNBa0019G23.6
  misc_feature (4)..(265): NCBI GI NO: 18397705 NR Description: expressed protein; protein id: At1g30890
  misc_feature (4)..(265): NCBI GI NO: 30695009 NR Description: expressed protein [Arabidopsis thaliana]
  misc_feature (17)..(265): NCBI GI NO: 11282553 NR Description: hypothetical protein T16L24
  misc_feature (17)..(265): NCBI GI NO: 33589682 NR Description: At3g59500 [Arabidopsis thaliana]
  misc_feature (10)..(265): NCBI GI NO: 9755388 NR Description: F17F8.24 [Arabidopsis thaliana]
  misc_feature (142)..(265): NCBI GI NO: 10241632 NR Description: putative protein
  misc_feature (1)..(262): NCBI GI NO: 14043299 NR Description: Similar to RIKEN cDNA 9430029K10 gene
  misc_feature (1)..(262): NCBI GI NO: 24308364 NR Description: similar to putative transmembrane protein
  misc_feature (10)..(262): NCBI GI NO: 12861030 NR Description: unnamed protein product [Mus musculus]
MAAMNTGMGGLGGRPIHPQANPFGPALQGAGPGLIRTGLETYGGRILDSSSEFMQSNITQYLSDPQYYFQVNSQYVRNKLKVILFPFLHRGHWTRITEPVGGRLSYKPPVQDINAPDLYIPLMAFGTYIVAAGYALGVLGRFTPEALTLQFSKGILGWFLQVVLIKGLLYSLGSGEAPLLDIVAYAGYGFAGTSLAMVARIFWSYLYYFIMPWFCLCTGVFPVKTMKRVLLGGPRSYERHPGRNHYFLIFLAVVQFPMLFWLGNICG

SEQ ID NO: 32533 - protein, 264 aa, Zea mays subsp. mays
  peptide (1)..(264): Ceres Seq. ID no. 12412064
  misc_feature (14)..(262): NCBI GI NO: 38346458 NR Description: OSJNBa0019G23.6
  misc_feature (1)..(262): NCBI GI NO: 18397705 NR Description: expressed protein; protein id: At1g30890
  misc_feature (1)..(262): NCBI GI NO: 30695009 NR Description: expressed protein [Arabidopsis thaliana]
  misc_feature (14)..(262): NCBI GI NO: 11282553 NR Description: hypothetical protein T16L24
  misc_feature (14)..(262): NCBI GI NO: 33589682 NR Description: At3g59500 [Arabidopsis thaliana]
  misc_feature (7)..(262): NCBI GI NO: 9755388 NR Description: F17F8.24 [Arabidopsis thaliana]
  misc_feature (139)..(262): NCBI GI NO: 10241632 NR Description: putative protein
  misc_feature (1)..(259): NCBI GI NO: 14043299 NR Description: Similar to RIKEN cDNA 9430029K10 gene
  misc_feature (1)..(259): NCBI GI NO: 24308364 NR Description: similar to putative transmembrane protein
  misc_feature (7)..(259): NCBI GI NO: 12861030 NR Description: unnamed protein product [Mus musculus]
MNTGMGGLGGRPIHPQANPFGPALQGAGPGLIRTGLETYGGRILDSSSEFMQSNITQYLSDPQYYFQVNSQYVRNKLKVILFPFLHRGHWTRITEPVGGRLSYKPPVQDINAPDLYIPLMAFGTYIVAAGYALGVLGRFTPEALTLQFSKGILGWFLQVVLIKGLLYSLGSGEAPLLDIVAYAGYGFAGTSLAMVARIFWSYLYYFIMPWFCLCTGVFPVKTMKRVLLGGPRSYERHPGRNHYFLIFLAVVQFPMLFWLGNICG

SEQ ID NO: 32534 - protein, 260 aa, Zea mays subsp. mays
  peptide (1)..(260): Ceres Seq. ID no. 12412065
  misc_feature (10)..(258): NCBI GI NO: 38346458 NR Description: OSJNBa0019G23.6
  misc_feature (1)..(258): NCBI GI NO: 18397705 NR Description: expressed protein; protein id: At1g30890
  misc_feature (1)..(258): NCBI GI NO: 30695009 NR Description: expressed protein [Arabidopsis thaliana]
  misc_feature (10)..(258): NCBI GI NO: 11282553 NR Description: hypothetical protein T16L24
  misc_feature (10)..(258): NCBI GI NO: 33589682 NR Description: At3g59500 [Arabidopsis thaliana]
  misc_feature (3)..(258): NCBI GI NO: 9755388 NR Description: F17F8.24 [Arabidopsis thaliana]
  misc_feature (135)..(258): NCBI GI NO: 10241632 NR Description: putative protein
  misc_feature (1)..(255): NCBI GI NO: 14043299 NR Description: Similar to RIKEN cDNA 9430029K10 gene
  misc_feature (1)..(255): NCBI GI NO: 24308364 NR Description: similar to putative transmembrane protein
  misc_feature (3)..(255): NCBI GI NO: 12861030 NR Description: unnamed protein product [Mus musculus]
MGGLGGRPIHPQANPFGPALQGAGPGLIRTGLETYGGRILDSSSEFMQSNITQYLSDPQYYFQVNSQYVRNKLKVILFPFLHRGHWTRITEPVGGRLSYKPPVQDINAPDLYIPLMAFGTYIVAAGYALGVLGRFTPEALTLQFSKGILGWFLQVVLIKGLLYSLGSGEAPLLDIVAYAGYGFAGTSLAMVARIFWSYLYYFIMPWFCLCTGVFPVKTMKRVLLGGPRSYERHPGRNHYFLIFLAVVQFPMLFWLGNICG

SEQ ID NO: 32535 - DNA, 1602 bp, Zea mays subsp. mays
  misc_feature (1)..(1602): Ceres Seq. ID no. 12372680
tctcccaaagccatcttccttccgcggactagttttttctgaagattcggcgatggcggcgacgatccaatccgtgaaggcgcgccagatctttgacagccgcggcaaccctacagtcgaggtcgacgtgttttgctcagatggaacctttgcaagggcagctgttcccagtggagcatcaactggtgtatatgaagctctggagttgagggatggtggctctgactatttggggaagggtgtctccaaggctgtgaacaatgtgaattctgttattggacctgctctgattggcaaggaccctacagcacagactgagattgataacttcatggttcaacaacttgatgggaccaaaaatgagtggggatggtgcaagcaaaagcttggtgctaatgcgattctggctgtgtcattagctgtttgcaaagctggggctagcatcaagaggattcctttataccagcacattgccaacctagctgggaacaagcagttagtgttgcctgtccctgcattcaatgtcatcaacggtggttcccatgctggaaacaagcttgctatgcaggagtttatgatccttcctactggagctgcctcatttaaggaggctatgaagatgggtgttgaagtttatcaccacctgaagtccgttatcaaaaagaagtatgggcaagatgccacgaatgttggtgacgaaggtggttttgctccgaacatccaggagaacaaggaaggacttgagctcttgaaaactgcaattgagaaggctggatacactggcaaggttgtcatcggaatggatgttgcttcttcggagttttacagtgacaaggaccaaacctatgacctcaactttaaggaggagaataatgatggttcacagaagatatctggcgatagcttaaagaatgtatacaaatcttttgtgagcgaataccccattgtttcgattgaagatccttttgaccaggatgactgggttcactatgctaagatgactgaagaaattggagagcaagtgcagattgttggtgatgaccttctcgtcaccaaccccactagggttgctaaggctatcaaggagaaatcatgcaatgcccttctgctcaaggttaaccaaatcggatctgtgactgagagtattgaggctgtgaagatgtcaaagcgtgcgggctggggtgtgatgactagtcataggagtggtgagactgaggacactttcattgctgatctggcagttggtttgtccacgggtcagattaagactggagcaccctgcagatcagagcgtcttgccaaatacaaccagcttcttaggattgaagaagagcttggcgctattgctgtctacgcaggtgccaaattccgtgcacctgtggagccctactaaacgggcgggatgcaagtgcttttatgtctgcacaagtcctgtgaaactgtttactgcgacctgcagattttactcttggagtgccctgagtagattttagcaataatatccaacatgtaacatgttacggacatgtacccaaacgtgatccagttttagttaatgtgctccatgcttgacgtttaaaaaaaaaaaaaaaaaaaaagaaa

SEQ ID NO: 32536 - protein, 463 aa, Zea mays subsp. mays
  peptide (1)..(463): Ceres Seq. ID no. 12372681
  misc_feature (165)..(460): Pfam Name: Pfam Description:  Enolase, C-terminal TIM barrel domain
  misc_feature (18)..(463): NCBI GI NO: 1169528 NR Description: Enolase 2
  misc_feature (18)..(463): NCBI GI NO: 3023713 NR Description: Enolase
  misc_feature (18)..(463): NCBI GI NO: 119355 NR Description: Enolase 1
  misc_feature (18)..(418): NCBI GI NO: 37531422 NR Description: putative enolase
  misc_feature (438)..(463): NCBI GI NO: 37531422 NR Description: putative enolase
  misc_feature (20)..(463): NCBI GI NO: 119354 NR Description: Enolase
  misc_feature (21)..(463): NCBI GI NO: 8919731 NR Description: enolase [Spinacia oleracea]
  misc_feature (18)..(463): NCBI GI NO: 1169534 NR Description: Enolase
  misc_feature (18)..(463): NCBI GI NO: 14423688 NR Description: Enolase 1
  misc_feature (20)..(463): NCBI GI NO: 15227987 NR Description: enolase
LPKPSSFRGLVFSEDSAMAATIQSVKARQIFDSRGNPTVEVDVFCSDGTFARAAVPSGASTGVYEALELRDGGSDYLGKGVSKAVNNVNSVIGPALIGKDPTAQTEIDNFMVQQLDGTKNEWGWCKQKLGANAILAVSLAVCKAGASIKRIPLYQHIANLAGNKQLVLPVPAFNVINGGSHAGNKLAMQEFMILPTGAASFKEAMKMGVEVYHHLKSVIKKKYGQDATNVGDEGGFAPNIQENKEGLELLKTAIEKAGYTGKVVIGMDVASSEFYSDKDQTYDLNFKEENNDGSQKISGDSLKNVYKSFVSEYPIVSIEDPFDQDDWVHYAKMTEEIGEQVQIVGDDLLVTNPTRVAKAIKEKSCNALLLKVNQIGSVTESIEAVKMSKRAGWGVMTSHRSGETEDTFIADLAVGLSTGQIKTGAPCRSERLAKYNQLLRIEEELGAIAVYAGAKFRAPVEPY

SEQ ID NO: 32537 - protein, 446 aa, Zea mays subsp. mays
  peptide (1)..(446): Ceres Seq. ID no. 12372682
  misc_feature (148)..(443): Pfam Name: Pfam Description:  Enolase, C-terminal TIM barrel domain
  misc_feature (1)..(446): NCBI GI NO: 1169528 NR Description: Enolase 2
  misc_feature (1)..(446): NCBI GI NO: 3023713 NR Description: Enolase
  misc_feature (1)..(446): NCBI GI NO: 119355 NR Description: Enolase 1
  misc_feature (1)..(401): NCBI GI NO: 37531422 NR Description: putative enolase
  misc_feature (421)..(446): NCBI GI NO: 37531422 NR Description: putative enolase
  misc_feature (3)..(446): NCBI GI NO: 119354 NR Description: Enolase
  misc_feature (4)..(446): NCBI GI NO: 8919731 NR Description: enolase [Spinacia oleracea]
  misc_feature (1)..(446): NCBI GI NO: 1169534 NR Description: Enolase
  misc_feature (1)..(446): NCBI GI NO: 14423688 NR Description: Enolase 1
  misc_feature (3)..(446): NCBI GI NO: 15227987 NR Description: enolase
MAATIQSVKARQIFDSRGNPTVEVDVFCSDGTFARAAVPSGASTGVYEALELRDGGSDYLGKGVSKAVNNVNSVIGPALIGKDPTAQTEIDNFMVQQLDGTKNEWGWCKQKLGANAILAVSLAVCKAGASIKRIPLYQHIANLAGNKQLVLPVPAFNVINGGSHAGNKLAMQEFMILPTGAASFKEAMKMGVEVYHHLKSVIKKKYGQDATNVGDEGGFAPNIQENKEGLELLKTAIEKAGYTGKVVIGMDVASSEFYSDKDQTYDLNFKEENNDGSQKISGDSLKNVYKSFVSEYPIVSIEDPFDQDDWVHYAKMTEEIGEQVQIVGDDLLVTNPTRVAKAIKEKSCNALLLKVNQIGSVTESIEAVKMSKRAGWGVMTSHRSGETEDTFIADLAVGLSTGQIKTGAPCRSERLAKYNQLLRIEEELGAIAVYAGAKFRAPVEPY

SEQ ID NO: 32538 - protein, 353 aa, Zea mays subsp. mays
  peptide (1)..(353): Ceres Seq. ID no. 12372683
  misc_feature (55)..(350): Pfam Name: Pfam Description:  Enolase, C-terminal TIM barrel domain
  misc_feature (1)..(353): NCBI GI NO: 1169528 NR Description: Enolase 2
  misc_feature (1)..(353): NCBI GI NO: 3023713 NR Description: Enolase
  misc_feature (1)..(353): NCBI GI NO: 119355 NR Description: Enolase 1
  misc_feature (1)..(308): NCBI GI NO: 37531422 NR Description: putative enolase
  misc_feature (328)..(353): NCBI GI NO: 37531422 NR Description: putative enolase
  misc_feature (1)..(353): NCBI GI NO: 119354 NR Description: Enolase
  misc_feature (1)..(353): NCBI GI NO: 8919731 NR Description: enolase [Spinacia oleracea]
  misc_feature (1)..(353): NCBI GI NO: 1169534 NR Description: Enolase
  misc_feature (1)..(353): NCBI GI NO: 14423688 NR Description: Enolase 1
  misc_feature (1)..(353): NCBI GI NO: 15227987 NR Description: enolase
MVQQLDGTKNEWGWCKQKLGANAILAVSLAVCKAGASIKRIPLYQHIANLAGNKQLVLPVPAFNVINGGSHAGNKLAMQEFMILPTGAASFKEAMKMGVEVYHHLKSVIKKKYGQDATNVGDEGGFAPNIQENKEGLELLKTAIEKAGYTGKVVIGMDVASSEFYSDKDQTYDLNFKEENNDGSQKISGDSLKNVYKSFVSEYPIVSIEDPFDQDDWVHYAKMTEEIGEQVQIVGDDLLVTNPTRVAKAIKEKSCNALLLKVNQIGSVTESIEAVKMSKRAGWGVMTSHRSGETEDTFIADLAVGLSTGQIKTGAPCRSERLAKYNQLLRIEEELGAIAVYAGAKFRAPVEPY

SEQ ID NO: 32539 - DNA, 1529 bp, Zea mays subsp. mays
  misc_feature (1)..(1529): Ceres Seq. ID no. 12369098
acccgagaatactcgcgctcgcgcactcgacattcctcgccccccacgccggttcaccctgcgcgcacgcgctcagcatctcgcaatcccccgggcggaggcgtatgtcctgcgccgtggcgatgccgatcgacttgctccacgctccagctccgtgggaggaggaggtgaaggcggttgaggaggacgaggaggaggtggagggagtaggatgcggcggaggggccgtggtggtggtcgcggcggacgcggaggcggagggtcacccctacgacttccacgtgtccgggccgcgcaacctgccgccgcccaactggaaggagataatcagatcgagctggaaggatccaaattacaaaaggatggtaatggcctgcttcattcaagcagtctacctgcttgaactggacagacaggacaagaaaggcgaagaggatggccttgctccaaaatggtggagacccttcaagtacaaggtcactcagacattggtggatgagagagatggttccatctatggcgccatgctggagtgggatcgttcttctgccttgtgtgactttatcctcatgagaccaagcggggcaccgagggctgtgttagctctcagaggaaccctcctgcagaagccaactatgaagagagatctgcaggatgaccttcgcttcttggtatgggagagcctcaaaggttcagtgagatttgttggtgctttagcagcgctaaaatcagcagttgagaagtttggcagcgccaatgtttgtgttgccgggcactccttgggagctggctttgcactccaagtctgcaaggagcttgccaaacatggagtttttgtggagtgtcatcttttcaatccaccttctgtttcactggccatgggtgtaaggaccatgagtgagaaggccagctacctgtggaagaaagtcaaaggaagtctgccattgaaggaagacacaacaccaccacttgagactgctaaggctgatgcaagtgacaagaagagattgcgcgccgagaagaaatgggtgccacatttatatgtcaacaacagtgattacatctgctgccactacaacgctccatcctgctcgtccacaacaacagatggtgcttccaacgaacagcagcaacaacaacgcaaggctagtgaaattgccggtgatgtggtcgcaaagctctttgtgacatcaaaagggccacagaaattccttgaggcgcatgggctacagcagtggtggtcagatggcatggagctgcagctggctctctatgacagcaagctcataaacaggcagctgaaatccatctacgcaacaacaacagaaatgccatctcctgccaagtcctagacacggcttaagccgctgttgcatcggtcattagaaatactctttctaaccagtgtgtgttcctttatcaactgagaatgttttattactccagtgatgccccaaaacagtcgaataatttgattaaagggatagtgtgtgaacagtttcgacaaaacaacattgtatttcaactct

SEQ ID NO: 32540 - protein, 449 aa, Zea mays subsp. mays
  peptide (1)..(449): Ceres Seq. ID no. 12369099
  misc_feature (41)..(448): NCBI GI NO: 34909578 NR Description: P0046E05.21
  misc_feature (77)..(438): NCBI GI NO: 34910916 NR Description: OSJNBb0063G05.3
  misc_feature (58)..(438): NCBI GI NO: 15241306 NR Description: putative protein; protein id: At5g50890.1
  misc_feature (199)..(437): NCBI GI NO: 34904536 NR Description: B1066G12.13
  misc_feature (90)..(159): NCBI GI NO: 34904536 NR Description: B1066G12.13
  misc_feature (111)..(310): NCBI GI NO: 34901136 NR Description: contains EST AU161031
  misc_feature (92)..(358): NCBI GI NO: 30689345 NR Description: expressed protein [Arabidopsis thaliana]
  misc_feature (113)..(358): NCBI GI NO: 18396010 NR Description: expressed protein; protein id: At2g05260
  misc_feature (113)..(413): NCBI GI NO: 15237918 NR Description: putative protein; protein id: At5g24220.1
  misc_feature (91)..(427): NCBI GI NO: 18413406 NR Description: unknown protein; protein id: At4g10955.1
PRILALAHSTFLAPHAGSPCAHALSISQSPGRRRMSCAVAMPIDLLHAPAPWEEEVKAVEEDEEEVEGVGCGGGAVVVVAADAEAEGHPYDFHVSGPRNLPPPNWKEIIRSSWKDPNYKRMVMACFIQAVYLLELDRQDKKGEEDGLAPKWWRPFKYKVTQTLVDERDGSIYGAMLEWDRSSALCDFILMRPSGAPRAVLALRGTLLQKPTMKRDLQDDLRFLVWESLKGSVRFVGALAALKSAVEKFGSANVCVAGHSLGAGFALQVCKELAKHGVFVECHLFNPPSVSLAMGVRTMSEKASYLWKKVKGSLPLKEDTTPPLETAKADASDKKRLRAEKKWVPHLYVNNSDYICCHYNAPSCSSTTTDGASNEQQQQQRKASEIAGDVVAKLFVTSKGPQKFLEAHGLQQWWSDGMELQLALYDSKLINRQLKSIYATTTEMPSPAKS

SEQ ID NO: 32541 - protein, 415 aa, Zea mays subsp. mays
  peptide (1)..(415): Ceres Seq. ID no. 12369100
  misc_feature (7)..(414): NCBI GI NO: 34909578 NR Description: P0046E05.21
  misc_feature (43)..(404): NCBI GI NO: 34910916 NR Description: OSJNBb0063G05.3
  misc_feature (24)..(404): NCBI GI NO: 15241306 NR Description: putative protein; protein id: At5g50890.1
  misc_feature (165)..(403): NCBI GI NO: 34904536 NR Description: B1066G12.13
  misc_feature (56)..(125): NCBI GI NO: 34904536 NR Description: B1066G12.13
  misc_feature (77)..(276): NCBI GI NO: 34901136 NR Description: contains EST AU161031
  misc_feature (58)..(324): NCBI GI NO: 30689345 NR Description: expressed protein [Arabidopsis thaliana]
  misc_feature (79)..(324): NCBI GI NO: 18396010 NR Description: expressed protein; protein id: At2g05260
  misc_feature (79)..(379): NCBI GI NO: 15237918 NR Description: putative protein; protein id: At5g24220.1
  misc_feature (57)..(393): NCBI GI NO: 18413406 NR Description: unknown protein; protein id: At4g10955.1
MSCAVAMPIDLLHAPAPWEEEVKAVEEDEEEVEGVGCGGGAVVVVAADAEAEGHPYDFHVSGPRNLPPPNWKEIIRSSWKDPNYKRMVMACFIQAVYLLELDRQDKKGEEDGLAPKWWRPFKYKVTQTLVDERDGSIYGAMLEWDRSSALCDFILMRPSGAPRAVLALRGTLLQKPTMKRDLQDDLRFLVWESLKGSVRFVGALAALKSAVEKFGSANVCVAGHSLGAGFALQVCKELAKHGVFVECHLFNPPSVSLAMGVRTMSEKASYLWKKVKGSLPLKEDTTPPLETAKADASDKKRLRAEKKWVPHLYVNNSDYICCHYNAPSCSSTTTDGASNEQQQQQRKASEIAGDVVAKLFVTSKGPQKFLEAHGLQQWWSDGMELQLALYDSKLINRQLKSIYATTTEMPSPAKS

SEQ ID NO: 32542 - protein, 409 aa, Zea mays subsp. mays
  peptide (1)..(409): Ceres Seq. ID no. 12369101
  misc_feature (1)..(408): NCBI GI NO: 34909578 NR Description: P0046E05.21
  misc_feature (37)..(398): NCBI GI NO: 34910916 NR Description: OSJNBb0063G05.3
  misc_feature (18)..(398): NCBI GI NO: 15241306 NR Description: putative protein; protein id: At5g50890.1
  misc_feature (159)..(397): NCBI GI NO: 34904536 NR Description: B1066G12.13
  misc_feature (50)..(119): NCBI GI NO: 34904536 NR Description: B1066G12.13
  misc_feature (71)..(270): NCBI GI NO: 34901136 NR Description: contains EST AU161031
  misc_feature (52)..(318): NCBI GI NO: 30689345 NR Description: expressed protein [Arabidopsis thaliana]
  misc_feature (73)..(318): NCBI GI NO: 18396010 NR Description: expressed protein; protein id: At2g05260
  misc_feature (73)..(373): NCBI GI NO: 15237918 NR Description: putative protein; protein id: At5g24220.1
  misc_feature (51)..(387): NCBI GI NO: 18413406 NR Description: unknown protein; protein id: At4g10955.1
MPIDLLHAPAPWEEEVKAVEEDEEEVEGVGCGGGAVVVVAADAEAEGHPYDFHVSGPRNLPPPNWKEIIRSSWKDPNYKRMVMACFIQAVYLLELDRQDKKGEEDGLAPKWWRPFKYKVTQTLVDERDGSIYGAMLEWDRSSALCDFILMRPSGAPRAVLALRGTLLQKPTMKRDLQDDLRFLVWESLKGSVRFVGALAALKSAVEKFGSANVCVAGHSLGAGFALQVCKELAKHGVFVECHLFNPPSVSLAMGVRTMSEKASYLWKKVKGSLPLKEDTTPPLETAKADASDKKRLRAEKKWVPHLYVNNSDYICCHYNAPSCSSTTTDGASNEQQQQQRKASEIAGDVVAKLFVTSKGPQKFLEAHGLQQWWSDGMELQLALYDSKLINRQLKSIYATTTEMPSPAKS

SEQ ID NO: 32543 - DNA, 909 bp, Zea mays subsp. mays
  misc_feature (1)..(909): Ceres Seq. ID no. 13499033
atccatccaactcttcataacaggcgacctgagagcagagcagacagagagcgttctggcagccgttgcggagcttgaacctctgcaaccaccaacagctaaactaaaagcagcggcggacggcgcgcggtactggacgaccggccgacgatggctacgccggcgcagcagcagggtgaccagcaccagccgaggctgcagaaggtgatggtggctgtagacgagagcgagtgcagccggcacgcgctggagtgggcgctgcggaacctggcgcccacgctggccccaccgctactggtgctcaccgtgcagccgcacttcccgctcggatacgtctccgccgcgtccttcggcgcacccctgggcaccgtccctccggtggctccggagctcatcaggtcgatgcaggagcagcagagggagctcacgcaggagctcctcgacaaggccagggccatctgcgccgagcacggggttgctgtagaggcaattgtcgaggtcggagatgcaaaggaggtgatatgtgaagtggctgagaagaaaaatgtcgatctgctggttcttggaagccacagtcgtgggccaatacagaggttgttccttgggagcgtcagtaactactgtgtacatcattctaagtgtccagttcttgtggtgaagaaccaaggctgatgaaggattcaactcccagctgctagtcctaatcatgttcgggtatttgtcaacgtatttgtaatgtgtagtacttgctttagccaaacgcattggccaataaagtagcttgctttgcttcttggaagggccgaggctggactggaggagagttctttttctttttcttttttctggtcagtgtgcctttgctccggaatggcagagttgtaaataagaactacgaactttgtgcgc

SEQ ID NO: 32544 - protein, 173 aa, Zea mays subsp. mays
  peptide (1)..(173): Ceres Seq. ID no. 13499034
  misc_feature (15)..(170): Pfam Name: Pfam Description:  Universal stress protein family
  misc_feature (14)..(172): NCBI GI NO: 34914610 NR Description: P0520B06.18
  misc_feature (10)..(172): NCBI GI NO: 18408994 NR Description: expressed protein [Arabidopsis thaliana]
  misc_feature (15)..(170): NCBI GI NO: 5669654 NR Description: ER6 protein [Lycopersicon esculentum]
  misc_feature (16)..(170): NCBI GI NO: 30681321 NR Description: ER6 protein -related [Arabidopsis thaliana]
  misc_feature (17)..(170): NCBI GI NO: 18399413 NR Description: ethylene-responsive protein -related
  misc_feature (17)..(170): NCBI GI NO: 30681955 NR Description: ethylene-responsive protein -related
  misc_feature (2)..(170): NCBI GI NO: 40539010 NR Description: putative stress-related protein
  misc_feature (16)..(170): NCBI GI NO: 25402571 NR Description: hypothetical protein
  misc_feature (1)..(170): NCBI GI NO: 30694811 NR Description: expressed protein [Arabidopsis thaliana]
  misc_feature (17)..(160): NCBI GI NO: 30681959 NR Description: ethylene-responsive protein -related
MATPAQQQGDQHQPRLQKVMVAVDESECSRHALEWALRNLAPTLAPPLLVLTVQPHFPLGYVSAASFGAPLGTVPPVAPELIRSMQEQQRELTQELLDKARAICAEHGVAVEAIVEVGDAKEVICEVAEKKNVDLLVLGSHSRGPIQRLFLGSVSNYCVHHSKCPVLVVKNQG

SEQ ID NO: 32545 - protein, 154 aa, Zea mays subsp. mays
  peptide (1)..(154): Ceres Seq. ID no. 13499035
  misc_feature (1)..(151): Pfam Name: Pfam Description:  Universal stress protein family
  misc_feature (1)..(153): NCBI GI NO: 34914610 NR Description: P0520B06.18
  misc_feature (1)..(153): NCBI GI NO: 18408994 NR Description: expressed protein [Arabidopsis thaliana]
  misc_feature (1)..(151): NCBI GI NO: 5669654 NR Description: ER6 protein [Lycopersicon esculentum]
  misc_feature (1)..(151): NCBI GI NO: 30681321 NR Description: ER6 protein -related [Arabidopsis thaliana]
  misc_feature (1)..(151): NCBI GI NO: 18399413 NR Description: ethylene-responsive protein -related
  misc_feature (1)..(151): NCBI GI NO: 30681955 NR Description: ethylene-responsive protein -related
  misc_feature (1)..(151): NCBI GI NO: 40539010 NR Description: putative stress-related protein
  misc_feature (1)..(151): NCBI GI NO: 25402571 NR Description: hypothetical protein
  misc_feature (1)..(151): NCBI GI NO: 30694811 NR Description: expressed protein [Arabidopsis thaliana]
  misc_feature (1)..(141): NCBI GI NO: 30681959 NR Description: ethylene-responsive protein -related
MVAVDESECSRHALEWALRNLAPTLAPPLLVLTVQPHFPLGYVSAASFGAPLGTVPPVAPELIRSMQEQQRELTQELLDKARAICAEHGVAVEAIVEVGDAKEVICEVAEKKNVDLLVLGSHSRGPIQRLFLGSVSNYCVHHSKCPVLVVKNQG

SEQ ID NO: 32546 - protein, 89 aa, Zea mays subsp. mays
  peptide (1)..(89): Ceres Seq. ID no. 13499036
  misc_feature (1)..(86): Pfam Name: Pfam Description:  Universal stress protein family
  misc_feature (1)..(88): NCBI GI NO: 34914610 NR Description: P0520B06.18
  misc_feature (1)..(88): NCBI GI NO: 18408994 NR Description: expressed protein [Arabidopsis thaliana]
  misc_feature (1)..(86): NCBI GI NO: 5669654 NR Description: ER6 protein [Lycopersicon esculentum]
  misc_feature (1)..(86): NCBI GI NO: 30681321 NR Description: ER6 protein -related [Arabidopsis thaliana]
  misc_feature (1)..(86): NCBI GI NO: 18399413 NR Description: ethylene-responsive protein -related
  misc_feature (1)..(86): NCBI GI NO: 30681955 NR Description: ethylene-responsive protein -related
  misc_feature (1)..(86): NCBI GI NO: 40539010 NR Description: putative stress-related protein
  misc_feature (1)..(86): NCBI GI NO: 25402571 NR Description: hypothetical protein
  misc_feature (1)..(86): NCBI GI NO: 30694811 NR Description: expressed protein [Arabidopsis thaliana]
  misc_feature (1)..(76): NCBI GI NO: 30681959 NR Description: ethylene-responsive protein -related
MQEQQRELTQELLDKARAICAEHGVAVEAIVEVGDAKEVICEVAEKKNVDLLVLGSHSRGPIQRLFLGSVSNYCVHHSKCPVLVVKNQG

SEQ ID NO: 32547 - DNA, 1238 bp, Zea mays subsp. mays
  misc_feature (1)..(1238): Ceres Seq. ID no. 12406405
gcacgagaccattacctagaacatcctaatcgaaaaatcatcatcgactccacctggaactcgctcactggcaatggctaccaataccaagctcgtggcccttggcttggccgtcctcgtgagcgttgggttctccgatgcagcgagggtagttaggcttgggagctatgcgtctgccggaggaggcggcggcggtggaggcggcggctccggatcgaccggggctgctgggtacggcggtgggtctggcggtggcggtggctacggcataggcaagggtggcggggactggtggaacaatttcgtctccagcgtagcgggcggtggtggtgggggacagggcggagggggtggcaccaacggtggatccgggtccggcggtgggtcgggctatggttctggcaccagttccaccgcagcctctggccccagcagtggcaactacgccaacgctgagggcaagggcgccggtgggggcatgggcggcggtgccgatggcgcctacggttctggtgccggtggaggcgttggcaagggccagggcgagagtggcgtcgcattggcaccgtcgtccgatggctactacaatggcggcgccgctgatgctaccggtggtggttccggcgctggcggtggacatggcggtggcgccggagctccaagctacgggactggaggtggccttggcggaggcaagggcgaggccggcagcgacggtcctggggttcaggttacgcggcgggaatcggtgctggcactggcggcggcggtggcggcggattccaaggcgcctctggtggtggcggtggctctgggtccggatccggcagcggtggaatccactgagtttccctgcggcatgcagctggacggagcgctcggcgtgtagtgtcagtccattttggagtcggttcgtgtacctgagttttccttgaggagatgctgggtttcgcattctttgttgcaagaattattagtcaggaataatgggcttcgttcgtgattgtagttcgagtaggtaggtagtccagcatgcaactgacatgtaatggctacaggctactacgagtatatgcttgcatcgccatcttttgatgtgccccttgttgttactctcatcgatctttagaggtcgttgctaccggtttttatcttccaaaacacaaaatatactgggacgactcttgcagtctcttgctactgttgaatgtgactattgactagctatagtagtattt

SEQ ID NO: 32548 - protein, 271 aa, Zea mays subsp. mays
  peptide (1)..(271): Ceres Seq. ID no. 12406406
  misc_feature (1)..(221): Pfam Name: Pfam Description:  Dehydrin
  misc_feature (1)..(204): NCBI GI NO: 7442081 NR Description: glycine-rich protein grp3 - maize
  misc_feature (1)..(215): NCBI GI NO: 37534936 NR Description: putative glycine-rich protein
  misc_feature (5)..(217): NCBI GI NO: 37534924 NR Description: putative glycine-rich protein
  misc_feature (1)..(217): NCBI GI NO: 34898126 NR Description: putative glycine-rich cell wall protein precursor
  misc_feature (5)..(217): NCBI GI NO: 37534920 NR Description: putative glycine-rich protein
  misc_feature (30)..(218): NCBI GI NO: 7636182 NR Description: glycine-rich protein [Triticum aestivum]
  misc_feature (16)..(217): NCBI GI NO: 34898126 NR Description: putative glycine-rich cell wall protein precursor
  misc_feature (35)..(211): NCBI GI NO: 7442081 NR Description: glycine-rich protein grp3 - maize
  misc_feature (29)..(217): NCBI GI NO: 322647 NR Description: glycine-rich protein GRP22 - rape
  misc_feature (30)..(217): NCBI GI NO: 121627 NR Description: GLYCINE-RICH CELL WALL STRUCTURAL PROTEIN 1PRECURSOR
MATNTKLVALGLAVLVSVGFSDAARVVRLGSYASAGGGGGGGGGGSGSTGAAGYGGGSGGGGGYGIGKGGGDWWNNFVSSVAGGGGGGQGGGGGTNGGSGSGGGSGYGSGTSSTAASGPSSGNYANAEGKGAGGGMGGGADGAYGSGAGGGVGKGQGESGVALAPSSDGYYNGGAADATGGGSGAGGGHGGGAGAPSYGTGGGLGGGKGEAGSDGPGVQVTRRESVLALAAAVAADSKAPLVVAVALGPDPAAVESTEFPCGMQLDGALGV

SEQ ID NO: 32549 - protein, 180 aa, Zea mays subsp. mays
  peptide (1)..(180): Ceres Seq. ID no. 12406407
MVLAPVPPQPLAPAVATTPTLRARAPVGAWAAVPMAPTVLVPVEALARARARVASHWHRRPMATTMAAPLMLPVVVPALAVDMAVAPELQATGLEVALAEARARPAATVLGFRLRGGNRCWHWRRRWRRIPRRLWWWRWLWVRIRQRWNPLSFPAACSWTERSACSVSPFWSRFVYLSFP

SEQ ID NO: 32550 - protein, 146 aa, Zea mays subsp. mays
  peptide (1)..(146): Ceres Seq. ID no. 12406408
MAPTVLVPVEALARARARVASHWHRRPMATTMAAPLMLPVVVPALAVDMAVAPELQATGLEVALAEARARPAATVLGFRLRGGNRCWHWRRRWRRIPRRLWWWRWLWVRIRQRWNPLSFPAACSWTERSACSVSPFWSRFVYLSFP

SEQ ID NO: 32551 - DNA, 1376 bp, Zea mays subsp. mays
  misc_feature (1)..(1376): Ceres Seq. ID no. 12355631
aagggcggcggttacttgtcccgctccaactacaaagcccagactgcccagtccgcatccccagcagccgtgacaccgcgccacagcagcctcggcgctgcgtttctgccttcccggtgagacaaatggccgccagcgccaccgacgccgacgccggcgccgggctcagatcggagttcctgcaggtcctgctcagccgccgccgcgatctccaagtgcctctctcggtggagcaagggagtccggtgaaggacccgatgtaccagaatcctccgtccaccatggaggcaaatccgatggagtcgtgccccagtaaagatgtggagaacttgagggagaagctggttgaagaaaatttctacctaatcactgagctaggtgaacaaggacgagtacctgtacttctgctgaagcttgacgaccccgttcctagaagaaaaccagctatcgtgttcctgcacagctcttacaagtgcaaagagtggctgcgcccactgcttgaggcatatgcttccaagggctacgtctgtgtggctattgactcgcgctatcacggcgaaagggccagcaatgaaaccacttacatagaggcactgaaatcggcttggcggaatggggatacaatgcctttcatttttgacacggtgtgggacttggtaaagcttggagactacctcggcgagagggaggacgtggatccctctagggttgggatcacaggcgaatcgctgggagggatgcacgcgtggtttgctgcttttgtggacacacggtacagtgtcgtcgttcctatcatcggtgttcagggattcaggtgggccattgacaacaacaagtggctggctagggtgaatagcataaggcctttatttgaagaagcaggaattgacttaggaaagagcgaattagatacagaagttgttgaaaaggtttgggaaaagatagcaccaggtctggactcgcaatttgatgccccctattcacttcctttgcttgcaccacggccgctgctacttctaaatggcgctgaagatcctcattgcccaataagtggtttaggagaagctatttcaaaaactgctaaagcttacgaagaatctggttgcgcggagaagttcatgttcattgcagagcctggagtcggccataaaatcacaatcgacatggtgaaggcagcaagcgaatggttcgatcgcttcctgcatgcatgaatgcaaaagttattgtcgcccatcatttgttctatatcgattgtgatttgtcaacagcatccagtatgtatgtcctcgtctatgtaccttagtaattgcgggtcggacaaatatctgtatctatatctttagtatattaaagcactagttttgacggtcgtccgc

SEQ ID NO: 32552 - protein, 402 aa, Zea mays subsp. mays
  peptide (1)..(402): Ceres Seq. ID no. 12355632
  misc_feature (195)..(400): NCBI GI NO: 34898368 NR Description: ESTs C19441
  misc_feature (41)..(171): NCBI GI NO: 34898368 NR Description: ESTs C19441
  misc_feature (56)..(400): NCBI GI NO: 30689997 NR Description: expressed protein [Arabidopsis thaliana]
  misc_feature (127)..(246): NCBI GI NO: 23098650 NR Description: hypothetical protein
  misc_feature (331)..(400): NCBI GI NO: 23098650 NR Description: hypothetical protein
GRRLLVPLQLQSPDCPVRIPSSRDTAPQQPRRCVSAFPVRQMAASATDADAGAGLRSEFLQVLLSRRRDLQVPLSVEQGSPVKDPMYQNPPSTMEANPMESCPSKDVENLREKLVEENFYLITELGEQGRVPVLLLKLDDPVPRRKPAIVFLHSSYKCKEWLRPLLEAYASKGYVCVAIDSRYHGERASNETTYIEALKSAWRNGDTMPFIFDTVWDLVKLGDYLGEREDVDPSRVGITGESLGGMHAWFAAFVDTRYSVVVPIIGVQGFRWAIDNNKWLARVNSIRPLFEEAGIDLGKSELDTEVVEKVWEKIAPGLDSQFDAPYSLPLLAPRPLLLLNGAEDPHCPISGLGEAISKTAKAYEESGCAEKFMFIAEPGVGHKITIDMVKAASEWFDRFLHA

SEQ ID NO: 32553 - protein, 361 aa, Zea mays subsp. mays
  peptide (1)..(361): Ceres Seq. ID no. 12355633
  misc_feature (154)..(359): NCBI GI NO: 34898368 NR Description: ESTs C19441
  misc_feature (1)..(130): NCBI GI NO: 34898368 NR Description: ESTs C19441
  misc_feature (15)..(359): NCBI GI NO: 30689997 NR Description: expressed protein [Arabidopsis thaliana]
  misc_feature (86)..(205): NCBI GI NO: 23098650 NR Description: hypothetical protein
  misc_feature (290)..(359): NCBI GI NO: 23098650 NR Description: hypothetical protein
MAASATDADAGAGLRSEFLQVLLSRRRDLQVPLSVEQGSPVKDPMYQNPPSTMEANPMESCPSKDVENLREKLVEENFYLITELGEQGRVPVLLLKLDDPVPRRKPAIVFLHSSYKCKEWLRPLLEAYASKGYVCVAIDSRYHGERASNETTYIEALKSAWRNGDTMPFIFDTVWDLVKLGDYLGEREDVDPSRVGITGESLGGMHAWFAAFVDTRYSVVVPIIGVQGFRWAIDNNKWLARVNSIRPLFEEAGIDLGKSELDTEVVEKVWEKIAPGLDSQFDAPYSLPLLAPRPLLLLNGAEDPHCPISGLGEAISKTAKAYEESGCAEKFMFIAEPGVGHKITIDMVKAASEWFDRFLHA

SEQ ID NO: 32554 - protein, 317 aa, Zea mays subsp. mays
  peptide (1)..(317): Ceres Seq. ID no. 12355634
  misc_feature (110)..(315): NCBI GI NO: 34898368 NR Description: ESTs C19441
  misc_feature (1)..(86): NCBI GI NO: 34898368 NR Description: ESTs C19441
  misc_feature (1)..(315): NCBI GI NO: 30689997 NR Description: expressed protein [Arabidopsis thaliana]
  misc_feature (42)..(161): NCBI GI NO: 23098650 NR Description: hypothetical protein
  misc_feature (246)..(315): NCBI GI NO: 23098650 NR Description: hypothetical protein
MYQNPPSTMEANPMESCPSKDVENLREKLVEENFYLITELGEQGRVPVLLLKLDDPVPRRKPAIVFLHSSYKCKEWLRPLLEAYASKGYVCVAIDSRYHGERASNETTYIEALKSAWRNGDTMPFIFDTVWDLVKLGDYLGEREDVDPSRVGITGESLGGMHAWFAAFVDTRYSVVVPIIGVQGFRWAIDNNKWLARVNSIRPLFEEAGIDLGKSELDTEVVEKVWEKIAPGLDSQFDAPYSLPLLAPRPLLLLNGAEDPHCPISGLGEAISKTAKAYEESGCAEKFMFIAEPGVGHKITIDMVKAASEWFDRFLHA

SEQ ID NO: 32555 - DNA, 1413 bp, Zea mays subsp. mays
  misc_feature (1)..(1413): Ceres Seq. ID no. 12345577
gactgcgaacccgatctcgattcgatccccaagccatcccatggcggctgccctctcctcgcggcgtgccctgcacagcctccaccgccgcctcctcttccacccctccccctcacccgccgccgcacgccgcgcgctacccacttccactcgcagccccatccccgcacactcccccaccttctccttctccttctactcctcctcccgcttcttcaccaccgcgcgccccgatgcgaggctgcggcacgggatgctgccgcagcggctgataggcggggtcaggtcggtggcgaacggtgggtcgaaactgggaccgctgggtcagggggtcaaggggctggggcggcccatggaggcggcgaggagccgcggccgcgcggtaccgcgcggccgtcggcctgcaggtcgaggccttctggcggcgcaactccatgatcctcgtcggtgcggggggagtcatcgtctgtttcttgctctggaggatcatgttcggcatcgccagcaccttcgtcggcctctccgagggtatggccaagtacggcttcctcgcccttgccaccgccattgtcgcctttgccggtatgtatgcccgggcaaggttaaccataaaccctgacaaggtttaccggctggctatgacaaaactcaatacatctgctgccatccttgaagttatgggtgcgcccctaactggtactgatgtcagagcatatgttatgtctggaggaggcccgaaactgaaggacttcaaatttaagattggcagtaaacggtgcttcctcattttccccatcaaaggatcagaaagaaggggcctcgtaagtgttgaggccaagaagaaaaatggacagtatgacatgaagctactagctgttgacataccaatggcatcaggtcctgaccagcggctgttcctcgtcggtgatgaacaagagtacaaggtgggcgggggcttgatatctgagctgcgagacccgatcgtaaaagctatggccgcggagaaggagtttgactatctcgacgagagagaggatgaggaggacgagcggagggagcgtgaggaggcggagcaagaggaagcggaagcattgaggcgcgaggaggaaaggctgcgccaggagggtgaagagcgtaggcggcgggaggaggctgagagcctggagaaagctacgtgacatgacttactgtactgactttccaccttgccttgtgcattgtcttctacctctgtctctaccggagtgtagcgatcagcggtttccacagcaggagattgcttccgagttcacttgagtttctggtggtcagttcggcgtcactagtctcaaagttgttgagaagaaaggaataattttgacggttacgcgacaggtcacttcggcgaagcaatgtaatttatagtggttgatc

SEQ ID NO: 32556 - protein, 247 aa, Zea mays subsp. mays
  peptide (1)..(247): Ceres Seq. ID no. 12345578
  misc_feature (196)..(247): Pfam Name: Pfam Description:  Atrophin-1 family
  misc_feature (1)..(247): NCBI GI NO: 34896160 NR Description: hypothetical protein~similar to Arabidopsisthaliana chromosome 3
  misc_feature (1)..(245): NCBI GI NO: 15228922 NR Description: putative protein; protein id: At3g56430.1
  misc_feature (1)..(231): NCBI GI NO: 15226745 NR Description: unknown protein; protein id: At2g40800
  misc_feature (190)..(245): NCBI GI NO: 3168604 NR Description: proline and glutamic acid rich nuclear proteinisoform
  misc_feature (190)..(245): NCBI GI NO: 34783134 NR Description: Unknown (protein for IMAGE:4156419) [Homo sapiens]
  misc_feature (190)..(245): NCBI GI NO: 24415383 NR Description: proline and glutamic acid rich nuclear protein
  misc_feature (190)..(245): NCBI GI NO: 21426922 NR Description: PELP1 [Homo sapiens]
  misc_feature (172)..(244): NCBI GI NO: 16741201 NR Description: Unknown (protein for MGC:25365) [Mus musculus]
  misc_feature (190)..(245): NCBI GI NO: 16741201 NR Description: Unknown (protein for MGC:25365) [Mus musculus]
  misc_feature (190)..(244): NCBI GI NO: 16741201 NR Description: Unknown (protein for MGC:25365) [Mus musculus]
MILVGAGGVIVCFLLWRIMFGIASTFVGLSEGMAKYGFLALATAIVAFAGMYARARLTINPDKVYRLAMTKLNTSAAILEVMGAPLTGTDVRAYVMSGGGPKLKDFKFKIGSKRCFLIFPIKGSERRGLVSVEAKKKNGQYDMKLLAVDIPMASGPDQRLFLVGDEQEYKVGGGLISELRDPIVKAMAAEKEFDYLDEREDEEDERREREEAEQEEAEALRREEERLRQEGEERRRREEAESLEKAT

SEQ ID NO: 32557 - protein, 229 aa, Zea mays subsp. mays
  peptide (1)..(229): Ceres Seq. ID no. 12345579
  misc_feature (178)..(229): Pfam Name: Pfam Description:  Atrophin-1 family
  misc_feature (1)..(229): NCBI GI NO: 34896160 NR Description: hypothetical protein~similar to Arabidopsisthaliana chromosome 3
  misc_feature (1)..(227): NCBI GI NO: 15228922 NR Description: putative protein; protein id: At3g56430.1
  misc_feature (1)..(213): NCBI GI NO: 15226745 NR Description: unknown protein; protein id: At2g40800
  misc_feature (172)..(227): NCBI GI NO: 3168604 NR Description: proline and glutamic acid rich nuclear proteinisoform
  misc_feature (172)..(227): NCBI GI NO: 34783134 NR Description: Unknown (protein for IMAGE:4156419) [Homo sapiens]
  misc_feature (172)..(227): NCBI GI NO: 24415383 NR Description: proline and glutamic acid rich nuclear protein
  misc_feature (172)..(227): NCBI GI NO: 21426922 NR Description: PELP1 [Homo sapiens]
  misc_feature (154)..(226): NCBI GI NO: 16741201 NR Description: Unknown (protein for MGC:25365) [Mus musculus]
  misc_feature (172)..(227): NCBI GI NO: 16741201 NR Description: Unknown (protein for MGC:25365) [Mus musculus]
  misc_feature (172)..(226): NCBI GI NO: 16741201 NR Description: Unknown (protein for MGC:25365) [Mus musculus]
MFGIASTFVGLSEGMAKYGFLALATAIVAFAGMYARARLTINPDKVYRLAMTKLNTSAAILEVMGAPLTGTDVRAYVMSGGGPKLKDFKFKIGSKRCFLIFPIKGSERRGLVSVEAKKKNGQYDMKLLAVDIPMASGPDQRLFLVGDEQEYKVGGGLISELRDPIVKAMAAEKEFDYLDEREDEEDERREREEAEQEEAEALRREEERLRQEGEERRRREEAESLEKAT

SEQ ID NO: 32558 - protein, 215 aa, Zea mays subsp. mays
  peptide (1)..(215): Ceres Seq. ID no. 12345580
  misc_feature (164)..(215): Pfam Name: Pfam Description:  Atrophin-1 family
  misc_feature (1)..(215): NCBI GI NO: 34896160 NR Description: hypothetical protein~similar to Arabidopsisthaliana chromosome 3
  misc_feature (1)..(213): NCBI GI NO: 15228922 NR Description: putative protein; protein id: At3g56430.1
  misc_feature (1)..(199): NCBI GI NO: 15226745 NR Description: unknown protein; protein id: At2g40800
  misc_feature (158)..(213): NCBI GI NO: 3168604 NR Description: proline and glutamic acid rich nuclear proteinisoform
  misc_feature (158)..(213): NCBI GI NO: 34783134 NR Description: Unknown (protein for IMAGE:4156419) [Homo sapiens]
  misc_feature (158)..(213): NCBI GI NO: 24415383 NR Description: proline and glutamic acid rich nuclear protein
  misc_feature (158)..(213): NCBI GI NO: 21426922 NR Description: PELP1 [Homo sapiens]
  misc_feature (140)..(212): NCBI GI NO: 16741201 NR Description: Unknown (protein for MGC:25365) [Mus musculus]
  misc_feature (158)..(213): NCBI GI NO: 16741201 NR Description: Unknown (protein for MGC:25365) [Mus musculus]
  misc_feature (158)..(212): NCBI GI NO: 16741201 NR Description: Unknown (protein for MGC:25365) [Mus musculus]
MAKYGFLALATAIVAFAGMYARARLTINPDKVYRLAMTKLNTSAAILEVMGAPLTGTDVRAYVMSGGGPKLKDFKFKIGSKRCFLIFPIKGSERRGLVSVEAKKKNGQYDMKLLAVDIPMASGPDQRLFLVGDEQEYKVGGGLISELRDPIVKAMAAEKEFDYLDEREDEEDERREREEAEQEEAEALRREEERLRQEGEERRRREEAESLEKAT

SEQ ID NO: 32559 - DNA, 1003 bp, Zea mays subsp. mays
  misc_feature (1)..(1003): Ceres Seq. ID no. 12363103
gatggctgcgttcttgggctgggaaccaatggccaaaggcccaaaggccaaagctgaagaatggtgcgcgtgcgtgcaggagctccagtgaagctggagaaccactcgttccggctggccgagtcgatgccccccatggacgccgtcttcctggcgtggaactacatgggcaaccgcgacgtcgagcgcatggtcttccactacctgaccaccactgcgtgggccgccgtggctaaggcggacgtcgtcctctgcaacaccttcgaggacctcgagccggacatcttcggcgcccactccccggcggccgcctccatcctcccgatcggcccgctgcgcacctggcagcgccggacgagcgaggcgccggccgggcacttttggcgcgccgacgacgaggcctgcgcgtccttcctggacgcgcagccccgtgggtccgtgacgtacgtggcgttcgggagcctgacggtcatgagccccgcgcagctccaggagctcgcgctggccctgctggcctccgcccgccccttcctgtgggtgttccggccagggctggcggccgagctcccgcccgcgttcacggatctcctgccacgccatgcgaggggcaaggtggtggagtgggcgccgcaggagaaagtgctcgcgcaccctgctgtcggctgcttcctgacgcattgcgggtggaactcgacgctggagggcgtccgccatggcgtgcctttgctttgctggccctactttagcgaccagttcacgaaccaggcatacatttgtgatatctggaaggtggggttaagggtggtgcccgacggtggtgatggcattgtcgccaaggaaaggatcatggagaggttgacgagcctaatgggtgacagtggtgtgaaggaaagggtgaaaagattgaaggaattggcagagaggagcatggggcctgagggcaaatctttgaagaacatcaacgccttcatggaatccatgacgaagtgattgttattgtgtt

SEQ ID NO: 32560 - protein, 309 aa, Zea mays subsp. mays
  peptide (1)..(309): Ceres Seq. ID no. 12363104
  misc_feature (12)..(306): Pfam Name: Pfam Description:  UDP-glucoronosyl and UDP-glucosyl transferase
  misc_feature (26)..(309): NCBI GI NO: 37532704 NR Description: putative glucosyltransferase
  misc_feature (12)..(307): NCBI GI NO: 37532896 NR Description: putative glucosyltransferase
  misc_feature (23)..(307): NCBI GI NO: 37532892 NR Description: hypothetical protein
  misc_feature (16)..(305): NCBI GI NO: 21326125 NR Description: putative glucosyl transferase [Sorghum bicolor]
  misc_feature (7)..(305): NCBI GI NO: 21326124 NR Description: putative glucosyl transferase [Sorghum bicolor]
  misc_feature (23)..(308): NCBI GI NO: 37532898 NR Description: putative glucosyltransferase
  misc_feature (16)..(305): NCBI GI NO: 13236658 NR Description: putative glucosyltransferase [Oryza sativa]
  misc_feature (7)..(309): NCBI GI NO: 13236659 NR Description: putative glucosyltransferase [Oryza sativa]
  misc_feature (7)..(309): NCBI GI NO: 13236656 NR Description: putative glucosyltransferase [Oryza sativa]
  misc_feature (14)..(304): NCBI GI NO: 13236653 NR Description: putative glucosyltransferase [Oryza sativa]
MVRVRAGAPVKLENHSFRLAESMPPMDAVFLAWNYMGNRDVERMVFHYLTTTAWAAVAKADVVLCNTFEDLEPDIFGAHSPAAASILPIGPLRTWQRRTSEAPAGHFWRADDEACASFLDAQPRGSVTYVAFGSLTVMSPAQLQELALALLASARPFLWVFRPGLAAELPPAFTDLLPRHARGKVVEWAPQEKVLAHPAVGCFLTHCGWNSTLEGVRHGVPLLCWPYFSDQFTNQAYICDIWKVGLRVVPDGGDGIVAKERIMERLTSLMGDSGVKERVKRLKELAERSMGPEGKSLKNINAFMESMTK

SEQ ID NO: 32561 - protein, 287 aa, Zea mays subsp. mays
  peptide (1)..(287): Ceres Seq. ID no. 12363105
  misc_feature (1)..(284): Pfam Name: Pfam Description:  UDP-glucoronosyl and UDP-glucosyl transferase
  misc_feature (4)..(287): NCBI GI NO: 37532704 NR Description: putative glucosyltransferase
  misc_feature (1)..(285): NCBI GI NO: 37532896 NR Description: putative glucosyltransferase
  misc_feature (1)..(285): NCBI GI NO: 37532892 NR Description: hypothetical protein
  misc_feature (1)..(283): NCBI GI NO: 21326125 NR Description: putative glucosyl transferase [Sorghum bicolor]
  misc_feature (1)..(283): NCBI GI NO: 21326124 NR Description: putative glucosyl transferase [Sorghum bicolor]
  misc_feature (1)..(286): NCBI GI NO: 37532898 NR Description: putative glucosyltransferase
  misc_feature (1)..(283): NCBI GI NO: 13236658 NR Description: putative glucosyltransferase [Oryza sativa]
  misc_feature (1)..(287): NCBI GI NO: 13236659 NR Description: putative glucosyltransferase [Oryza sativa]
  misc_feature (1)..(287): NCBI GI NO: 13236656 NR Description: putative glucosyltransferase [Oryza sativa]
  misc_feature (1)..(282): NCBI GI NO: 13236653 NR Description: putative glucosyltransferase [Oryza sativa]
MPPMDAVFLAWNYMGNRDVERMVFHYLTTTAWAAVAKADVVLCNTFEDLEPDIFGAHSPAAASILPIGPLRTWQRRTSEAPAGHFWRADDEACASFLDAQPRGSVTYVAFGSLTVMSPAQLQELALALLASARPFLWVFRPGLAAELPPAFTDLLPRHARGKVVEWAPQEKVLAHPAVGCFLTHCGWNSTLEGVRHGVPLLCWPYFSDQFTNQAYICDIWKVGLRVVPDGGDGIVAKERIMERLTSLMGDSGVKERVKRLKELAERSMGPEGKSLKNINAFMESMTK

SEQ ID NO: 32562 - protein, 284 aa, Zea mays subsp. mays
  peptide (1)..(284): Ceres Seq. ID no. 12363106
  misc_feature (1)..(281): Pfam Name: Pfam Description:  UDP-glucoronosyl and UDP-glucosyl transferase
  misc_feature (1)..(284): NCBI GI NO: 37532704 NR Description: putative glucosyltransferase
  misc_feature (1)..(282): NCBI GI NO: 37532896 NR Description: putative glucosyltransferase
  misc_feature (1)..(282): NCBI GI NO: 37532892 NR Description: hypothetical protein
  misc_feature (1)..(280): NCBI GI NO: 21326125 NR Description: putative glucosyl transferase [Sorghum bicolor]
  misc_feature (1)..(280): NCBI GI NO: 21326124 NR Description: putative glucosyl transferase [Sorghum bicolor]
  misc_feature (1)..(283): NCBI GI NO: 37532898 NR Description: putative glucosyltransferase
  misc_feature (1)..(280): NCBI GI NO: 13236658 NR Description: putative glucosyltransferase [Oryza sativa]
  misc_feature (1)..(284): NCBI GI NO: 13236659 NR Description: putative glucosyltransferase [Oryza sativa]
  misc_feature (1)..(284): NCBI GI NO: 13236656 NR Description: putative glucosyltransferase [Oryza sativa]
  misc_feature (1)..(279): NCBI GI NO: 13236653 NR Description: putative glucosyltransferase [Oryza sativa]
MDAVFLAWNYMGNRDVERMVFHYLTTTAWAAVAKADVVLCNTFEDLEPDIFGAHSPAAASILPIGPLRTWQRRTSEAPAGHFWRADDEACASFLDAQPRGSVTYVAFGSLTVMSPAQLQELALALLASARPFLWVFRPGLAAELPPAFTDLLPRHARGKVVEWAPQEKVLAHPAVGCFLTHCGWNSTLEGVRHGVPLLCWPYFSDQFTNQAYICDIWKVGLRVVPDGGDGIVAKERIMERLTSLMGDSGVKERVKRLKELAERSMGPEGKSLKNINAFMESMTK

SEQ ID NO: 32563 - DNA, 1753 bp, Zea mays subsp. mays
  misc_feature (1)..(1753): Ceres Seq. ID no. 12413795
ccccctgccccacactttagcccaaggaggccggcctcgcctcgcctcgcttcatacgcccgcccgcccctgccgatccatccacctaataaagcgcctgtacagatccaacccttaggatccggatcgccttacccccccgcgacgatttgcgcgattcgattcgattatcctccgattttccccggtttttgtaggtttcctctctttttcgatcggtgtgctagggtttggacgcgcggaggcgtcgcattccagggtaatcattggttcgacgggctagggtgctttctcacccggggaacggaagcgaatccagacgatggagaagaagaaggtggcgataccgctggtgtgccacggccactcgcggccggtggtggacctcttctacagccccgtcacacccgatggctacttcctcatcagcgccagcaaggatacaaatccaatgcttcgtaatggtgagactggcgactggattgggacttttcaaggtcataaaggagctgtttggagctgttgccttgacaggaatgctctgagggctgcatctgcttctgctgacttttcagctaaagtatgggatgcacttactggggatgagctacattcatttgaacacaagcatatagttcgggcgtgtgccttctctgaggatacacaccttttactcactggaggcatggaaaagattttgcgtgtgtatgatatgaatcgtcctgatgcagctccaagagagcttgacaaatcacctggttccgttcgaactgctgcttggcttcatagtgaccaaactatattgagttcctgcactgacatgggtggagtaaggctgtgggatgtgagaactggaaaaaatgtccaaactcttgaaaccaaggcttctgtcactagtgcagaagtaagccaggatggcaggttcatcactactgctgatggctcaagtgtaaaattctgggacgcgaatcactttggccttgttaaaagctatgatatgccatgcaatgtggaatcggcttcacttgaacctaagtctgggagtaaatttgtcgctggaggagaagatttatgggttcatgtatttgatttcttcactggtgaagaaatagcttgtaacaaaggacatcatggtccagtccactgtgtccggtttgcaccttgtggtgaatcatacgcatcgggttcagaagatggcaccattcggatctggcagcttagcccggctaatgctgatgacaatgaggtggccaatgcaaatggcaagacaactgctggggtaaacgaagttacaaccaagatcgaaggcttccacattcccaaggaggggcagaccgaggggtaggatctcatgtgttttgtggtgcttgtggttcttattgcgaggagattgccaccagagctgcagtggtcattcagtttccctctgcggagtcatcatgtctgcgatccaagggtatcctggcttcatgagtcatcatccactggggaaaaacaagcaagcaaatggtggtgggtttttggatggggccctcgctttgatagaacatagcaattgtagcgtcaaaaataaacaatagttgggtagtttaggtaccgtgtttgcgttcattaaagtgaagtattctgtatcccctaaaaaaaacacttgaggccttcatcgttggaacaccgaccttcaaagctgtagaccacttcttgatcctgaggtagttctggagcgtcatgcctatcaaatgacagatttctgtcc

SEQ ID NO: 32564 - protein, 340 aa, Zea mays subsp. mays
  peptide (1)..(340): Ceres Seq. ID no. 12413796
  misc_feature (1)..(338): NCBI GI NO: 30695318 NR Description: transducin / WD-40 repeat protein family
  misc_feature (1)..(338): NCBI GI NO: 18400838 NR Description: expressed protein; protein id: At3g15610
  misc_feature (9)..(335): NCBI GI NO: 18394249 NR Description: expressed protein; protein id: At1g15470
  misc_feature (1)..(263): NCBI GI NO: 15219076 NR Description: unknown protein; protein id: At1g52730.1
  misc_feature (9)..(298): NCBI GI NO: 29437263 NR Description: Similar to serine/threonine kinase receptorassociated protein
  misc_feature (9)..(298): NCBI GI NO: 12667270 NR Description: serine-threonine kinase receptor-associated
  misc_feature (9)..(298): NCBI GI NO: 4519417 NR Description: WD-40 repeat protein [Homo sapiens]
  misc_feature (9)..(298): NCBI GI NO: 12643951 NR Description: UNR-interacting protein
  misc_feature (9)..(298): NCBI GI NO: 20149592 NR Description: unr-interacting protein [Homo sapiens]
  misc_feature (9)..(298): NCBI GI NO: 6755682 NR Description: serine/threonine kinase receptor associated
MEKKKVAIPLVCHGHSRPVVDLFYSPVTPDGYFLISASKDTNPMLRNGETGDWIGTFQGHKGAVWSCCLDRNALRAASASADFSAKVWDALTGDELHSFEHKHIVRACAFSEDTHLLLTGGMEKILRVYDMNRPDAAPRELDKSPGSVRTAAWLHSDQTILSSCTDMGGVRLWDVRTGKNVQTLETKASVTSAEVSQDGRFITTADGSSVKFWDANHFGLVKSYDMPCNVESASLEPKSGSKFVAGGEDLWVHVFDFFTGEEIACNKGHHGPVHCVRFAPCGESYASGSEDGTIRIWQLSPANADDNEVANANGKTTAGVNEVTTKIEGFHIPKEGQTEG

SEQ ID NO: 32565 - protein, 297 aa, Zea mays subsp. mays
  peptide (1)..(297): Ceres Seq. ID no. 12413797
  misc_feature (1)..(295): NCBI GI NO: 30695318 NR Description: transducin / WD-40 repeat protein family
  misc_feature (1)..(295): NCBI GI NO: 18400838 NR Description: expressed protein; protein id: At3g15610
  misc_feature (1)..(292): NCBI GI NO: 18394249 NR Description: expressed protein; protein id: At1g15470
  misc_feature (1)..(220): NCBI GI NO: 15219076 NR Description: unknown protein; protein id: At1g52730.1
  misc_feature (1)..(255): NCBI GI NO: 29437263 NR Description: Similar to serine/threonine kinase receptorassociated protein
  misc_feature (1)..(255): NCBI GI NO: 12667270 NR Description: serine-threonine kinase receptor-associated
  misc_feature (1)..(255): NCBI GI NO: 4519417 NR Description: WD-40 repeat protein [Homo sapiens]
  misc_feature (1)..(255): NCBI GI NO: 12643951 NR Description: UNR-interacting protein
  misc_feature (1)..(255): NCBI GI NO: 20149592 NR Description: unr-interacting protein [Homo sapiens]
  misc_feature (1)..(255): NCBI GI NO: 6755682 NR Description: serine/threonine kinase receptor associated
MLRNGETGDWIGTFQGHKGAVWSCCLDRNALRAASASADFSAKVWDALTGDELHSFEHKHIVRACAFSEDTHLLLTGGMEKILRVYDMNRPDAAPRELDKSPGSVRTAAWLHSDQTILSSCTDMGGVRLWDVRTGKNVQTLETKASVTSAEVSQDGRFITTADGSSVKFWDANHFGLVKSYDMPCNVESASLEPKSGSKFVAGGEDLWVHVFDFFTGEEIACNKGHHGPVHCVRFAPCGESYASGSEDGTIRIWQLSPANADDNEVANANGKTTAGVNEVTTKIEGFHIPKEGQTEG

SEQ ID NO: 32566 - protein, 219 aa, Zea mays subsp. mays
  peptide (1)..(219): Ceres Seq. ID no. 12413798
  misc_feature (1)..(217): NCBI GI NO: 30695318 NR Description: transducin / WD-40 repeat protein family
  misc_feature (1)..(217): NCBI GI NO: 18400838 NR Description: expressed protein; protein id: At3g15610
  misc_feature (1)..(214): NCBI GI NO: 18394249 NR Description: expressed protein; protein id: At1g15470
  misc_feature (1)..(142): NCBI GI NO: 15219076 NR Description: unknown protein; protein id: At1g52730.1
  misc_feature (1)..(177): NCBI GI NO: 29437263 NR Description: Similar to serine/threonine kinase receptorassociated protein
  misc_feature (1)..(177): NCBI GI NO: 12667270 NR Description: serine-threonine kinase receptor-associated
  misc_feature (1)..(177): NCBI GI NO: 4519417 NR Description: WD-40 repeat protein [Homo sapiens]
  misc_feature (1)..(177): NCBI GI NO: 12643951 NR Description: UNR-interacting protein
  misc_feature (1)..(177): NCBI GI NO: 20149592 NR Description: unr-interacting protein [Homo sapiens]
  misc_feature (1)..(177): NCBI GI NO: 6755682 NR Description: serine/threonine kinase receptor associated
MEKILRVYDMNRPDAAPRELDKSPGSVRTAAWLHSDQTILSSCTDMGGVRLWDVRTGKNVQTLETKASVTSAEVSQDGRFITTADGSSVKFWDANHFGLVKSYDMPCNVESASLEPKSGSKFVAGGEDLWVHVFDFFTGEEIACNKGHHGPVHCVRFAPCGESYASGSEDGTIRIWQLSPANADDNEVANANGKTTAGVNEVTTKIEGFHIPKEGQTEG

SEQ ID NO: 32567 - DNA, 1957 bp, Zea mays subsp. mays
  misc_feature (1)..(1957): Ceres Seq. ID no. 12423946
aagcgtcctcggatccacgtccaccgcgtcgccgtagtccgtagaggtcgccgccgccgagcaagctgctgtcaccaacgacagcgaggccgccacgctccgcagcgaggttgagcgcctcgagggtctcctcgccgcggagaaggctagccatgaggaggagatgcgcaggggtgcatggctcggggaccagctgcagaccgcgtaccaggagaaggccgccctcgaggaggagatcgagaccctgaagggttccgccactgccgagggcaagggcatggaagagggatgtgattctgttgctgctagggccaggacgcctaaggatcagggcgtggtgcctcccgcactggtccgcggctgctggagcagctgccacggctggcatcgcagtggtcttgtttaacctcaagaggtaatctggtggtccgatgcgcggaagttttgatctgctgctatggcctatatgagaataggcctacatgtatggcaagtacctttactttctgaagttttcaatggtaataagagtcgtgaacacaaacatgaggtataattgagttcttgtctgatcttttgagttgcacctgatcttttgagttcttgtcttggttcgttcttgattcttggacgaggtgggatttggagagccaagggcggcgcggcagcagcgggtttctcggtcggactagattgtttccatcgagatggtgggcggcggagggcattcgtcgatggaccaccctggcgccaaggacctcgagcgcggcgagctgcgccgtggcgcgcctgagtttgcggacggcgacgatggagacggggaagaaagccagtacttctcggacgcggaggaccggttcgtggccgtcgcactcgcgccacgactccaccgcctacgaggactacgtctcgctgtgcgtgtccgcccgcgcgagctccgtcgacgccgacgccgatgccgacggcgaggccgtcagacaacactgcaggaagtcgtcgtgcgtgtcagagggctcgctggacgacgttgacctggaggccggactgagcgagatcatcaaggccagccctgagaaggccgaacagaactgtcgcatttgccaccttggcctggagagcacggcggtcgagtccggtgccggcatcacgctcggctgctcctgcaagggggacttatcctacgcccacaagcagtgcgccgacacctggttcaagatcagaggcaacaaatgccaatcggctggagtagacaccctgtttgtggaaggaggtaccatttcataattcggaatgaatacaaaacctgcaagcattgtgaccattgtgggcttatggcccagtcgtttggaacacggtgctcgacatgcaaatatgtgatctcctctgatgatccggaagattgggactataggcagttggataatccacgtcacttgctgcatgcaaatcagaacattcatccagatgaggactaacttgaaggtggtcgataactctggggccaagtgagtgatgtgcatccagtccctgagggggaagaaaggagcaaggctcggggacatgatcatcggatccgtaaaggaggcccagcctcgtggcaaggtcaagaaagaagacgtagtctacggcgtggtcgtccgcgccgccatgaagaaagggcgcagcgacggcagcgaggtccagttcgacgacaacgaggtggtcctcgtgaacaagaagggtgagctgatcggcacccgcgtcttcggccccgtcccccacgagctgaggaagaagaagcacctcaagatcctggccctggctgaacacatcgtttgaggtgtgtcgcagagccaagagccaagtgtttatgggaatgtttttttgtctgtgttctctgtttgaataatgcattgtgaaacgatagcatggaccgtttgaactattttgatgatattgctcgcccatttggatggtc

SEQ ID NO: 32568 - protein, 157 aa, Zea mays subsp. mays
  peptide (1)..(157): Ceres Seq. ID no. 12423947
  misc_feature (94)..(142): Pfam Name: RING finger Pfam Description: Zinc finger, C3HC4 type
  misc_feature (17)..(157): NCBI GI NO: 34908318 NR Description: P0529H11.12
  misc_feature (30)..(145): NCBI GI NO: 15239254 NR Description: putative protein; protein id: At5g05830.1
  misc_feature (30)..(143): NCBI GI NO: 15224415 NR Description: unknown protein; protein id: At2g37950.1
  misc_feature (84)..(157): NCBI GI NO: 9759231 NR Description: gb|AAD32776
  misc_feature (109)..(157): NCBI GI NO: 15237796 NR Description: putative protein; protein id: At5g59000
  misc_feature (109)..(157): NCBI GI NO: 21537129 NR Description: unknown [Arabidopsis thaliana]
METGKKASTSRTRRTGSWPSHSRHDSTAYEDYVSLCVSARASSVDADADADGEAVRQHCRKSSCVSEGSLDDVDLEAGLSEIIKASPEKAEQNCRICHLGLESTAVESGAGITLGCSCKGDLSYAHKQCADTWFKIRGNKCQSAGVDTLFVEGGTIS

SEQ ID NO: 32569 - protein, 107 aa, Zea mays subsp. mays
  peptide (1)..(107): Ceres Seq. ID no. 12423948
MVGGGGHSSMDHPGAKDLERGELRRGAPEFADGDDGDGEESQYFSDAEDRFVAVALAPRLHRLRGLRLAVRVRPRELRRRRRRCRRRGRQTTLQEVVVRVRGLAGRR

SEQ ID NO: 32570 - protein, 101 aa, Zea mays subsp. mays
  peptide (1)..(101): Ceres Seq. ID no. 12423949
  misc_feature (1)..(101): Pfam Name: Pfam Description:  Ribosomal protein L14p/L23e
  misc_feature (1)..(101): NCBI GI NO: 18140856 NR Description: HUELLENLOS-like protein [Oryza sativa]
  misc_feature (1)..(100): NCBI GI NO: 20260394 NR Description: unknown protein [Arabidopsis thaliana]
  misc_feature (1)..(100): NCBI GI NO: 30694896 NR Description: ribosomal protein L14p family
  misc_feature (1)..(100): NCBI GI NO: 30694900 NR Description: ribosomal protein L14p family
  misc_feature (1)..(100): NCBI GI NO: 9757736 NR Description: 50S ribosomal protein L14 [Arabidopsis thaliana]
  misc_feature (1)..(101): NCBI GI NO: 16125507 NR Description: ribosomal protein L14
  misc_feature (1)..(101): NCBI GI NO: 15889233 NR Description: AGR_C_3539p [Agrobacterium tumefaciens]
  misc_feature (1)..(101): NCBI GI NO: 15965119 NR Description: PROBABLE 50S RIBOSOMAL PROTEIN L14
  misc_feature (1)..(101): NCBI GI NO: 13470561 NR Description: 50S ribosomal protein L14 [Mesorhizobium loti]
  misc_feature (1)..(101): NCBI GI NO: 17987050 NR Description: LSU ribosomal protein L14P [Brucella melitensis]
MCIQSLRGKKGARLGDMIIGSVKEAQPRGKVKKEDVVYGVVVRAAMKKGRSDGSEVQFDDNEVVLVNKKGELIGTRVFGPVPHELRKKKHLKILALAEHIV

SEQ ID NO: 32571 - DNA, 1880 bp, Zea mays subsp. mays
  misc_feature (1)..(1880): Ceres Seq. ID no. 13498503
ccagcccaacttacagaagcccacaaagtattcacttaacgtctgtaactaccggcccatcccaggaagaggccccgctcctctccctgctcgctgcacagggactcggcctccgggacggcagacccacaagcgccagcacgctcgagactgtgccgtgggagtgggaggttcctcaggtgctgagcagtcgccggcggcgaccgccggtgtcggagatgaaggagagaagcggctccagggcggcggtggacgagcgctacgcgcagtggaagtcgctcatccccgtcctctacgactggtttgccaaccacaacctcgtctggccatccctctcctgccggtgggggccacagtttgagaaagctacctacaagaatcgtcagcgcctgtacctatctgaacagacggatgggagtgtgcctaatactctggttatcgcaaattgtgaagttgtgaaacctagggttgcagctgctgaacatatctcacagttcaatgaggaagcacggtcaccttttgtaaagaagtacaaaactatagttcatcctggtgaggttaacagaatcagggaacttccacagaacagtaagatcatagccactcacactgacagtccagatgtacttatttgggatgttgaagcacaaccaaatagacatgctgtcctaggagcaagcgagtctcgccctgatctgatattaacaggacataaggaaaatgcggaatttgcgcttgccatgtgtccagcagaaccatatgtcctatcaggaggaaaggacaaatctgttgtcttgtggagcatccaagaccatatatctgcccttggggattcctcgtcttctcctggagcatctggcagcaagcagtctattaaaactgcaaatgaaaaggagagccctaaagttgatcctagaggtatatttcatggacatgacagcacggttgaagatgttcagttctgcccttccagtgcgcaggagttttgtagtgtgggtgatgatgcttgtcttattctgtgggatgctcgaactggcactgccccagctgttaaggttgagaaagctcacagtggagatgttcattgtgttgattggaatccccttgatgttaactatatcttaactgggtctgccgataactctgtccgaatgtgggatcgtcggaatctgggttcaggaggagctggttctccaattcacaaatttgaaggccataaagctgctgttctttgtgttcagtggtcacctgacagagcatctgtttttggaagttctgcagaagatggtttcttaaacgtgtgggatcatgagaaggtggggaagaagaaaaattctaatgtcccagccgggcttttctttcagcacgctggtcatagggataagattgtagacttccactggaattcgtcagatccttggacaattgtcagtgtctctgatgatggcgagagcactggtggaggtggaacactgcagatttggcgcatgagtgatttgatctaccgcccagaggatgaagttcttgcagagctggagaatttcaaggctcatttggccagctgtgcaccgaagaattgagtcatgtgggttacctgcggaatgcaatcctgtggaaactgagtaggtgatgtagtttcatggccataagtatgagccccagttgacattgaatctgtcctctgatgctcctagagctgtacccttgaggggcttgtgcttttgtgagcttgtgttaaacctgctgtacgagtaaactagtatgtccgcaaacgcgtcagagccggatgtctgtgggccagctattgggatactgccggatatcgtcaacaattgttccagattggtgtattggatctaatgagattgtcagcaattgct

SEQ ID NO: 32572 - protein, 525 aa, Zea mays subsp. mays
  peptide (1)..(525): Ceres Seq. ID no. 13498504
  misc_feature (73)..(525): NCBI GI NO: 14550114 NR Description: nucleosome/chromatin assembly factor C [Zea mays]
  misc_feature (73)..(525): NCBI GI NO: 9716495 NR Description: WD-repeat protein RBAP1 [Zea mays]
  misc_feature (73)..(525): NCBI GI NO: 21898564 NR Description: nucleosome/chromatin assembly factor group C
  misc_feature (73)..(525): NCBI GI NO: 34910476 NR Description: putative WD-repeat protein RBAP1
  misc_feature (56)..(524): NCBI GI NO: 30680701 NR Description: WD-40 repeat protein (MSI4) [Arabidopsis thaliana]
  misc_feature (73)..(524): NCBI GI NO: 20197482 NR Description: putative WD-40 repeat protein, MSI4
  misc_feature (73)..(524): NCBI GI NO: 2599092 NR Description: WD-40 repeat protein MSI4 [Arabidopsis thaliana]
  misc_feature (74)..(523): NCBI GI NO: 5701955 NR Description: X1 protein [Silene latifolia]
  misc_feature (74)..(523): NCBI GI NO: 17902570 NR Description: putative WD-repeat protein [Silene latifolia]
  misc_feature (74)..(523): NCBI GI NO: 5701951 NR Description: Y1 protein [Silene latifolia]
SPTYRSPQSIHLTSVTTGPSQEEAPLLSLLAAQGLGLRDGRPTSASTLETVPWEWEVPQVLSSRRRRPPVSEMKERSGSRAAVDERYAQWKSLIPVLYDWFANHNLVWPSLSCRWGPQFEKATYKNRQRLYLSEQTDGSVPNTLVIANCEVVKPRVAAAEHISQFNEEARSPFVKKYKTIVHPGEVNRIRELPQNSKIIATHTDSPDVLIWDVEAQPNRHAVLGASESRPDLILTGHKENAEFALAMCPAEPYVLSGGKDKSVVLWSIQDHISALGDSSSSPGASGSKQSIKTANEKESPKVDPRGIFHGHDSTVEDVQFCPSSAQEFCSVGDDACLILWDARTGTAPAVKVEKAHSGDVHCVDWNPLDVNYILTGSADNSVRMWDRRNLGSGGAGSPIHKFEGHKAAVLCVQWSPDRASVFGSSAEDGFLNVWDHEKVGKKKNSNVPAGLFFQHAGHRDKIVDFHWNSSDPWTIVSVSDDGESTGGGGTLQIWRMSDLIYRPEDEVLAELENFKAHLASCAPKN

SEQ ID NO: 32573 - protein, 453 aa, Zea mays subsp. mays
  peptide (1)..(453): Ceres Seq. ID no. 13498505
  misc_feature (1)..(453): NCBI GI NO: 14550114 NR Description: nucleosome/chromatin assembly factor C [Zea mays]
  misc_feature (1)..(453): NCBI GI NO: 9716495 NR Description: WD-repeat protein RBAP1 [Zea mays]
  misc_feature (1)..(453): NCBI GI NO: 21898564 NR Description: nucleosome/chromatin assembly factor group C
  misc_feature (1)..(453): NCBI GI NO: 34910476 NR Description: putative WD-repeat protein RBAP1
  misc_feature (1)..(452): NCBI GI NO: 30680701 NR Description: WD-40 repeat protein (MSI4) [Arabidopsis thaliana]
  misc_feature (1)..(452): NCBI GI NO: 20197482 NR Description: putative WD-40 repeat protein, MSI4
  misc_feature (1)..(452): NCBI GI NO: 2599092 NR Description: WD-40 repeat protein MSI4 [Arabidopsis thaliana]
  misc_feature (2)..(451): NCBI GI NO: 5701955 NR Description: X1 protein [Silene latifolia]
  misc_feature (2)..(451): NCBI GI NO: 17902570 NR Description: putative WD-repeat protein [Silene latifolia]
  misc_feature (2)..(451): NCBI GI NO: 5701951 NR Description: Y1 protein [Silene latifolia]
MKERSGSRAAVDERYAQWKSLIPVLYDWFANHNLVWPSLSCRWGPQFEKATYKNRQRLYLSEQTDGSVPNTLVIANCEVVKPRVAAAEHISQFNEEARSPFVKKYKTIVHPGEVNRIRELPQNSKIIATHTDSPDVLIWDVEAQPNRHAVLGASESRPDLILTGHKENAEFALAMCPAEPYVLSGGKDKSVVLWSIQDHISALGDSSSSPGASGSKQSIKTANEKESPKVDPRGIFHGHDSTVEDVQFCPSSAQEFCSVGDDACLILWDARTGTAPAVKVEKAHSGDVHCVDWNPLDVNYILTGSADNSVRMWDRRNLGSGGAGSPIHKFEGHKAAVLCVQWSPDRASVFGSSAEDGFLNVWDHEKVGKKKNSNVPAGLFFQHAGHRDKIVDFHWNSSDPWTIVSVSDDGESTGGGGTLQIWRMSDLIYRPEDEVLAELENFKAHLASCAPKN

SEQ ID NO: 32574 - protein, 279 aa, Zea mays subsp. mays
  peptide (1)..(279): Ceres Seq. ID no. 13498506
  misc_feature (1)..(279): NCBI GI NO: 14550114 NR Description: nucleosome/chromatin assembly factor C [Zea mays]
  misc_feature (1)..(279): NCBI GI NO: 9716495 NR Description: WD-repeat protein RBAP1 [Zea mays]
  misc_feature (1)..(279): NCBI GI NO: 21898564 NR Description: nucleosome/chromatin assembly factor group C
  misc_feature (1)..(279): NCBI GI NO: 34910476 NR Description: putative WD-repeat protein RBAP1
  misc_feature (1)..(278): NCBI GI NO: 30680701 NR Description: WD-40 repeat protein (MSI4) [Arabidopsis thaliana]
  misc_feature (1)..(278): NCBI GI NO: 20197482 NR Description: putative WD-40 repeat protein, MSI4
  misc_feature (1)..(278): NCBI GI NO: 2599092 NR Description: WD-40 repeat protein MSI4 [Arabidopsis thaliana]
  misc_feature (1)..(277): NCBI GI NO: 5701955 NR Description: X1 protein [Silene latifolia]
  misc_feature (1)..(277): NCBI GI NO: 17902570 NR Description: putative WD-repeat protein [Silene latifolia]
  misc_feature (1)..(277): NCBI GI NO: 5701951 NR Description: Y1 protein [Silene latifolia]
MCPAEPYVLSGGKDKSVVLWSIQDHISALGDSSSSPGASGSKQSIKTANEKESPKVDPRGIFHGHDSTVEDVQFCPSSAQEFCSVGDDACLILWDARTGTAPAVKVEKAHSGDVHCVDWNPLDVNYILTGSADNSVRMWDRRNLGSGGAGSPIHKFEGHKAAVLCVQWSPDRASVFGSSAEDGFLNVWDHEKVGKKKNSNVPAGLFFQHAGHRDKIVDFHWNSSDPWTIVSVSDDGESTGGGGTLQIWRMSDLIYRPEDEVLAELENFKAHLASCAPKN

SEQ ID NO: 32575 - DNA, 1236 bp, Zea mays subsp. mays
  misc_feature (1)..(1236): Ceres Seq. ID no. 12412058
aataaagctcgcgccacgggagccacgcacgcggacgccggcatattcgccaaacgcatcgcatcggcctcggccaccggcgcggctgccctcctcctcttctccgtcgatccggagaggactttctctcgcctgctcgtcccttccgcccccgccggccggccggtcctcttcccggcccactccgttccgatcgaccatggcggctaccgcccccaacggcaatcccactgtcagctccctcgcggcaaccgttccggtccaggcggttctgttcgacatcgacgggaccctgtgcgactcggatcccctccaccacgtcgctttccaagagatgcttctcgagatcgggtacaacaatggcgtgccgatagacgaggagttcttcatcaagaacatcgctgggaggagtgacgtcgaagctgcccagaacctgttcccggactgggagcttgagaaggggctcaaattcctagaggacaaggaagcaaaatacaggagtctggcaaaagagcgcttggtgcctgtgaaaggcctcgcgaaggtggtccagtgggtgaaagaccacgggtacaagcgcgcggcggtgaccaacgcccccaggatcaacgcggagctgatgatctcgctcctgggcctctcggacttcttccaggccgtcatcgtcggaggcgagtgcgagcagccaaagcccgcgccgtacccttacctcagggccctcaaggagctccaggtgtccgcagagcacagcttcgtcttcgaggattctcctgctggtatccgggctggcgtcgcggcggggatgcctgtcgtcggtgtggcgacgaggaacccggagaagtccttggtggaagcaggagccgcgttgctcgtcaaggactacgaagatcctaagctctgggcagcgcttgaggaggtcgacggagaggaagctaagctgaagaaggccggcgaatgatctgatatgacgatgagccattgattagatttattgcagattaattctgcctccagcatgattctgttcctagttatgcgctgcggagagagctcacctcatcagggtatttatgagattctagcttcgtatattgtttttcttcttcttgattgaactgagatcaaataagacaaagctgctgtgccttgttgtgtgccatctgtgtatgaacttttcggttcagcctccagcagtctttaatctgaaagaaagacgaggtaggaattctctccccc

SEQ ID NO: 32576 - protein, 318 aa, Zea mays subsp. mays
  peptide (1)..(318): Ceres Seq. ID no. 12412059
  misc_feature (87)..(275): Pfam Name: Pfam Description:  haloacid dehalogenase-like hydrolase
  misc_feature (75)..(309): NCBI GI NO: 18404847 NR Description: expressed protein; protein id: At2g38740
  misc_feature (79)..(315): NCBI GI NO: 37536998 NR Description: putative beta-phosphoglucomutase
  misc_feature (115)..(309): NCBI GI NO: 25408616 NR Description: hypothetical protein At2g38740
  misc_feature (80)..(311): NCBI GI NO: 34897820 NR Description: P0514G12.30
  misc_feature (149)..(315): NCBI GI NO: 37700485 NR Description: putative beta-phosphoglucomutase [Oryza sativa]
  misc_feature (89)..(306): NCBI GI NO: 23127812 NR Description: hypothetical protein [Nostoc punctiforme]
  misc_feature (89)..(310): NCBI GI NO: 37521914 NR Description: hypothetical protein glr2345
  misc_feature (89)..(306): NCBI GI NO: 17228223 NR Description: hypothetical protein [Nostoc sp. PCC 7120]
  misc_feature (87)..(299): NCBI GI NO: 23042473 NR Description: hypothetical protein
  misc_feature (87)..(299): NCBI GI NO: 23039672 NR Description: hypothetical protein
IKLAPREPRTRTPAYSPNASHRPRPPARLPSSSSPSIRRGLSLACSSLPPPPAGRSSSRPTPFRSTMAATAPNGNPTVSSLAATVPVQAVLFDIDGTLCDSDPLHHVAFQEMLLEIGYNNGVPIDEEFFIKNIAGRSDVEAAQNLFPDWELEKGLKFLEDKEAKYRSLAKERLVPVKGLAKVVQWVKDHGYKRAAVTNAPRINAELMISLLGLSDFFQAVIVGGECEQPKPAPYPYLRALKELQVSAEHSFVFEDSPAGIRAGVAAGMPVVGVATRNPEKSLVEAGAALLVKDYEDPKLWAALEEVDGEEAKLKKAGE

SEQ ID NO: 32577 - protein, 252 aa, Zea mays subsp. mays
  peptide (1)..(252): Ceres Seq. ID no. 12412060
  misc_feature (21)..(209): Pfam Name: Pfam Description:  haloacid dehalogenase-like hydrolase
  misc_feature (9)..(243): NCBI GI NO: 18404847 NR Description: expressed protein; protein id: At2g38740
  misc_feature (13)..(249): NCBI GI NO: 37536998 NR Description: putative beta-phosphoglucomutase
  misc_feature (49)..(243): NCBI GI NO: 25408616 NR Description: hypothetical protein At2g38740
  misc_feature (14)..(245): NCBI GI NO: 34897820 NR Description: P0514G12.30
  misc_feature (83)..(249): NCBI GI NO: 37700485 NR Description: putative beta-phosphoglucomutase [Oryza sativa]
  misc_feature (23)..(240): NCBI GI NO: 23127812 NR Description: hypothetical protein [Nostoc punctiforme]
  misc_feature (23)..(244): NCBI GI NO: 37521914 NR Description: hypothetical protein glr2345
  misc_feature (23)..(240): NCBI GI NO: 17228223 NR Description: hypothetical protein [Nostoc sp. PCC 7120]
  misc_feature (21)..(233): NCBI GI NO: 23042473 NR Description: hypothetical protein
  misc_feature (21)..(233): NCBI GI NO: 23039672 NR Description: hypothetical protein
MAATAPNGNPTVSSLAATVPVQAVLFDIDGTLCDSDPLHHVAFQEMLLEIGYNNGVPIDEEFFIKNIAGRSDVEAAQNLFPDWELEKGLKFLEDKEAKYRSLAKERLVPVKGLAKVVQWVKDHGYKRAAVTNAPRINAELMISLLGLSDFFQAVIVGGECEQPKPAPYPYLRALKELQVSAEHSFVFEDSPAGIRAGVAAGMPVVGVATRNPEKSLVEAGAALLVKDYEDPKLWAALEEVDGEEAKLKKAGE

SEQ ID NO: 32578 - protein, 207 aa, Zea mays subsp. mays
  peptide (1)..(207): Ceres Seq. ID no. 12412061
  misc_feature (1)..(164): Pfam Name: Pfam Description:  haloacid dehalogenase-like hydrolase
  misc_feature (1)..(198): NCBI GI NO: 18404847 NR Description: expressed protein; protein id: At2g38740
  misc_feature (1)..(204): NCBI GI NO: 37536998 NR Description: putative beta-phosphoglucomutase
  misc_feature (4)..(198): NCBI GI NO: 25408616 NR Description: hypothetical protein At2g38740
  misc_feature (1)..(200): NCBI GI NO: 34897820 NR Description: P0514G12.30
  misc_feature (38)..(204): NCBI GI NO: 37700485 NR Description: putative beta-phosphoglucomutase [Oryza sativa]
  misc_feature (1)..(195): NCBI GI NO: 23127812 NR Description: hypothetical protein [Nostoc punctiforme]
  misc_feature (1)..(199): NCBI GI NO: 37521914 NR Description: hypothetical protein glr2345
  misc_feature (1)..(195): NCBI GI NO: 17228223 NR Description: hypothetical protein [Nostoc sp. PCC 7120]
  misc_feature (1)..(188): NCBI GI NO: 23042473 NR Description: hypothetical protein
  misc_feature (1)..(188): NCBI GI NO: 23039672 NR Description: hypothetical protein
MLLEIGYNNGVPIDEEFFIKNIAGRSDVEAAQNLFPDWELEKGLKFLEDKEAKYRSLAKERLVPVKGLAKVVQWVKDHGYKRAAVTNAPRINAELMISLLGLSDFFQAVIVGGECEQPKPAPYPYLRALKELQVSAEHSFVFEDSPAGIRAGVAAGMPVVGVATRNPEKSLVEAGAALLVKDYEDPKLWAALEEVDGEEAKLKKAGE

SEQ ID NO: 32579 - DNA, 1220 bp, Zea mays subsp. mays
  misc_feature (1)..(1220): Ceres Seq. ID no. 12412054
atccccaaccccgtcagcccgtgcggccgtgccctctgcctcctctgccactcctcgcccaaagcgccagaggcgcagcccgagccacaggttgcctcctctccctctcctcgtggcctcgtccttctcgttcaagacgaaaccgtacgcgagcgagctggtgagggaggaagagcagggaggtgggatcaggccggctccatggacgccacgctcctcctcctccccgccaactgcacggccgccgccagcgggcggatgcggcctcgactgcctgcaggcccacatgtggcttcccctggtccctccgcgcggccaaggacctccatccgggcctcagccgtgtccgcagccctcgccgttcgtggcctcccgcaacacgcttccgtggccgggcaaagcactggaagttatagggttggtgatgttatgaccaaaagggaagagctccatgttgtgaaaccaacaacttcagttgatgacgcccttgagatgctggtgaagcataggatctctggctttcctgttattgatgatgactggaatttggttggcgttgtgtcagattatgatttattggcactggatacaatatcaggagctggaccggctgaagcagacatatttcctgaggtggatagcacttggaagacatttcatgagatacagaagcttttgagcaaaaccaacgggaaggttattgctgatgttatgaccccagcgcctctcgtggtgcgtgaaacaactaaccttgaagatgctgcaaggttactccttgtgactaagtaccgcaggcttccagtggtcgatagctcaggcaaactggttgggatcattacaagagggaacgtcgtccaagccgccctcgaaatcaagaaaaaggttgaagggacactctgagatgactacctccaggtatcctttttgctgccacatggggggcttaggacttggacacatctctagttggcaactgatcaatcaaagcgactgtcagagtgagcgatgaaagtcgctatgtttatgaagatttgcccggagaagcacaggtgtatgtgtagtgtttgttatatatgctgatgcagtccttgctggccaaaacacaggttaccgattgttctggtttcctgggcttctttggacaccaaattcttaacctaggtcttgtttgggtgcacacgtatctagttcaacttacttgtattgaggttcattgaagt

SEQ ID NO: 32580 - protein, 299 aa, Zea mays subsp. mays
  peptide (1)..(299): Ceres Seq. ID no. 12412055
  misc_feature (144)..(197): Pfam Name: Pfam Description:  CBS domain
  misc_feature (113)..(299): NCBI GI NO: 34015153 NR Description: putative CBS domain containing protein
  misc_feature (68)..(293): NCBI GI NO: 15234564 NR Description: putative protein; protein id: At4g36910.1
  misc_feature (109)..(298): NCBI GI NO: 18418376 NR Description: putative protein; protein id: At4g34120
  misc_feature (109)..(199): NCBI GI NO: 7486280 NR Description: hypothetical protein F28A23
  misc_feature (217)..(278): NCBI GI NO: 7486280 NR Description: hypothetical protein F28A23
  misc_feature (140)..(287): NCBI GI NO: 17231305 NR Description: hypothetical protein [Nostoc sp. PCC 7120]
  misc_feature (137)..(287): NCBI GI NO: 16331252 NR Description: IMP dehydrogenase [Synechocystis sp. PCC 6803]
  misc_feature (140)..(287): NCBI GI NO: 23040753 NR Description: hypothetical protein
  misc_feature (139)..(287): NCBI GI NO: 15678671 NR Description: conserved protein
  misc_feature (140)..(287): NCBI GI NO: 23127710 NR Description: hypothetical protein [Nostoc punctiforme]
IPNPVSPCGRALCLLCHSSPKAPEAQPEPQVASSPSPRGLVLLVQDETVRERAGEGGRAGRWDQAGSMDATLLLLPANCTAAASGRMRPRLPAGPHVASPGPSARPRTSIRASAVSAALAVRGLPQHASVAGQSTGSYRVGDVMTKREELHVVKPTTSVDDALEMLVKHRISGFPVIDDDWNLVGVVSDYDLLALDTISGAGPAEADIFPEVDSTWKTFHEIQKLLSKTNGKVIADVMTPAPLVVRETTNLEDAARLLLVTKYRRLPVVDSSGKLVGIITRGNVVQAALEIKKKVEGTL

SEQ ID NO: 32581 - protein, 232 aa, Zea mays subsp. mays; identical to SEQ ID NO: 28162
  peptide (1)..(232): Ceres Seq. ID no. 12412056
  misc_feature (77)..(130): Pfam Name: Pfam Description:  CBS domain
  misc_feature (46)..(232): NCBI GI NO: 34015153 NR Description: putative CBS domain containing protein
  misc_feature (1)..(226): NCBI GI NO: 15234564 NR Description: putative protein; protein id: At4g36910.1
  misc_feature (42)..(231): NCBI GI NO: 18418376 NR Description: putative protein; protein id: At4g34120
  misc_feature (42)..(132): NCBI GI NO: 7486280 NR Description: hypothetical protein F28A23
  misc_feature (150)..(211): NCBI GI NO: 7486280 NR Description: hypothetical protein F28A23
  misc_feature (73)..(220): NCBI GI NO: 17231305 NR Description: hypothetical protein [Nostoc sp. PCC 7120]
  misc_feature (70)..(220): NCBI GI NO: 16331252 NR Description: IMP dehydrogenase [Synechocystis sp. PCC 6803]
  misc_feature (73)..(220): NCBI GI NO: 23040753 NR Description: hypothetical protein
  misc_feature (72)..(220): NCBI GI NO: 15678671 NR Description: conserved protein
  misc_feature (73)..(220): NCBI GI NO: 23127710 NR Description: hypothetical protein [Nostoc punctiforme]

SEQ ID NO: 32582 - protein, 213 aa, Zea mays subsp. mays; identical to SEQ ID NO: 28163
  peptide (1)..(213): Ceres Seq. ID no. 12412057
  misc_feature (58)..(111): Pfam Name: Pfam Description:  CBS domain
  misc_feature (27)..(213): NCBI GI NO: 34015153 NR Description: putative CBS domain containing protein
  misc_feature (1)..(207): NCBI GI NO: 15234564 NR Description: putative protein; protein id: At4g36910.1
  misc_feature (23)..(212): NCBI GI NO: 18418376 NR Description: putative protein; protein id: At4g34120
  misc_feature (23)..(113): NCBI GI NO: 7486280 NR Description: hypothetical protein F28A23
  misc_feature (131)..(192): NCBI GI NO: 7486280 NR Description: hypothetical protein F28A23
  misc_feature (54)..(201): NCBI GI NO: 17231305 NR Description: hypothetical protein [Nostoc sp. PCC 7120]
  misc_feature (51)..(201): NCBI GI NO: 16331252 NR Description: IMP dehydrogenase [Synechocystis sp. PCC 6803]
  misc_feature (54)..(201): NCBI GI NO: 23040753 NR Description: hypothetical protein
  misc_feature (53)..(201): NCBI GI NO: 15678671 NR Description: conserved protein
  misc_feature (54)..(201): NCBI GI NO: 23127710 NR Description: hypothetical protein [Nostoc punctiforme]

SEQ ID NO: 32583 - DNA, 1310 bp, Zea mays subsp. mays
  misc_feature (1)..(1310): Ceres Seq. ID no. 12358780
atatcgatttccgccagcggttttcctcatttttttctctccctctcttgcccggtgatcggtcgggatcgattcgagcagatggcggcggcatgggcagtgctggcggcggtcctcgtcgcggcgcaggtggcgtctgcggcgccggtcacggcgccagcgttcctctgggcgcctaagaactacggattccgctctgatgatgctaaggaggtagtccattatcaaacaatctcaccaaagaacttagctaaatctgttcttgaggaaggtggctggtcaacctttatgtgttcaagggaggatactgagaagcatgttgatgttgccattgtttttattggctcaaagctacaatcatcagacatatcgaaagataagcaagttgatccagctttagcagatacattgaagctctccttcacagaatcagagttttctatggcattcccctacgtttccacatcagacgatgagaaactggaggagtcattgctatcaggcttcactgagaactgtaaaagtggttttggaagaaaccgtatcacctacacagacacgtgcgccgtgagtggccaagatctgaagacgtatcacaacatggatgctatcaatgacttggtagtgtcaggaagaaccaacccgagtggacagactgatgtaatcgtcttctgcagcggcgggttcgagaagttaggcaccacggaatcggaaggggagctgctttcccagcttgtcgacttgctgaagctgtctggggctagacacacgattctctacgcttcccagccatctggttatctactggagaacccttccggctcgccagtggctaggcaccttgcggagaggactaacggtacaaaaactggcctactgagcaaatgtgacggagagtgcctagtcaaatcaactcttcttgaaggaacctttgtcggaatagtgctccttatcatcttgatatcagggctcatgtgtatgatgggaatcgatactccctccaagtttgaagctccccaggagtcttgatctcccttcgaagcagaacccttgttttgttggtctgcactgtggatagatattattcagtttccccctttgaaagcgcctttcgtataattattattatttttttactgagccatctgttatttacgatgtgctcaaacttttgacaccaaacgaatgcatgtgtgtgaggcttgtgctgtgaccagacatagcattgcctccaggtgttttctgtgaataacctggaatttcaggtgggtactgtgcatcaaataaaaaagatgaaatcttgctgttgc

SEQ ID NO: 32584 - protein, 342 aa, Zea mays subsp. mays
  peptide (1)..(342): Ceres Seq. ID no. 12358781
  misc_feature (29)..(342): NCBI GI NO: 24417230 NR Description: unknown [Arabidopsis thaliana]
  misc_feature (29)..(342): NCBI GI NO: 30682651 NR Description: expressed protein [Arabidopsis thaliana]
  misc_feature (141)..(342): NCBI GI NO: 21618303 NR Description: unknown [Arabidopsis thaliana]
  misc_feature (78)..(146): NCBI GI NO: 25405838 NR Description: hypothetical protein T5A14.4
ISISASGFPHFFLSLSCPVIGRDRFEQMAAAWAVLAAVLVAAQVASAAPVTAPAFLWAPKNYGFRSDDAKEVVHYQTISPKNLAKSVLEEGGWSTFMCSREDTEKHVDVAIVFIGSKLQSSDISKDKQVDPALADTLKLSFTESEFSMAFPYVSTSDDEKLEESLLSGFTENCKSGFGRNRITYTDTCAVSGQDLKTYHNMDAINDLVVSGRTNPSGQTDVIVFCSGGFEKLGTTESEGELLSQLVDLLKLSGARHTILYASQPSGYLLENPSGSPVARHLAERTNGTKTGLLSKCDGECLVKSTLLEGTFVGIVLLIILISGLMCMMGIDTPSKFEAPQES

SEQ ID NO: 32585 - protein, 315 aa, Zea mays subsp. mays; identical to SEQ ID NO: 26720
  peptide (1)..(315): Ceres Seq. ID no. 12358782
  misc_feature (2)..(315): NCBI GI NO: 24417230 NR Description: unknown [Arabidopsis thaliana]
  misc_feature (2)..(315): NCBI GI NO: 30682651 NR Description: expressed protein [Arabidopsis thaliana]
  misc_feature (114)..(315): NCBI GI NO: 21618303 NR Description: unknown [Arabidopsis thaliana]
  misc_feature (51)..(119): NCBI GI NO: 25405838 NR Description: hypothetical protein T5A14.4

SEQ ID NO: 32586 - protein, 246 aa, Zea mays subsp. mays; identical to SEQ ID NO: 26721
  peptide (1)..(246): Ceres Seq. ID no. 12358783
  misc_feature (1)..(246): NCBI GI NO: 24417230 NR Description: unknown [Arabidopsis thaliana]
  misc_feature (1)..(246): NCBI GI NO: 30682651 NR Description: expressed protein [Arabidopsis thaliana]
  misc_feature (45)..(246): NCBI GI NO: 21618303 NR Description: unknown [Arabidopsis thaliana]
  misc_feature (1)..(50): NCBI GI NO: 25405838 NR Description: hypothetical protein T5A14.4

SEQ ID NO: 32587 - DNA, 1495 bp, Zea mays subsp. mays
  misc_feature (1)..(1495): Ceres Seq. ID no. 12412050
ggaaaaggaaaaacaaacaaaatagtaaggggaatttggtacctgggtgtttgctgttccttgagttggtgaatctttggagtgcctggctccgacgagatcgaaaggagggacctttccttggttcctctgctggagctgtgattgcagaggtgaaccatgtcagcgatggcggcggcgggtgaagcggagtatggtgaatgcgtgcagaaggggtccctgcagcagcaccaggcgcctcaacccagccccggcgctctattctacacccatgatggcgtcgccgtctacaggaatccggtcatgccggcgttctaccaacagcccgcgggcagcaatgtcgtcgtgccggcggctccagggccagctcattcccctgccagctctgagcccttcaagcgcaagcgcgggcgcccccgcaagtacgcccccgcagacggcgccgtgccgctggctatcgtgcccccatcgcagccacccactgctcgtgccccagctacctctgaggcctcacccacggttcctcctggcttctctccaagtccgcagagtggtggcgtggtgagtcggcaggcctcgccggcgccggcgccggcgtcaggtgctcccgatgtcaagaagcggggccggccgtcgggcccctccagcaagaagcagcagccgcaggcggcagcgcctggaccaggctggactggattgaagcctcatattttcacagttcaagctggagaggatgtagcatcaagagccatgtcattttctgggaatggatgggctgtttgtatcctgacagccaatggcactgtatctaatgtgaccctgcgtcaaggagagtcttctggtggaacagtaacttatgagggccgttttgagattctctctttggctgggtcatatcttctgtctgaaagtactggcatgagcagtcgaacgggtggacttagtgtttctcttgctagtcctgatgggcatgttttaggtggtgctgtcgcaggacctctaaccgcagcttcgccagttcaggtggtcattgggagctttctggctgatacaaaaatggagcttgaccctggatcagcacctgagaaacatgttttcagcaggtttcaaactaccagcagtccatctaggggtaccgaatcctcgggtgggcatgcaagcccaccaaacaccacaggctccttcagcaccagcacacagccaggcttcccaagctttcccacatggaaatgagtttacctgctatggtggagtgggaccgtggcctctggggatgaggagggaggaatttggaactgacagtcctcgagcgtcgtcgctgtagtttcatgagatgttatgagagtcaatcctatttaggtacttctaactggttacaatgaagttccggtttgctgcttgtcttgacattttgcatcattgaggcacttcaaactccaaagtggtggtaacatacagtatattagatgattccccctatcaaatgccttttgtc

SEQ ID NO: 32588 - protein, 357 aa, Zea mays subsp. mays
  peptide (1)..(357): Ceres Seq. ID no. 12412051
  misc_feature (145)..(345): NCBI GI NO: 18403332 NR Description: AT-hook DNA-binding protein
  misc_feature (22)..(126): NCBI GI NO: 18403332 NR Description: AT-hook DNA-binding protein
  misc_feature (145)..(345): NCBI GI NO: 14326504 NR Description: At2g33620/F4P9.39 [Arabidopsis thaliana]
  misc_feature (22)..(126): NCBI GI NO: 14326504 NR Description: At2g33620/F4P9.39 [Arabidopsis thaliana]
  misc_feature (145)..(345): NCBI GI NO: 2598227 NR Description: AT-hook protein 1 [Arabidopsis thaliana]
  misc_feature (22)..(126): NCBI GI NO: 2598227 NR Description: AT-hook protein 1 [Arabidopsis thaliana]
  misc_feature (145)..(345): NCBI GI NO: 25408293 NR Description: AT-hook DNA-binding protein (AHP1)
  misc_feature (50)..(126): NCBI GI NO: 25408293 NR Description: AT-hook DNA-binding protein (AHP1)
  misc_feature (97)..(340): NCBI GI NO: 37537056 NR Description: putative AT-Hook DNA-binding protein
  misc_feature (22)..(356): NCBI GI NO: 38346715 NR Description: OSJNBa0086O06.13
MSAMAAAGEAEYGECVQKGSLQQHQAPQPSPGALFYTHDGVAVYRNPVMPAFYQQPAGSNVVVPAAPGPAHSPASSEPFKRKRGRPRKYAPADGAVPLAIVPPSQPPTARAPATSEASPTVPPGFSPSPQSGGVVSRQASPAPAPASGAPDVKKRGRPSGPSSKKQQPQAAAPGPGWTGLKPHIFTVQAGEDVASRAMSFSGNGWAVCILTANGTVSNVTLRQGESSGGTVTYEGRFEILSLAGSYLLSESTGMSSRTGGLSVSLASPDGHVLGGAVAGPLTAASPVQVVIGSFLADTKMELDPGSAPEKHVFSRFQTTSSPSRGTESSGGHASPPNTTGSFSTSTQPGFPSFPTWK

SEQ ID NO: 32589 - protein, 354 aa, Zea mays subsp. mays
  peptide (1)..(354): Ceres Seq. ID no. 12412052
  misc_feature (142)..(342): NCBI GI NO: 18403332 NR Description: AT-hook DNA-binding protein
  misc_feature (19)..(123): NCBI GI NO: 18403332 NR Description: AT-hook DNA-binding protein
  misc_feature (142)..(342): NCBI GI NO: 14326504 NR Description: At2g33620/F4P9.39 [Arabidopsis thaliana]
  misc_feature (19)..(123): NCBI GI NO: 14326504 NR Description: At2g33620/F4P9.39 [Arabidopsis thaliana]
  misc_feature (142)..(342): NCBI GI NO: 2598227 NR Description: AT-hook protein 1 [Arabidopsis thaliana]
  misc_feature (19)..(123): NCBI GI NO: 2598227 NR Description: AT-hook protein 1 [Arabidopsis thaliana]
  misc_feature (142)..(342): NCBI GI NO: 25408293 NR Description: AT-hook DNA-binding protein (AHP1)
  misc_feature (47)..(123): NCBI GI NO: 25408293 NR Description: AT-hook DNA-binding protein (AHP1)
  misc_feature (94)..(337): NCBI GI NO: 37537056 NR Description: putative AT-Hook DNA-binding protein
  misc_feature (19)..(353): NCBI GI NO: 38346715 NR Description: OSJNBa0086O06.13
MAAAGEAEYGECVQKGSLQQHQAPQPSPGALFYTHDGVAVYRNPVMPAFYQQPAGSNVVVPAAPGPAHSPASSEPFKRKRGRPRKYAPADGAVPLAIVPPSQPPTARAPATSEASPTVPPGFSPSPQSGGVVSRQASPAPAPASGAPDVKKRGRPSGPSSKKQQPQAAAPGPGWTGLKPHIFTVQAGEDVASRAMSFSGNGWAVCILTANGTVSNVTLRQGESSGGTVTYEGRFEILSLAGSYLLSESTGMSSRTGGLSVSLASPDGHVLGGAVAGPLTAASPVQVVIGSFLADTKMELDPGSAPEKHVFSRFQTTSSPSRGTESSGGHASPPNTTGSFSTSTQPGFPSFPTWK

SEQ ID NO: 32590 - protein, 309 aa, Zea mays subsp. mays
  peptide (1)..(309): Ceres Seq. ID no. 12412053
  misc_feature (97)..(297): NCBI GI NO: 18403332 NR Description: AT-hook DNA-binding protein
  misc_feature (1)..(78): NCBI GI NO: 18403332 NR Description: AT-hook DNA-binding protein
  misc_feature (97)..(297): NCBI GI NO: 14326504 NR Description: At2g33620/F4P9.39 [Arabidopsis thaliana]
  misc_feature (1)..(78): NCBI GI NO: 14326504 NR Description: At2g33620/F4P9.39 [Arabidopsis thaliana]
  misc_feature (97)..(297): NCBI GI NO: 2598227 NR Description: AT-hook protein 1 [Arabidopsis thaliana]
  misc_feature (1)..(78): NCBI GI NO: 2598227 NR Description: AT-hook protein 1 [Arabidopsis thaliana]
  misc_feature (97)..(297): NCBI GI NO: 25408293 NR Description: AT-hook DNA-binding protein (AHP1)
  misc_feature (2)..(78): NCBI GI NO: 25408293 NR Description: AT-hook DNA-binding protein (AHP1)
  misc_feature (49)..(292): NCBI GI NO: 37537056 NR Description: putative AT-Hook DNA-binding protein
  misc_feature (1)..(308): NCBI GI NO: 38346715 NR Description: OSJNBa0086O06.13
MPAFYQQPAGSNVVVPAAPGPAHSPASSEPFKRKRGRPRKYAPADGAVPLAIVPPSQPPTARAPATSEASPTVPPGFSPSPQSGGVVSRQASPAPAPASGAPDVKKRGRPSGPSSKKQQPQAAAPGPGWTGLKPHIFTVQAGEDVASRAMSFSGNGWAVCILTANGTVSNVTLRQGESSGGTVTYEGRFEILSLAGSYLLSESTGMSSRTGGLSVSLASPDGHVLGGAVAGPLTAASPVQVVIGSFLADTKMELDPGSAPEKHVFSRFQTTSSPSRGTESSGGHASPPNTTGSFSTSTQPGFPSFPTWK

SEQ ID NO: 32591 - DNA, 1385 bp, Zea mays subsp. mays
  misc_feature (1)..(1385): Ceres Seq. ID no. 12374161
accgaaacgaaatcctcaaaccccaaacctctctcggaagttcctctcgcgtggccggtttcctcaacctccgtgtcggctcgatagtttcgcaagcgggcggggcgggggtctgagctcgatggccacttctggcgagcaatcggctggcggtgggtctgcggcgagggcgtcgaagctgcgctacccgctgcggtcggcgagcaaggggaaggccgcggccgttttctcggcggcggatgcgcctcccaccaccatatctgcaccgcgtcgggcaaaaccatcttcagatgtcagcaagagcatgtgtttaggcctttctgtgaaggataagtttgtcaagcctccacggaggcactcaatacaaaccaagccaggagctagcccaaggccaataccttctggaactgtgactccggtgtctggggttcggtcaaagagatcggacagccaggggaggtttgatactccgacatcagaagtgtccatgtccatgtcaaggcgcaagttcagcacgctttcttcaatctcgtactggatgacacagatcaggcttgcagaggctgcttccaaacactcagtttctctgggcttctttaagcttgctcttgaatcagaatgtgagcctttggaccggatgagggaagaactcaagtcctatgtagcccgccattgcctagcgacagaattggaggacccagtcaaggacattcttcaggtttatgatattgtggacgattttgagaagctgaagatctctgcagagccctcagagcaaccaaaaaagtctgacaaggctgctcgtactgtctccaatgtgtcagccaattgtgatctgaagccaaggtcactaaactctggtgctactgaaagtaaggaagctgggaagaaagagggcattcagaaagcgaaacctgatgcaagggtcagaggctccaataacaggaatccagtaaaatgcaccaccgcaaaggaagtagttgctaagaacactggtaagaaaaccaagaaagaggccaagggtcaggaggaagttagcaatggagatagcgatgcatcctcagcccttccagatcaggaatctgttgatgttgtgaaggagatcacccatgaagataaagagaacatgggcgacaatgaaatggctatggatgttgccatagcgcaaggtatctagaacagccggaccaacttcagattcaatcgttttttattgctgaagatgaagtattagtgtgtggttgcttattttggttttcattgttaatatgatagtagagcttgtctgtgtgattgctgaaccatatacgctcctgaagagtgagtgtgtcataagttgatgattgcctgtattcctttttcaagtttgcagctttgcatgtggt

SEQ ID NO: 32592 - protein, 391 aa, Zea mays subsp. mays
  peptide (1)..(391): Ceres Seq. ID no. 12374162
  misc_feature (40)..(385): NCBI GI NO: 15241865 NR Description: unknown protein; protein id: At5g62550.1
PKRNPQTPNLSRKFLSRGRFPQPPCRLDSFASGRGGGLSSMATSGEQSAGGGSAARASKLRYPLRSASKGKAAAVFSAADAPPTTISAPRRAKPSSDVSKSMCLGLSVKDKFVKPPRRHSIQTKPGASPRPIPSGTVTPVSGVRSKRSDSQGRFDTPTSEVSMSMSRRKFSTLSSISYWMTQIRLAEAASKHSVSLGFFKLALESECEPLDRMREELKSYVARHCLATELEDPVKDILQVYDIVDDFEKLKISAEPSEQPKKSDKAARTVSNVSANCDLKPRSLNSGATESKEAGKKEGIQKAKPDARVRGSNNRNPVKCTTAKEVVAKNTGKKTKKEAKGQEEVSNGDSDASSALPDQESVDVVKEITHEDKENMGDNEMAMDVAIAQGI

SEQ ID NO: 32593 - protein, 351 aa, Zea mays subsp. mays
  peptide (1)..(351): Ceres Seq. ID no. 12374163
  misc_feature (1)..(345): NCBI GI NO: 15241865 NR Description: unknown protein; protein id: At5g62550.1
MATSGEQSAGGGSAARASKLRYPLRSASKGKAAAVFSAADAPPTTISAPRRAKPSSDVSKSMCLGLSVKDKFVKPPRRHSIQTKPGASPRPIPSGTVTPVSGVRSKRSDSQGRFDTPTSEVSMSMSRRKFSTLSSISYWMTQIRLAEAASKHSVSLGFFKLALESECEPLDRMREELKSYVARHCLATELEDPVKDILQVYDIVDDFEKLKISAEPSEQPKKSDKAARTVSNVSANCDLKPRSLNSGATESKEAGKKEGIQKAKPDARVRGSNNRNPVKCTTAKEVVAKNTGKKTKKEAKGQEEVSNGDSDASSALPDQESVDVVKEITHEDKENMGDNEMAMDVAIAQGI

SEQ ID NO: 32594 - protein, 290 aa, Zea mays subsp. mays
  peptide (1)..(290): Ceres Seq. ID no. 12374164
  misc_feature (1)..(284): NCBI GI NO: 15241865 NR Description: unknown protein; protein id: At5g62550.1
MCLGLSVKDKFVKPPRRHSIQTKPGASPRPIPSGTVTPVSGVRSKRSDSQGRFDTPTSEVSMSMSRRKFSTLSSISYWMTQIRLAEAASKHSVSLGFFKLALESECEPLDRMREELKSYVARHCLATELEDPVKDILQVYDIVDDFEKLKISAEPSEQPKKSDKAARTVSNVSANCDLKPRSLNSGATESKEAGKKEGIQKAKPDARVRGSNNRNPVKCTTAKEVVAKNTGKKTKKEAKGQEEVSNGDSDASSALPDQESVDVVKEITHEDKENMGDNEMAMDVAIAQGI

SEQ ID NO: 32595 - DNA, 1635 bp, Zea mays subsp. mays
  misc_feature (1)..(1635): Ceres Seq. ID no. 12363343
gcacgagaccattacctagaacatcctaatcaaaaccccttcttccccgactcgcccggcgctgaataagattcccctgtattctgttccagagatgagctgatcgagcagcccgtcgccaagccaaccggacatggtgagcgacggcgcgcgcgggctgctgggcgcgtacgagctcgggcggacgctcggggagggcaacttcgggaaggtgaagcaggcgcggcaccgcggcagcggcgggcagtttgccgtgaagatcatggagcgcgccagggtgctgtcgcagcgcgcggacgagcagatatgccgcgagatcgccacgctcaagctgctcgcgcaccccaacgtcgtccgcctccacgaggtggctgccagcaagacgaagatctacatggtgcttgagctcgtcaacggcggcgagctgctggacaggattgcggccagtgagggaaagctcccggagcaggaggcaaggaggctcttccagcagctggttgatggtgtaagctactgccatgaaaagggcgtctgtcacagagacctcaagctggagaacgttcttgtcgaccggaagggaaacatcaagatctctgatttcgggctcagcgctttaccgcaacatctcgggaacgatgggttgctgcacacgacctgcggtagccccaactacattgcccctgaggttctgcagaacagagggtacgacgggtcgctatcggacatctggtcatgcggggtgattctctacgtgatgctcgtagggcacctcccgttcgacgaccggaacatcgtcgttctctaccagaagattttcaagggcgatgctcagatcccggagtggctctctcccggcgcacggaaccttctccggaggatccttgagccctacccggcggagcggatcgccatggcagagatcaaggcgcacccatggttccaggagcactacgtccctgtccttcctccgtacgacgacgacgacgattcagtgaagcaaatcggtgcgggtagtaaaaccactcatcacatcaacgcgtttcagttgatcggaatggcgtcgtccctagacctatcagggttttttgaggaagaggacgtgtcccaaaggaagatcaggttcacgtccgcacaaccgcctgaggatttgttcgccgagatcgaacgctctgcgactgacatgggcttccatgttcacagagggcatagtaagcttaggctgacgcgaaactgcgaccggtcgaagaatcagaagaaccctatgtcgtcgtcgtcgtcgtcgtttctagtctgcaccgaggtttttgagcttagcccctctttgtacgtcgtggagctcaacaagtcccatggcgaccctgcactgtacaggcagtgaggttacgagtcacctgatgagcaagttggtacctagaatctcaagtcccaggtcaagaacaggtaccacaggatgaggcgcatggaggatgctgcgatgtgttcgtgagaggtctagaacatcgtctcccagtcaactttgggttgttggatcgttgtctccttacgatgtaatttatttattttgttttgtacataactcctattatatagtaaagttgtaacattcgtttctgtaccatgattcatcatatgtgt

SEQ ID NO: 32596 - protein, 414 aa, Zea mays subsp. mays
  peptide (1)..(414): Ceres Seq. ID no. 12363344
  misc_feature (13)..(269): Pfam Name: Pfam Description:  Protein kinase domain
  misc_feature (9)..(414): NCBI GI NO: 34894358 NR Description: unnamed protein product
  misc_feature (10)..(414): NCBI GI NO: 23237825 NR Description: putative serine/threonine kinase
  misc_feature (7)..(414): NCBI GI NO: 18401539 NR Description: expressed protein; protein id: At3g17510
  misc_feature (7)..(414): NCBI GI NO: 20260556 NR Description: unknown protein [Arabidopsis thaliana]
  misc_feature (7)..(414): NCBI GI NO: 9294138 NR Description: serine/threonine kinase [Arabidopsis thaliana]
  misc_feature (7)..(414): NCBI GI NO: 11066952 NR Description: CBL-interacting protein kinase 1
  misc_feature (70)..(414): NCBI GI NO: 8778506 NR Description: F21D18.2 [Arabidopsis thaliana]
  misc_feature (1)..(102): NCBI GI NO: 8778506 NR Description: F21D18.2 [Arabidopsis thaliana]
  misc_feature (1)..(414): NCBI GI NO: 15221136 NR Description: serine threonine kinase, putative
  misc_feature (1)..(414): NCBI GI NO: 25387053 NR Description: hypothetical protein F11A17.18
MVSDGARGLLGAYELGRTLGEGNFGKVKQARHRGSGGQFAVKIMERARVLSQRADEQICREIATLKLLAHPNVVRLHEVAASKTKIYMVLELVNGGELLDRIAASEGKLPEQEARRLFQQLVDGVSYCHEKGVCHRDLKLENVLVDRKGNIKISDFGLSALPQHLGNDGLLHTTCGSPNYIAPEVLQNRGYDGSLSDIWSCGVILYVMLVGHLPFDDRNIVVLYQKIFKGDAQIPEWLSPGARNLLRRILEPYPAERIAMAEIKAHPWFQEHYVPVLPPYDDDDDSVKQIGAGSKTTHHINAFQLIGMASSLDLSGFFEEEDVSQRKIRFTSAQPPEDLFAEIERSATDMGFHVHRGHSKLRLTRNCDRSKNQKNPMSSSSSSFLVCTEVFELSPSLYVVELNKSHGDPALYRQ

SEQ ID NO: 32597 - protein, 371 aa, Zea mays subsp. mays
  peptide (1)..(371): Ceres Seq. ID no. 12363345
  misc_feature (1)..(226): Pfam Name: Pfam Description:  Protein kinase domain
  misc_feature (1)..(371): NCBI GI NO: 34894358 NR Description: unnamed protein product
  misc_feature (1)..(371): NCBI GI NO: 23237825 NR Description: putative serine/threonine kinase
  misc_feature (1)..(371): NCBI GI NO: 18401539 NR Description: expressed protein; protein id: At3g17510
  misc_feature (1)..(371): NCBI GI NO: 20260556 NR Description: unknown protein [Arabidopsis thaliana]
  misc_feature (1)..(371): NCBI GI NO: 9294138 NR Description: serine/threonine kinase [Arabidopsis thaliana]
  misc_feature (1)..(371): NCBI GI NO: 11066952 NR Description: CBL-interacting protein kinase 1
  misc_feature (27)..(371): NCBI GI NO: 8778506 NR Description: F21D18.2 [Arabidopsis thaliana]
  misc_feature (1)..(59): NCBI GI NO: 8778506 NR Description: F21D18.2 [Arabidopsis thaliana]
  misc_feature (1)..(371): NCBI GI NO: 15221136 NR Description: serine threonine kinase, putative
  misc_feature (1)..(371): NCBI GI NO: 25387053 NR Description: hypothetical protein F11A17.18
MERARVLSQRADEQICREIATLKLLAHPNVVRLHEVAASKTKIYMVLELVNGGELLDRIAASEGKLPEQEARRLFQQLVDGVSYCHEKGVCHRDLKLENVLVDRKGNIKISDFGLSALPQHLGNDGLLHTTCGSPNYIAPEVLQNRGYDGSLSDIWSCGVILYVMLVGHLPFDDRNIVVLYQKIFKGDAQIPEWLSPGARNLLRRILEPYPAERIAMAEIKAHPWFQEHYVPVLPPYDDDDDSVKQIGAGSKTTHHINAFQLIGMASSLDLSGFFEEEDVSQRKIRFTSAQPPEDLFAEIERSATDMGFHVHRGHSKLRLTRNCDRSKNQKNPMSSSSSSFLVCTEVFELSPSLYVVELNKSHGDPALYRQ

SEQ ID NO: 32598 - protein, 327 aa, Zea mays subsp. mays
  peptide (1)..(327): Ceres Seq. ID no. 12363346
  misc_feature (1)..(182): Pfam Name: Pfam Description:  Protein kinase domain
  misc_feature (1)..(327): NCBI GI NO: 34894358 NR Description: unnamed protein product
  misc_feature (1)..(327): NCBI GI NO: 23237825 NR Description: putative serine/threonine kinase
  misc_feature (1)..(327): NCBI GI NO: 18401539 NR Description: expressed protein; protein id: At3g17510
  misc_feature (1)..(327): NCBI GI NO: 20260556 NR Description: unknown protein [Arabidopsis thaliana]
  misc_feature (1)..(327): NCBI GI NO: 9294138 NR Description: serine/threonine kinase [Arabidopsis thaliana]
  misc_feature (1)..(327): NCBI GI NO: 11066952 NR Description: CBL-interacting protein kinase 1
  misc_feature (1)..(327): NCBI GI NO: 8778506 NR Description: F21D18.2 [Arabidopsis thaliana]
  misc_feature (1)..(15): NCBI GI NO: 8778506 NR Description: F21D18.2 [Arabidopsis thaliana]
  misc_feature (1)..(327): NCBI GI NO: 15221136 NR Description: serine threonine kinase, putative
  misc_feature (1)..(327): NCBI GI NO: 25387053 NR Description: hypothetical protein F11A17.18
MVLELVNGGELLDRIAASEGKLPEQEARRLFQQLVDGVSYCHEKGVCHRDLKLENVLVDRKGNIKISDFGLSALPQHLGNDGLLHTTCGSPNYIAPEVLQNRGYDGSLSDIWSCGVILYVMLVGHLPFDDRNIVVLYQKIFKGDAQIPEWLSPGARNLLRRILEPYPAERIAMAEIKAHPWFQEHYVPVLPPYDDDDDSVKQIGAGSKTTHHINAFQLIGMASSLDLSGFFEEEDVSQRKIRFTSAQPPEDLFAEIERSATDMGFHVHRGHSKLRLTRNCDRSKNQKNPMSSSSSSFLVCTEVFELSPSLYVVELNKSHGDPALYRQ

SEQ ID NO: 32599 - DNA, 1272 bp, Zea mays subsp. mays
  misc_feature (1)..(1272): Ceres Seq. ID no. 12462451
aacgccctcgaacgcgccactttaccaccagtccccctcaccgccgcccgtctccgcctccgccgacaaccggagccagggccctcgccacccacccgattgagccaccccatgcctcctcccactgcgacgatgtcccccgcagctggcggttcctttcctgagctcacctgtcccgcggactttgccaccgtcgccgcccccggcggccgcttctccgtcgtcggcttcggatccctcctctccgagcggagcgcgaggagcacgttcccggagctggagggcttccgggtcgcggtgctgcgggggttccgtcgagtcttcgcccacgctgcccccatcttcttcgagcgcggcatcgccatcgaggccaccaaggaattctcaagcttgagcgtggagccatgcgacagtgaactgatagtagtcacggttttcgaaatcaaggaggaagaggtcccggcatttattgagagggaacatgagtttagatttcttgcggttgtccctgaaggattggatggggtaccttttacaaatcgagcagtaagtactctgcatttgaaatcataattttagttttgcctttgctctttgctgctgcttcccacaacaagaattatttttctttgtcttgttggtatttggtggttaggttgtctgtgcacgctacagcaatgaagaatatttccaagagagatgccgaggaagcaaggaaatatataacaagtactatggacggtacaatattgacaaaatatggagagatgatatcttaccatgtcgcttatacctcaggcattgtgttcttgctgcgaaaaatcttggagaaccagcatacagcaacttcttagaccacacctatcttggtgatcggaaaactacaataagggaatacttggccactaccgctgctggactcatggaagaggagcctcccgagtcgctaaaaagtcgctacggtggctgattcgatggctgactctcatatccaccacaggttgagctatcatgcgctcgcagtttatcatattaacagttactgaattaggatttagtagtagtgttccaggatgttcgaaataatgcatggtgctccgttgcagaagatctaggattctggtttgttcggcaggtggcgccaaaacatgtgatatgtgaccaaattgtgattgatgtgcatctataatttgcgactgtttgctacaacaacagaaattcagggccagacacccaaaaatgaggacaaaatgcatctttcccccctttttc

SEQ ID NO: 32600 - protein, 190 aa, Zea mays subsp. mays
  peptide (1)..(190): Ceres Seq. ID no. 12462452
  misc_feature (55)..(183): NCBI GI NO: 30683505 NR Description: expressed protein [Arabidopsis thaliana]
  misc_feature (55)..(169): NCBI GI NO: 7485175 NR Description: hypothetical protein - Arabidopsis thaliana
  misc_feature (80)..(183): NCBI GI NO: 26452147 NR Description: unknown protein [Arabidopsis thaliana]
NALERATLPPVPLTAARLRLRRQPEPGPSPPTRLSHPMPPPTATMSPAAGGSFPELTCPADFATVAAPGGRFSVVGFGSLLSERSARSTFPELEGFRVAVLRGFRRVFAHAAPIFFERGIAIEATKEFSSLSVEPCDSELIVVTVFEIKEEEVPAFIEREHEFRFLAVVPEGLDGVPFTNRAVSTLHLKS

SEQ ID NO: 32601 - protein, 153 aa, Zea mays subsp. mays
  peptide (1)..(153): Ceres Seq. ID no. 12462453
  misc_feature (18)..(146): NCBI GI NO: 30683505 NR Description: expressed protein [Arabidopsis thaliana]
  misc_feature (18)..(132): NCBI GI NO: 7485175 NR Description: hypothetical protein - Arabidopsis thaliana
  misc_feature (43)..(146): NCBI GI NO: 26452147 NR Description: unknown protein [Arabidopsis thaliana]
MPPPTATMSPAAGGSFPELTCPADFATVAAPGGRFSVVGFGSLLSERSARSTFPELEGFRVAVLRGFRRVFAHAAPIFFERGIAIEATKEFSSLSVEPCDSELIVVTVFEIKEEEVPAFIEREHEFRFLAVVPEGLDGVPFTNRAVSTLHLKS

SEQ ID NO: 32602 - protein, 146 aa, Zea mays subsp. mays
  peptide (1)..(146): Ceres Seq. ID no. 12462454
  misc_feature (11)..(139): NCBI GI NO: 30683505 NR Description: expressed protein [Arabidopsis thaliana]
  misc_feature (11)..(125): NCBI GI NO: 7485175 NR Description: hypothetical protein - Arabidopsis thaliana
  misc_feature (36)..(139): NCBI GI NO: 26452147 NR Description: unknown protein [Arabidopsis thaliana]
MSPAAGGSFPELTCPADFATVAAPGGRFSVVGFGSLLSERSARSTFPELEGFRVAVLRGFRRVFAHAAPIFFERGIAIEATKEFSSLSVEPCDSELIVVTVFEIKEEEVPAFIEREHEFRFLAVVPEGLDGVPFTNRAVSTLHLKS

SEQ ID NO: 32603 - DNA, 1639 bp, Zea mays subsp. mays
  misc_feature (1)..(1639): Ceres Seq. ID no. 12412046
agctttgcgtctgtggccaaccaggcgcctccctggctccctcccaccacccggctctccacgccgccgccgccgccgccgccacaagcgaccgcgcatccgctcttctccctcccttcgctctcggcggccggcgatgggggagaccgtacgggcgggcgacgttgcaatcacgactcacgagatggagagccacaacccatcgcactctcagatcgccgaagtgacgatggacatcgcagcgtcagcttctggagcggcagggagcaagttctgcaagggcgcagcctgcgacttctccgacgccagcaactcctcgaaggacgccagggagaggtcggcgtcgatgaggaagctgatagtcgcggtggtcctctgcgtcgtattcatggcggtggaggtggtggggggcatcaaggcgaacagcctggccatcctgaccgacgcggcgcacctcctgtcggacgtggcggcgttcgccatctcgctgttctcgctctgggccgccgggtgggaggcgacgccgcggcagtcgtacgggttcttccgggtggagatcctcggcgccctcgtctccatccagctcatctggctgctcgccggcatactggtgtacgaggccgtcgtgaggctcgtcggcgagagcggcgacgtgcgggggtcgctcatgttcgccgtgtcggcgttcgggctggccgtcaacgttctcatggccgtgttgctgggccatgaccacgggcacggccacggccatggacatggacattcgcatgaccatggccacggccatggggattcggacgatggccattcccaccacgacgacgaggagcaagaacagggccgtgtccatcaccacgagcacggccatggaggcgctatcactgtcacaacccaccaccaccaccatcatcacgatcacgatgttgaggaggcgctgatcaagcatgagggtacccagtctgctggcagagctggtaagaagcctcggcggaacatcaacgtgcacagcgcatacctccacgtgctcggggactccgtccagagcgtcggggtcatggtgggcggggcgatcatctggtacaagccggagtggaaggtcatcgacctcatctgcacgctcgtcttctcggtggtggtgctgttcaccacgatccggatgctgcgcagcatcctcgaagtgttgatggagagcacgccccgcgaggtcgacgccaccaggctggagagcgggctctgcgggatggagggcgtggtggccgtccacgagctgcacatctgggccatcacggtgggcaaggtgctgctggcgtgccatgtgaccatcgccagggatgcggacgctgatgagatccttgacaaggtgatcgggtacatcaagacggagtacaacatcagccatgtgaccatccaggtcgagcgcgagtagggagctctgtctttggctgctgtcttgggcataaatggctggcgccattcgagctctggtgtgctcggtggtgttgtctattgctagtctattaggcaggcgggggaattgtttgcgtcgaggtggtggtggtggtcgtcagtaagtcagtcggtgcataaacaaggatgtaattttcggtaatgctattgacagcatcgtggttcattg

SEQ ID NO: 32604 - protein, 475 aa, Zea mays subsp. mays
  peptide (1)..(475): Ceres Seq. ID no. 12412047
  misc_feature (119)..(474): Pfam Name: Pfam Description:  Cation efflux family
  misc_feature (62)..(475): NCBI GI NO: 30420736 NR Description: zinc transporter
  misc_feature (62)..(474): NCBI GI NO: 15226441 NR Description: putative zinc transporter; protein id: At2g46800
  misc_feature (62)..(278): NCBI GI NO: 15231581 NR Description: zinc transporter -like protein
  misc_feature (257)..(475): NCBI GI NO: 15231581 NR Description: zinc transporter -like protein
  misc_feature (62)..(475): NCBI GI NO: 16550925 NR Description: zinc transporter [Eucalyptus grandis]
  misc_feature (62)..(474): NCBI GI NO: 40287446 NR Description: heavy metal transporter MTP1 [Arabis shortii]
  misc_feature (62)..(474): NCBI GI NO: 40287442 NR Description: heavy metal transporter MTP1 [Thlaspi arvense]
  misc_feature (62)..(474): NCBI GI NO: 4206640 NR Description: zinc transporter ZAT [Arabidopsis thaliana]
  misc_feature (68)..(474): NCBI GI NO: 39919138 NR Description: zinc transporter CDF1-3
  misc_feature (68)..(262): NCBI GI NO: 28315880 NR Description: putative vacuolar metal-ion transport proteinMTP1t2
ALRLWPTRRLPGSLPPPGSPRRRRRRRHKRPRIRSSPSLRSRRPAMGETVRAGDVAITTHEMESHNPSHSQIAEVTMDIAASASGAAGSKFCKGAACDFSDASNSSKDARERSASMRKLIVAVVLCVVFMAVEVVGGIKANSLAILTDAAHLLSDVAAFAISLFSLWAAGWEATPRQSYGFFRVEILGALVSIQLIWLLAGILVYEAVVRLVGESGDVRGSLMFAVSAFGLAVNVLMAVLLGHDHGHGHGHGHGHSHDHGHGHGDSDDGHSHHDDEEQEQGRVHHHEHGHGGAITVTTHHHHHHHDHDVEEALIKHEGTQSAGRAGKKPRRNINVHSAYLHVLGDSVQSVGVMVGGAIIWYKPEWKVIDLICTLVFSVVVLFTTIRMLRSILEVLMESTPREVDATRLESGLCGMEGVVAVHELHIWAITVGKVLLACHVTIARDADADEILDKVIGYIKTEYNISHVTIQVERE

SEQ ID NO: 32605 - protein, 430 aa, Zea mays subsp. mays
  peptide (1)..(430): Ceres Seq. ID no. 12412048
  misc_feature (74)..(429): Pfam Name: Pfam Description:  Cation efflux family
  misc_feature (17)..(430): NCBI GI NO: 30420736 NR Description: zinc transporter
  misc_feature (17)..(429): NCBI GI NO: 15226441 NR Description: putative zinc transporter; protein id: At2g46800
  misc_feature (17)..(233): NCBI GI NO: 15231581 NR Description: zinc transporter -like protein
  misc_feature (212)..(430): NCBI GI NO: 15231581 NR Description: zinc transporter -like protein
  misc_feature (17)..(430): NCBI GI NO: 16550925 NR Description: zinc transporter [Eucalyptus grandis]
  misc_feature (17)..(429): NCBI GI NO: 40287446 NR Description: heavy metal transporter MTP1 [Arabis shortii]
  misc_feature (17)..(429): NCBI GI NO: 40287442 NR Description: heavy metal transporter MTP1 [Thlaspi arvense]
  misc_feature (17)..(429): NCBI GI NO: 4206640 NR Description: zinc transporter ZAT [Arabidopsis thaliana]
  misc_feature (23)..(429): NCBI GI NO: 39919138 NR Description: zinc transporter CDF1-3
  misc_feature (23)..(217): NCBI GI NO: 28315880 NR Description: putative vacuolar metal-ion transport proteinMTP1t2
MGETVRAGDVAITTHEMESHNPSHSQIAEVTMDIAASASGAAGSKFCKGAACDFSDASNSSKDARERSASMRKLIVAVVLCVVFMAVEVVGGIKANSLAILTDAAHLLSDVAAFAISLFSLWAAGWEATPRQSYGFFRVEILGALVSIQLIWLLAGILVYEAVVRLVGESGDVRGSLMFAVSAFGLAVNVLMAVLLGHDHGHGHGHGHGHSHDHGHGHGDSDDGHSHHDDEEQEQGRVHHHEHGHGGAITVTTHHHHHHHDHDVEEALIKHEGTQSAGRAGKKPRRNINVHSAYLHVLGDSVQSVGVMVGGAIIWYKPEWKVIDLICTLVFSVVVLFTTIRMLRSILEVLMESTPREVDATRLESGLCGMEGVVAVHELHIWAITVGKVLLACHVTIARDADADEILDKVIGYIKTEYNISHVTIQVERE

SEQ ID NO: 32606 - protein, 414 aa, Zea mays subsp. mays
  peptide (1)..(414): Ceres Seq. ID no. 12412049
  misc_feature (58)..(413): Pfam Name: Pfam Description:  Cation efflux family
  misc_feature (1)..(414): NCBI GI NO: 30420736 NR Description: zinc transporter
  misc_feature (1)..(413): NCBI GI NO: 15226441 NR Description: putative zinc transporter; protein id: At2g46800
  misc_feature (1)..(217): NCBI GI NO: 15231581 NR Description: zinc transporter -like protein
  misc_feature (196)..(414): NCBI GI NO: 15231581 NR Description: zinc transporter -like protein
  misc_feature (1)..(414): NCBI GI NO: 16550925 NR Description: zinc transporter [Eucalyptus grandis]
  misc_feature (1)..(413): NCBI GI NO: 40287446 NR Description: heavy metal transporter MTP1 [Arabis shortii]
  misc_feature (1)..(413): NCBI GI NO: 40287442 NR Description: heavy metal transporter MTP1 [Thlaspi arvense]
  misc_feature (1)..(413): NCBI GI NO: 4206640 NR Description: zinc transporter ZAT [Arabidopsis thaliana]
  misc_feature (7)..(413): NCBI GI NO: 39919138 NR Description: zinc transporter CDF1-3
  misc_feature (7)..(201): NCBI GI NO: 28315880 NR Description: putative vacuolar metal-ion transport proteinMTP1t2
MESHNPSHSQIAEVTMDIAASASGAAGSKFCKGAACDFSDASNSSKDARERSASMRKLIVAVVLCVVFMAVEVVGGIKANSLAILTDAAHLLSDVAAFAISLFSLWAAGWEATPRQSYGFFRVEILGALVSIQLIWLLAGILVYEAVVRLVGESGDVRGSLMFAVSAFGLAVNVLMAVLLGHDHGHGHGHGHGHSHDHGHGHGDSDDGHSHHDDEEQEQGRVHHHEHGHGGAITVTTHHHHHHHDHDVEEALIKHEGTQSAGRAGKKPRRNINVHSAYLHVLGDSVQSVGVMVGGAIIWYKPEWKVIDLICTLVFSVVVLFTTIRMLRSILEVLMESTPREVDATRLESGLCGMEGVVAVHELHIWAITVGKVLLACHVTIARDADADEILDKVIGYIKTEYNISHVTIQVERE

SEQ ID NO: 32607 - DNA, 948 bp, Zea mays subsp. mays
  misc_feature (1)..(948): Ceres Seq. ID no. 12344862
atattagtggcatttccctttcttcactggttcacccggcatactctcactcactctctccctcggtccctcctcgtcgttctcccgtgtccgccgtgcactgtctgtctctggtggcggcgactgggcggcctccgccgctgccctacgccaggatcccaggctgcatcttccgtacgccaggagggcctcgccgcaggttgggtgggaggcagagatgagccgggggcggtcgccggagccgctggatttcttcatctggactgtgcaggatgtagggttatggttggaggaaataaatcttggaagctaccgccaggcttttgaagaaaatggtgtcaatggagagtatctagaaagcctgtcggtgttcaccactgagcagattctccgctttataagacgatgccatatgaaatggggagattttatcaccctctgtaaagagttgagacgcatcaaagttgcctgcctgaaaggggagcaggaggtccgcaggccgtggtgggcgccgtcatgcctgtcggtcgtgttcacgcgggtggccaggcacaaccggcagtcccgggtcgtctccttgaagctggaagcttagcaagttagcaggctcgccctcagccagtggaactggcagagtcccgcgtcgtctcctgatgccggaagcttagtagcaggctcgccgtcagccaccttgcctcgcgcgctgccatccccgtcgttccagtgccgtagggcacacaaggggcgcctctctctgtgtaccatatagcaagcaatgggtctcagtgttcttgaaaggtgctctcgcgttacagtcgtcgtgtgttggcatgcgtgtgttttcgttgatttgtttattttcttcacgtataggggttgtgggtttgagttcgagatggtaagatgttgtactgtagacgatgaatatacgtatgctttgcgtgttgt

SEQ ID NO: 32608 - protein, 125 aa, Zea mays subsp. mays
  peptide (1)..(125): Ceres Seq. ID no. 12344863
  misc_feature (13)..(42): Pfam Name: Sterile alpha motif Pfam Description: SAM domain
  misc_feature (1)..(125): NCBI GI NO: 6466959 NR Description: unknown protein [Arabidopsis thaliana]
  misc_feature (1)..(125): NCBI GI NO: 18398048 NR Description: auxin-regulated protein; protein id: At3g07760
MSRGRSPEPLDFFIWTVQDVGLWLEEINLGSYRQAFEENGVNGEYLESLSVFTTEQILRFIRRCHMKWGDFITLCKELRRIKVACLKGEQEVRRPWWAPSCLSVVFTRVARHNRQSRVVSLKLEA

SEQ ID NO: 32609 - protein, 108 aa, Zea mays subsp. mays
  peptide (1)..(108): Ceres Seq. ID no. 12344864
ILVAFPFLHWFTRHTLTHSLPRSLLVVLPCPPCTVCLWWRRLGGLRRCPTPGSQAASSVRQEGLAAGWVGGRDEPGAVAGAAGFLHLDCAGCRVMVGGNKSWKLPPGF

SEQ ID NO: 32610 - protein, 72 aa, Zea mays subsp. mays
  peptide (1)..(72): Ceres Seq. ID no. 12344865
ISGISLSSLVHPAYSHSLSPSVPPRRSPVSAVHCLSLVAATGRPPPLPYARIPGCIFRTPGGPRRRLGGRQR

SEQ ID NO: 32611 - DNA, 1466 bp, Zea mays subsp. mays
  misc_feature (1)..(1466): Ceres Seq. ID no. 12412035
gatccagcaatacccgacgcgcaagccagtgccgcgcccagatctccgcgacagatcagtcgttcgtccagctaactgcactgcacgcaatggccaccacggcgaccaagacgactgcaccggcgcaggagcagcaggccaacggcaacggcaacggcgagcagaagacgcgccactccgaggtcggccacaagagcctgctcaagagcgacgacctctaccagtacatcctggacacgagcgtgtacccgcgggagccggagagcatgaaggagctgcgcgagatcaccgccaagcacccatggaacctgatgaccacctccgccgacgagggccagttcctcaacatgctcatcaagctcatcggcgccaagaagaccatggagatcggcgtctacaccggctactcgctcctcgccaccgcgctcgcactcccggaggacggcacgatcttggccatggacatcaaccgcgagaactacgagctaggcctgccctgcatcaacaaggccggcgtgggccacaagatcgacttccgcgagggccccgcgctccccgtcctggacgacctcgtggcggacaaggagcagcacgggtcgttcgacttcgccttcgtggacgccgacaaggacaactacctcagctaccacgagcggctcctgaagctggtgaggcccggcggcctcatcggctacgacaacacgctgtggaacggctccgtcgtgctccccgacgacgcgcccatgcgcaagtacatccgcttctaccgcgacttcgtgctcgccctcaacagcgcgctcgccgccgacgaccgcgtcgagatctgccagctccccgtcggcgacggcgtcacgctctgccgccgcgtcaagtgaaaaaaaaaacacacatactccctccggtgcagtaaaagaagtcatcctgcgcgtgagcgagagtgcacaaaagaagtcgtagcgcacgtgggtctgggatttttgacgtcgctgcccctgagtaattgcatcgggaaaaaaaaaagctgcgctcaagggaaatcgagcttgagacctccaatctagaatgcctcgggaggtactgcaacaaccaatcgaacttgattgttttggtgatgttaatgcactcatatccctatttaataagggcaaacatagaaaactccatgataattaatcactccttggtatgcacaatcatgtcctaaacgactacctttactgcaccggagggagtaccctgcgttcctgccccggctgtctggcccccactgccaccgacggcgccgcaccccccgttccaatcatatcgtagacgacgcgcagcattaaattatcaatcaccggctctggctctttcttggccctgtactgtactgatgttccttcttgtttttttttcttgggaattgtcgccgtttcagtatacgtaaaatctcgaggtcgataatacagtaatactaccaattt

SEQ ID NO: 32612 - protein, 302 aa, Zea mays subsp. mays
  peptide (1)..(302): Ceres Seq. ID no. 12412036
IQQYPTRKPVPRPDLRDRSVVRPANCTARNGHHGDQDDCTGAGAAGQRQRQRRAEDAPLRGRPQEPAQERRPLPVHPGHERVPAGAGEHEGAARDHRQAPMEPDDHLRRRGPVPQHAHQAHRRQEDHGDRRLHRLLAPRHRARTPGGRHDLGHGHQPRELRARPALHQQGRRGPQDRLPRGPRAPRPGRPRGGQGAARVVRLRLRGRRQGQLPQLPRAAPEAGEARRPHRLRQHAVERLRRAPRRRAHAQVHPLLPRLRARPQQRARRRRPRRDLPAPRRRRRHALPPRQVKKKTHILPPVQ

SEQ ID NO: 32613 - protein, 290 aa, Zea mays subsp. mays
  peptide (1)..(290): Ceres Seq. ID no. 12412037
  misc_feature (77)..(289): Pfam Name: Pfam Description:  O-methyltransferase
  misc_feature (31)..(290): NCBI GI NO: 32347441 NR Description: caffeoyl CoA 3-O-methyltransferase [Zea mays]
  misc_feature (31)..(290): NCBI GI NO: 30580384 NR Description: Caffeoyl-CoA O-methyltransferase 2
  misc_feature (30)..(290): NCBI GI NO: 32347437 NR Description: caffeoyl CoA 3-O-methyltransferase [Zea mays]
  misc_feature (31)..(290): NCBI GI NO: 32347443 NR Description: caffeoyl CoA 3-O-methyltransferase [Zea mays]
  misc_feature (30)..(290): NCBI GI NO: 32347431 NR Description: caffeoyl CoA 3-O-methyltransferase [Zea mays]
  misc_feature (31)..(290): NCBI GI NO: 32347435 NR Description: caffeoyl CoA 3-O-methyltransferase [Zea mays]
  misc_feature (30)..(290): NCBI GI NO: 32347427 NR Description: caffeoyl CoA 3-O-methyltransferase [Zea mays]
  misc_feature (31)..(290): NCBI GI NO: 32347447 NR Description: caffeoyl CoA 3-O-methyltransferase [Zea mays]
  misc_feature (30)..(290): NCBI GI NO: 37221545 NR Description: caffeoyl-CoA 3-O-methyltransferase 1 [Zea mays]
  misc_feature (30)..(290): NCBI GI NO: 30580385 NR Description: Caffeoyl-CoA O-methyltransferase 1
SSNTRRASQCRAQISATDQSFVQLTALHAMATTATKTTAPAQEQQANGNGNGEQKTRHSEVGHKSLLKSDDLYQYILDTSVYPREPESMKELREITAKHPWNLMTTSADEGQFLNMLIKLIGAKKTMEIGVYTGYSLLATALALPEDGTILAMDINRENYELGLPCINKAGVGHKIDFREGPALPVLDDLVADKEQHGSFDFAFVDADKDNYLSYHERLLKLVRPGGLIGYDNTLWNGSVVLPDDAPMRKYIRFYRDFVLALNSALAADDRVEICQLPVGDGVTLCRRVK

SEQ ID NO: 32614 - protein, 261 aa, Zea mays subsp. mays
  peptide (1)..(261): Ceres Seq. ID no. 12412038
  misc_feature (48)..(260): Pfam Name: Pfam Description:  O-methyltransferase
  misc_feature (2)..(261): NCBI GI NO: 32347441 NR Description: caffeoyl CoA 3-O-methyltransferase [Zea mays]
  misc_feature (2)..(261): NCBI GI NO: 30580384 NR Description: Caffeoyl-CoA O-methyltransferase 2
  misc_feature (1)..(261): NCBI GI NO: 32347437 NR Description: caffeoyl CoA 3-O-methyltransferase [Zea mays]
  misc_feature (2)..(261): NCBI GI NO: 32347443 NR Description: caffeoyl CoA 3-O-methyltransferase [Zea mays]
  misc_feature (1)..(261): NCBI GI NO: 32347431 NR Description: caffeoyl CoA 3-O-methyltransferase [Zea mays]
  misc_feature (2)..(261): NCBI GI NO: 32347435 NR Description: caffeoyl CoA 3-O-methyltransferase [Zea mays]
  misc_feature (1)..(261): NCBI GI NO: 32347427 NR Description: caffeoyl CoA 3-O-methyltransferase [Zea mays]
  misc_feature (2)..(261): NCBI GI NO: 32347447 NR Description: caffeoyl CoA 3-O-methyltransferase [Zea mays]
  misc_feature (1)..(261): NCBI GI NO: 37221545 NR Description: caffeoyl-CoA 3-O-methyltransferase 1 [Zea mays]
  misc_feature (1)..(261): NCBI GI NO: 30580385 NR Description: Caffeoyl-CoA O-methyltransferase 1
MATTATKTTAPAQEQQANGNGNGEQKTRHSEVGHKSLLKSDDLYQYILDTSVYPREPESMKELREITAKHPWNLMTTSADEGQFLNMLIKLIGAKKTMEIGVYTGYSLLATALALPEDGTILAMDINRENYELGLPCINKAGVGHKIDFREGPALPVLDDLVADKEQHGSFDFAFVDADKDNYLSYHERLLKLVRPGGLIGYDNTLWNGSVVLPDDAPMRKYIRFYRDFVLALNSALAADDRVEICQLPVGDGVTLCRRVK

SEQ ID NO: 32615 - DNA, 937 bp, Zea mays subsp. mays
  misc_feature (1)..(937): Ceres Seq. ID no. 12355635
cgaaagtcgaaacacagcacagcacaacaggagccaccgccccctttttccttccccccgtctcttcaattcaattcgtacggcacggccaccgggtcaccgcagcaacagaatgcggcgaatctgcatccccaagcttgtgattcttctgctgctctgcaccaggacgctgccggcgggcgtatcctctgcaaagatccatgggaacccagccaacgacctcgtggccctcatcaacggcaagagggaggcgagcaggctgcctgcgctgcgcaacagcagaggcctcgggtgcatggcgctgcagtacatctccgagtgcatggcggccaccacgggcggcgccgcctgcagcagcggcaacacgatggcgtgccagacccccgaggcccacatcacggaggtctacggccgccaactgcggcgtggagctccccacggtggacgtcatctccggccgcctcttcggctgccaccgggaccgcgacggcccggaggacgcgctggcatcagccaccgcgctctcggtgatccgcggcaaggagcacacccaggtaggcgccggcttcgaccgccgcgggcccttcttctggtgcctcctcttcagcagcggcagccccaactccacctttctcctggaggccggcggcaagggcatcgaccagacccatggctgcttcagcgctccggatcgcccctcgtgcaacgccacgccgccgcgccccggccagctcatgtgcaccattaccgcagcggcggctgtgctgctcttccgttgccttgtctccacctagctactccgaccggagtatcctactagcagcagctatgagcttcctggatgatgatattgtattgtattgcaaatctcggaccaatgtcatattccattcattcctggaactggaccagtgtcatattgtatttgcttacgccg

SEQ ID NO: 32616 - protein, 272 aa, Zea mays subsp. mays
  peptide (1)..(272): Ceres Seq. ID no. 12355636
  misc_feature (47)..(136): NCBI GI NO: 30678256 NR Description: expressed protein [Arabidopsis thaliana]
ESRNTAQHNRSHRPLFPSPRLFNSIRTARPPGHRSNRMRRICIPKLVILLLLCTRTLPAGVSSAKIHGNPANDLVALINGKREASRLPALRNSRGLGCMALQYISECMAATTGGAACSSGNTMACQTPEAHITEVYGRQLRRGAPHGGRHLRPPLRLPPGPRRPGGRAGISHRALGDPRQGAHPGRRRLRPPRALLLVPPLQQRQPQLHLSPGGRRQGHRPDPWLLQRSGSPLVQRHAAAPRPAHVHHYRSGGCAALPLPCLHLATPTGVSY

SEQ ID NO: 32617 - protein, 235 aa, Zea mays subsp. mays
  peptide (1)..(235): Ceres Seq. ID no. 12355637
  misc_feature (10)..(99): NCBI GI NO: 30678256 NR Description: expressed protein [Arabidopsis thaliana]
MRRICIPKLVILLLLCTRTLPAGVSSAKIHGNPANDLVALINGKREASRLPALRNSRGLGCMALQYISECMAATTGGAACSSGNTMACQTPEAHITEVYGRQLRRGAPHGGRHLRPPLRLPPGPRRPGGRAGISHRALGDPRQGAHPGRRRLRPPRALLLVPPLQQRQPQLHLSPGGRRQGHRPDPWLLQRSGSPLVQRHAAAPRPAHVHHYRSGGCAALPLPCLHLATPTGVSY

SEQ ID NO: 32618 - protein, 197 aa, Zea mays subsp. mays
  peptide (1)..(197): Ceres Seq. ID no. 12355638
  misc_feature (71)..(170): NCBI GI NO: 30678256 NR Description: expressed protein [Arabidopsis thaliana]
MGTQPTTSWPSSTARGRRAGCLRCATAEASGAWRCSTSPSAWRPPRAAPPAAAATRWRARPPRPTSRRSTAANCGVELPTVDVISGRLFGCHRDRDGPEDALASATALSVIRGKEHTQVGAGFDRRGPFFWCLLFSSGSPNSTFLLEAGGKGIDQTHGCFSAPDRPSCNATPPRPGQLMCTITAAAAVLLFRCLVST

SEQ ID NO: 32619 - DNA, 1232 bp, Zea mays subsp. mays
  misc_feature (1)..(1232): Ceres Seq. ID no. 12341884
atccacaagaggagaagaaacaatcaaccagcaacactcttctcttataacatagtacagcgaaggtaactcacatggcaacttccatgggttgtctcgtcttgctctgccttgtttcttctctccttcccagtgccgtccttggccacccatggggtggcttgttcccacagttctatgaccattcgtgccccaaggcgaaggagattgtgcagtccattgtggcacaggctgtggccaaggagaccaggatggcggcatctttagtcagactgcatttccatgactgctttgtcaagggctgcgatgcttcggtgctgttggacaacagcagcagcatagttagtgagaaagggtccaacccgaacaggaactccctcagggggtttgaggtgatcgaccagattaaggctgctcttgaggctgcctgcccaggcacagtctcctgtgccgacattgttgcccttgcggctcgtgattccaccgccctggttggtggaccatactgggacgtgccacttggccggagagactcgctcggtgcaagcatccagggctccaacaatgacatcccagcccccaacaacacactccccactatcatcaccaagttcaagcgccagggcctcaatgttgttgatgttgtcgccctctcaggtggtcacaccattggtatgtctcggtgcactagtttccggcagaggctatacaaccagacaggcaatggcatggctgacagcacactggatgtatcctacgccgcaaagctgaggcagggatgcccccgctctggtggtgacaacaacctcttccccttggacttcatcacccctgccaagtttgacaatttttactacaagaacctcctggccggcaagggccttctaagctctgatgagattctgttaaccaagagcgctgagacagcggccctcgtgaaggcatatgctgctgatgtcaatctcttcttccagcactttgcacagtctatggtgaatatgggaaacatctcgccactgacagggtcacaaggtgagatcaggaagaactgcaggaggctcaacaatgaccactgagggcactgaagtcgcttgatgtgctgaattgtttgtgatgttggtggcgtattttgtttaaataagtaagcatggctgtgattttatcatatgatcgatctttggggttttatttaacacattgtaaaatgtgtatctattaataactcaatgtat

SEQ ID NO: 32620 - protein, 333 aa, Zea mays subsp. mays
  peptide (1)..(333): Ceres Seq. ID no. 12341885
  misc_feature (46)..(294): Pfam Name: Pfam Description:  Peroxidase
  misc_feature (5)..(331): NCBI GI NO: 34903044 NR Description: unnamed protein product
  misc_feature (1)..(331): NCBI GI NO: 25044849 NR Description: peroxidase [Ananas comosus]
  misc_feature (5)..(333): NCBI GI NO: 34913714 NR Description: putative peroxidase
  misc_feature (1)..(330): NCBI GI NO: 7453855 NR Description: peroxidase prx15 precursor [Spinacia oleracea]
  misc_feature (1)..(330): NCBI GI NO: 7453853 NR Description: peroxidase prx14 precursor [Spinacia oleracea]
  misc_feature (1)..(331): NCBI GI NO: 7658147 NR Description: peroxidase [Asparagus officinalis]
  misc_feature (1)..(331): NCBI GI NO: 15239370 NR Description: peroxidase, putative; protein id: At5g66390.1
  misc_feature (1)..(331): NCBI GI NO: 1402918 NR Description: peroxidase [Arabidopsis thaliana]
  misc_feature (8)..(331): NCBI GI NO: 7453851 NR Description: peroxidase prx13 precursor [Spinacia oleracea]
  misc_feature (28)..(331): NCBI GI NO: 15224116 NR Description: peroxidase, putative; protein id: At2g18150
MATSMGCLVLLCLVSSLLPSAVLGHPWGGLFPQFYDHSCPKAKEIVQSIVAQAVAKETRMAASLVRLHFHDCFVKGCDASVLLDNSSSIVSEKGSNPNRNSLRGFEVIDQIKAALEAACPGTVSCADIVALAARDSTALVGGPYWDVPLGRRDSLGASIQGSNNDIPAPNNTLPTIITKFKRQGLNVVDVVALSGGHTIGMSRCTSFRQRLYNQTGNGMADSTLDVSYAAKLRQGCPRSGGDNNLFPLDFITPAKFDNFYYKNLLAGKGLLSSDEILLTKSAETAALVKAYAADVNLFFQHFAQSMVNMGNISPLTGSQGEIRKNCRRLNNDH

SEQ ID NO: 32621 - protein, 329 aa, Zea mays subsp. mays
  peptide (1)..(329): Ceres Seq. ID no. 12341886
  misc_feature (42)..(290): Pfam Name: Pfam Description:  Peroxidase
  misc_feature (1)..(327): NCBI GI NO: 34903044 NR Description: unnamed protein product
  misc_feature (1)..(327): NCBI GI NO: 25044849 NR Description: peroxidase [Ananas comosus]
  misc_feature (1)..(329): NCBI GI NO: 34913714 NR Description: putative peroxidase
  misc_feature (1)..(326): NCBI GI NO: 7453855 NR Description: peroxidase prx15 precursor [Spinacia oleracea]
  misc_feature (1)..(326): NCBI GI NO: 7453853 NR Description: peroxidase prx14 precursor [Spinacia oleracea]
  misc_feature (1)..(327): NCBI GI NO: 7658147 NR Description: peroxidase [Asparagus officinalis]
  misc_feature (1)..(327): NCBI GI NO: 15239370 NR Description: peroxidase, putative; protein id: At5g66390.1
  misc_feature (1)..(327): NCBI GI NO: 1402918 NR Description: peroxidase [Arabidopsis thaliana]
  misc_feature (4)..(327): NCBI GI NO: 7453851 NR Description: peroxidase prx13 precursor [Spinacia oleracea]
  misc_feature (24)..(327): NCBI GI NO: 15224116 NR Description: peroxidase, putative; protein id: At2g18150
MGCLVLLCLVSSLLPSAVLGHPWGGLFPQFYDHSCPKAKEIVQSIVAQAVAKETRMAASLVRLHFHDCFVKGCDASVLLDNSSSIVSEKGSNPNRNSLRGFEVIDQIKAALEAACPGTVSCADIVALAARDSTALVGGPYWDVPLGRRDSLGASIQGSNNDIPAPNNTLPTIITKFKRQGLNVVDVVALSGGHTIGMSRCTSFRQRLYNQTGNGMADSTLDVSYAAKLRQGCPRSGGDNNLFPLDFITPAKFDNFYYKNLLAGKGLLSSDEILLTKSAETAALVKAYAADVNLFFQHFAQSMVNMGNISPLTGSQGEIRKNCRRLNNDH

SEQ ID NO: 32622 - protein, 274 aa, Zea mays subsp. mays
  peptide (1)..(274): Ceres Seq. ID no. 12341887
  misc_feature (1)..(235): Pfam Name: Pfam Description:  Peroxidase
  misc_feature (1)..(272): NCBI GI NO: 34903044 NR Description: unnamed protein product
  misc_feature (1)..(272): NCBI GI NO: 25044849 NR Description: peroxidase [Ananas comosus]
  misc_feature (1)..(274): NCBI GI NO: 34913714 NR Description: putative peroxidase
  misc_feature (1)..(271): NCBI GI NO: 7453855 NR Description: peroxidase prx15 precursor [Spinacia oleracea]
  misc_feature (1)..(271): NCBI GI NO: 7453853 NR Description: peroxidase prx14 precursor [Spinacia oleracea]
  misc_feature (1)..(272): NCBI GI NO: 7658147 NR Description: peroxidase [Asparagus officinalis]
  misc_feature (1)..(272): NCBI GI NO: 15239370 NR Description: peroxidase, putative; protein id: At5g66390.1
  misc_feature (1)..(272): NCBI GI NO: 1402918 NR Description: peroxidase [Arabidopsis thaliana]
  misc_feature (1)..(272): NCBI GI NO: 7453851 NR Description: peroxidase prx13 precursor [Spinacia oleracea]
  misc_feature (1)..(272): NCBI GI NO: 15224116 NR Description: peroxidase, putative; protein id: At2g18150
MAASLVRLHFHDCFVKGCDASVLLDNSSSIVSEKGSNPNRNSLRGFEVIDQIKAALEAACPGTVSCADIVALAARDSTALVGGPYWDVPLGRRDSLGASIQGSNNDIPAPNNTLPTIITKFKRQGLNVVDVVALSGGHTIGMSRCTSFRQRLYNQTGNGMADSTLDVSYAAKLRQGCPRSGGDNNLFPLDFITPAKFDNFYYKNLLAGKGLLSSDEILLTKSAETAALVKAYAADVNLFFQHFAQSMVNMGNISPLTGSQGEIRKNCRRLNNDH

SEQ ID NO: 32623 - DNA, 1495 bp, Zea mays subsp. mays
  misc_feature (1)..(1495): Ceres Seq. ID no. 12566151
gcacgagaccattacctagaacatcctaatcgaaaaaacgacagcgcgcacttggattcggcgaccaccggagcgcggaggaggcacaggcgccgatctaaagacgatggccgccgcgggctcctcgccgtccttctcctcctcgagtaagcggtgcgtgccctgcttctttcttcaattttcccccgatccatggctcgtgcgtgggttccctgctcctagctccactcccccgtccatggcttgcatctatgctgcacagctcggttgctgttgcagttcaacctacttgttactccaaaaagaaggcgggcttatccaagatattgatcaaaatttccaccttttcgcgtcgaagggcgatgaattgaaggatccacccaggccaagcactggtgctctgtgcttatcttttagcgagcgaagtggtcatttccccctctcttctttatgggaggaaaataggaaatggtgtgccaagtgtatcctcaaccattctactgttccaaacgtgcagtatacatcggcatacagtcgatccagttgcaacaccatagctggaagggaaggtggccctcgtcactggtggcgccaccggcatcggtgaggccatcgttcgcctcttcatggagcacggcgccaaggtctgcatcgcggacatccaggatgaggctgggcagcagctgcgcgacgccctgggaggtgacgcgcagggcgccatgttcgtccactgcgacgtgacgtcggaggaggacgtgagccgcgccgtggacgctgcggcggagcggttcggcgcgctggacgtgatggtgaacaacgccggcgtgacgggcaccaaggtgacggacatccgcaacgtggacttcgcggaggcgcgcagggtgctcgacgtcaacgtgcacggcgtgttcctggggatgaagcacgcggcgcgcgctatgatcccgcggaagcggggctccatcgtgtcgctggccagcgtggccagcgccatcggcgggacgggcccgcacgtctacacggcgtccaagcacgccgtggtcgggctcaccaagagcgtcgccgcggagctcggccgccacggggtgcgcgtcaactgcgtgtccccctatgccgtgcccacggcgctgtcgatgccgcacctgccccagggcgcgcgcgcagatgacgcgctcaaggacttcctggcctttgtcggcggcgaggccaacctcaagggcgtcgacgccatgcccgaggacgtcgcccaggcggtgctctacctggccagcgacgaggcgaggtacgtcagcgcggtcaacctcatggtggacggaggcttcacagccgtaaacaataacctcagggcgtttgaggattagttgaggcatttatgccagctctgggattgggagggagtattaccgctatttcttctgctgttgtgacaagtgtgtgcaagactaataaaccgcagcatgttcatgtagccaacagatgattgaacattccaagt

SEQ ID NO: 32624 - protein, 244 aa, Zea mays subsp. mays
  peptide (1)..(244): Ceres Seq. ID no. 12566152
  misc_feature (1)..(242): NCBI GI NO: 15218213 NR Description: short chain alcohol dehydrogenase, putative
  misc_feature (1)..(185): NCBI GI NO: 1717794 NR Description: SEX DETERMINATION PROTEIN TASSELSEED 2
  misc_feature (179)..(237): NCBI GI NO: 1717794 NR Description: SEX DETERMINATION PROTEIN TASSELSEED 2
  misc_feature (1)..(237): NCBI GI NO: 1877480 NR Description: short-chain alcohol dehydrogenase
  misc_feature (1)..(237): NCBI GI NO: 34898190 NR Description: putative short-chain alcohol dehydrogenase
  misc_feature (1)..(244): NCBI GI NO: 38346185 NR Description: OSJNBa0096F01.12
  misc_feature (1)..(243): NCBI GI NO: 13752458 NR Description: stem secoisolariciresinol dehydrogenase
  misc_feature (1)..(237): NCBI GI NO: 33146885 NR Description: putative short-chain alcohol dehydrogenase
  misc_feature (1)..(244): NCBI GI NO: 38346186 NR Description: OSJNBa0096F01.13
  misc_feature (1)..(185): NCBI GI NO: 15192925 NR Description: alcohol dehydrogenase [Zea mays subsp. mays]
MEHGAKVCIADIQDEAGQQLRDALGGDAQGAMFVHCDVTSEEDVSRAVDAAAERFGALDVMVNNAGVTGTKVTDIRNVDFAEARRVLDVNVHGVFLGMKHAARAMIPRKRGSIVSLASVASAIGGTGPHVYTASKHAVVGLTKSVAAELGRHGVRVNCVSPYAVPTALSMPHLPQGARADDALKDFLAFVGGEANLKGVDAMPEDVAQAVLYLASDEARYVSAVNLMVDGGFTAVNNNLRAFED

SEQ ID NO: 32625 - protein, 213 aa, Zea mays subsp. mays
  peptide (1)..(213): Ceres Seq. ID no. 12566153
  misc_feature (1)..(211): NCBI GI NO: 15218213 NR Description: short chain alcohol dehydrogenase, putative
  misc_feature (1)..(154): NCBI GI NO: 1717794 NR Description: SEX DETERMINATION PROTEIN TASSELSEED 2
  misc_feature (148)..(206): NCBI GI NO: 1717794 NR Description: SEX DETERMINATION PROTEIN TASSELSEED 2
  misc_feature (1)..(206): NCBI GI NO: 1877480 NR Description: short-chain alcohol dehydrogenase
  misc_feature (1)..(206): NCBI GI NO: 34898190 NR Description: putative short-chain alcohol dehydrogenase
  misc_feature (1)..(213): NCBI GI NO: 38346185 NR Description: OSJNBa0096F01.12
  misc_feature (1)..(212): NCBI GI NO: 13752458 NR Description: stem secoisolariciresinol dehydrogenase
  misc_feature (1)..(206): NCBI GI NO: 33146885 NR Description: putative short-chain alcohol dehydrogenase
  misc_feature (1)..(213): NCBI GI NO: 38346186 NR Description: OSJNBa0096F01.13
  misc_feature (1)..(154): NCBI GI NO: 15192925 NR Description: alcohol dehydrogenase [Zea mays subsp. mays]
MFVHCDVTSEEDVSRAVDAAAERFGALDVMVNNAGVTGTKVTDIRNVDFAEARRVLDVNVHGVFLGMKHAARAMIPRKRGSIVSLASVASAIGGTGPHVYTASKHAVVGLTKSVAAELGRHGVRVNCVSPYAVPTALSMPHLPQGARADDALKDFLAFVGGEANLKGVDAMPEDVAQAVLYLASDEARYVSAVNLMVDGGFTAVNNNLRAFED

SEQ ID NO: 32626 - protein, 184 aa, Zea mays subsp. mays
  peptide (1)..(184): Ceres Seq. ID no. 12566154
  misc_feature (1)..(182): NCBI GI NO: 15218213 NR Description: short chain alcohol dehydrogenase, putative
  misc_feature (1)..(125): NCBI GI NO: 1717794 NR Description: SEX DETERMINATION PROTEIN TASSELSEED 2
  misc_feature (119)..(177): NCBI GI NO: 1717794 NR Description: SEX DETERMINATION PROTEIN TASSELSEED 2
  misc_feature (1)..(177): NCBI GI NO: 1877480 NR Description: short-chain alcohol dehydrogenase
  misc_feature (1)..(177): NCBI GI NO: 34898190 NR Description: putative short-chain alcohol dehydrogenase
  misc_feature (1)..(184): NCBI GI NO: 38346185 NR Description: OSJNBa0096F01.12
  misc_feature (1)..(183): NCBI GI NO: 13752458 NR Description: stem secoisolariciresinol dehydrogenase
  misc_feature (1)..(177): NCBI GI NO: 33146885 NR Description: putative short-chain alcohol dehydrogenase
  misc_feature (1)..(184): NCBI GI NO: 38346186 NR Description: OSJNBa0096F01.13
  misc_feature (1)..(125): NCBI GI NO: 15192925 NR Description: alcohol dehydrogenase [Zea mays subsp. mays]
MVNNAGVTGTKVTDIRNVDFAEARRVLDVNVHGVFLGMKHAARAMIPRKRGSIVSLASVASAIGGTGPHVYTASKHAVVGLTKSVAAELGRHGVRVNCVSPYAVPTALSMPHLPQGARADDALKDFLAFVGGEANLKGVDAMPEDVAQAVLYLASDEARYVSAVNLMVDGGFTAVNNNLRAFED

SEQ ID NO: 32627 - DNA, 1122 bp, Zea mays subsp. mays
  misc_feature (1)..(1122): Ceres Seq. ID no. 12413380
acggacgcttccacgcgaccaagcagccagagccacgcggcgctggtctggccagccatgtcctgcctcgcggcgccgccggctgcaccgccaaaggcgggggaacgcatgctccgcgccgtcgctcctttgcgctcgccttcgccgtgccggggcctgcattacgcggtgcgggggactggagggcgagaagccgggtgcggccggcggcagctggcgctgctgcgggtgctccccagctggcgagtccagggcgtccggggacggcggcctttccagcttctgtataattgaaggtccagagacgatcgaggactttgctcaaatgcaatcgcaggagattgaagacaacatcatgagccgacgcaacaaaattttccttctgatggaagaggttagacggttgcgagtgcagcagcgtatccgaacttctgaaagcaaagatgccaacactgaaggaaatgaaatgcctgagattccatcaactattccatttatgcctgatgcgtcaccaaagactatgaagcaactctatatgacatcgttctctgtcatatctgggataatcatttttggaggcttgatagccccagtacttgaactgaaactagggctgggtggcacatcttatgaagattttataaggaccttgcacttacctcttcaattgagtcaggtagatcctatagtggcatcattttcaggtggcgcagttggtgttatctcagctttaatgttggtcgaagtgagaaatgtcaggcagcaagagaagaaaagatgcacatattgtcatgggactgggtacttgccatgtgctcgctgttctgctagtgggatgttattgaacacaaagcacttttcattattggggcataatatgtggtcaatgaaaggaaggtgtcagaattgttctggagctggaaaggtgatgtgtccgacgtgcttgtgcacaggaatggcgatggcaagtgagcatgatccacggattgacccttttgattagtttgatatgacaatacgctttttgtctgtttcttggaaaatatgttgccgataacagcaataaactcatgtttgtatgtacgttatgtttgttactgcgtgatcacttgagataagttg

SEQ ID NO: 32628 - protein, 333 aa, Zea mays subsp. mays
  peptide (1)..(333): Ceres Seq. ID no. 12413381
  misc_feature (256)..(309): Pfam Name: 4 repeats Pfam Description: DnaJ central domain
  misc_feature (69)..(333): NCBI GI NO: 22326624 NR Description: putative protein; protein id: At5g06130
  misc_feature (69)..(333): NCBI GI NO: 8978349 NR Description: gene_id:K16F4
  misc_feature (92)..(333): NCBI GI NO: 30681288 NR Description: expressed protein [Arabidopsis thaliana]
  misc_feature (72)..(333): NCBI GI NO: 15240312 NR Description: putative protein; protein id: At5g61670
RTLPRDQAARATRRWSGQPCPASRRRRLHRQRRGNACSAPSLLCARLRRAGACITRCGGLEGEKPGAAGGSWRCCGCSPAGESRASGDGGLSSFCIIEGPETIEDFAQMQSQEIEDNIMSRRNKIFLLMEEVRRLRVQQRIRTSESKDANTEGNEMPEIPSTIPFMPDASPKTMKQLYMTSFSVISGIIIFGGLIAPVLELKLGLGGTSYEDFIRTLHLPLQLSQVDPIVASFSGGAVGVISALMLVEVRNVRQQEKKRCTYCHGTGYLPCARCSASGMLLNTKHFSLLGHNMWSMKGRCQNCSGAGKVMCPTCLCTGMAMASEHDPRIDPFD

SEQ ID NO: 32629 - protein, 225 aa, Zea mays subsp. mays
  peptide (1)..(225): Ceres Seq. ID no. 12413382
  misc_feature (148)..(201): Pfam Name: 4 repeats Pfam Description: DnaJ central domain
  misc_feature (1)..(225): NCBI GI NO: 22326624 NR Description: putative protein; protein id: At5g06130
  misc_feature (1)..(225): NCBI GI NO: 8978349 NR Description: gene_id:K16F4
  misc_feature (1)..(225): NCBI GI NO: 30681288 NR Description: expressed protein [Arabidopsis thaliana]
  misc_feature (1)..(225): NCBI GI NO: 15240312 NR Description: putative protein; protein id: At5g61670
MQSQEIEDNIMSRRNKIFLLMEEVRRLRVQQRIRTSESKDANTEGNEMPEIPSTIPFMPDASPKTMKQLYMTSFSVISGIIIFGGLIAPVLELKLGLGGTSYEDFIRTLHLPLQLSQVDPIVASFSGGAVGVISALMLVEVRNVRQQEKKRCTYCHGTGYLPCARCSASGMLLNTKHFSLLGHNMWSMKGRCQNCSGAGKVMCPTCLCTGMAMASEHDPRIDPFD

SEQ ID NO: 32630 - protein, 215 aa, Zea mays subsp. mays
  peptide (1)..(215): Ceres Seq. ID no. 12413383
  misc_feature (138)..(191): Pfam Name: 4 repeats Pfam Description: DnaJ central domain
  misc_feature (1)..(215): NCBI GI NO: 22326624 NR Description: putative protein; protein id: At5g06130
  misc_feature (1)..(215): NCBI GI NO: 8978349 NR Description: gene_id:K16F4
  misc_feature (1)..(215): NCBI GI NO: 30681288 NR Description: expressed protein [Arabidopsis thaliana]
  misc_feature (1)..(215): NCBI GI NO: 15240312 NR Description: putative protein; protein id: At5g61670
MSRRNKIFLLMEEVRRLRVQQRIRTSESKDANTEGNEMPEIPSTIPFMPDASPKTMKQLYMTSFSVISGIIIFGGLIAPVLELKLGLGGTSYEDFIRTLHLPLQLSQVDPIVASFSGGAVGVISALMLVEVRNVRQQEKKRCTYCHGTGYLPCARCSASGMLLNTKHFSLLGHNMWSMKGRCQNCSGAGKVMCPTCLCTGMAMASEHDPRIDPFD

SEQ ID NO: 32631 - DNA, 1030 bp, Zea mays subsp. mays
  misc_feature (1)..(1030): Ceres Seq. ID no. 12412023
ataaatatagcttggagcaaatctttcagccacccgatccccaaccgcccggcccgacattccctccaaccgccgctgcggctgcgccgcccaccgccgacaggcgcagcagtcaacaggaaccgagccatggcgagcgcggatctgctgcggagggaggaggagttctactcctccctgtttgattccgccaaaggcgatggcgccaggtcgcgctcacagctgatcgagaggaagatcgaggccctggaggacatggccaccagggtcagtaaccggagatcgcggaagtggtttaacgaccgtttgctgattgaactcgtcccgcgtctttacgttgaagagatcaaaggcctattcgctcctccgccgtggggtgagcaagtgcccttgtcagcattctacagggcaaatgttggtgaatgggattccttcaggagcattgacatggatgctgaggcaagattgatgcagcatatgaaaaaatcattggaaaaacccaggaatcatgtcgatgaaggggaatcgattgcgctgaatgcttggcatcgaatagatcgacacactagagaagcaataaagagaaatttccttcctgatctgcttggaatatatgaagaacgcgttagggccttcattgaagacgctagtgacaaagatgctcttgtgctgaatgttcaggacccatttcagagactactgctccacggtgtttgtgagttctacaacgtgagctcgacaaccaccagcagtgtgagagaagatgggaggccttggaaggcaaccaccatcaagaagaggcagggcaccggcgttccctctagaatcacactagttagctttctgagaatgaagaagaatggatcgcagtaacgttagttagcgttcaagaatacaacaaaattgctttagattccgtttaggctgttgcaagacaagtgagtggtcactggcaatgtgttcttatatcgcatcagcctgctggctacggtttggaacttcctgacagaaagtagaaacttccggttct

SEQ ID NO: 32632 - protein, 290 aa, Zea mays subsp. mays
  peptide (1)..(290): Ceres Seq. ID no. 12412024
  misc_feature (44)..(289): NCBI GI NO: 18379075 NR Description: expressed protein; protein id: At1g03250
  misc_feature (44)..(243): NCBI GI NO: 25372999 NR Description: hypothetical protein F15K9.15
INIAWSKSFSHPIPNRPARHSLQPPLRLRRPPPTGAAVNRNRAMASADLLRREEEFYSSLFDSAKGDGARSRSQLIERKIEALEDMATRVSNRRSRKWFNDRLLIELVPRLYVEEIKGLFAPPPWGEQVPLSAFYRANVGEWDSFRSIDMDAEARLMQHMKKSLEKPRNHVDEGESIALNAWHRIDRHTREAIKRNFLPDLLGIYEERVRAFIEDASDKDALVLNVQDPFQRLLLHGVCEFYNVSSTTTSSVREDGRPWKATTIKKRQGTGVPSRITLVSFLRMKKNGSQ

SEQ ID NO: 32633 - protein, 247 aa, Zea mays subsp. mays
  peptide (1)..(247): Ceres Seq. ID no. 12412025
  misc_feature (1)..(246): NCBI GI NO: 18379075 NR Description: expressed protein; protein id: At1g03250
  misc_feature (1)..(200): NCBI GI NO: 25372999 NR Description: hypothetical protein F15K9.15
MASADLLRREEEFYSSLFDSAKGDGARSRSQLIERKIEALEDMATRVSNRRSRKWFNDRLLIELVPRLYVEEIKGLFAPPPWGEQVPLSAFYRANVGEWDSFRSIDMDAEARLMQHMKKSLEKPRNHVDEGESIALNAWHRIDRHTREAIKRNFLPDLLGIYEERVRAFIEDASDKDALVLNVQDPFQRLLLHGVCEFYNVSSTTTSSVREDGRPWKATTIKKRQGTGVPSRITLVSFLRMKKNGSQ

SEQ ID NO: 32634 - protein, 205 aa, Zea mays subsp. mays
  peptide (1)..(205): Ceres Seq. ID no. 12412026
  misc_feature (1)..(204): NCBI GI NO: 18379075 NR Description: expressed protein; protein id: At1g03250
  misc_feature (1)..(158): NCBI GI NO: 25372999 NR Description: hypothetical protein F15K9.15
MATRVSNRRSRKWFNDRLLIELVPRLYVEEIKGLFAPPPWGEQVPLSAFYRANVGEWDSFRSIDMDAEARLMQHMKKSLEKPRNHVDEGESIALNAWHRIDRHTREAIKRNFLPDLLGIYEERVRAFIEDASDKDALVLNVQDPFQRLLLHGVCEFYNVSSTTTSSVREDGRPWKATTIKKRQGTGVPSRITLVSFLRMKKNGSQ

SEQ ID NO: 32635 - DNA, 1316 bp, Zea mays subsp. mays
  misc_feature (1)..(1316): Ceres Seq. ID no. 12412019
ccaagaccaagaccaacaccactccactccctccatttccctcacctcccgcagcagctagccgccagccaacaaccgaaccaaccaaccaacccacaggccacagcgagcgagtaaagcgtccaatggtagcgatggcggccgtgcagcagcagcagcagcagcagcgccgcgacgcggaggcggagctcaacctgcccccgggcttccggttccacccgacggacgaggagctggtggcgcactacctctgcgcgcgcgccgcggggcgccgcccgccggtgtccatcatcgccgaggtcgacctgtaccgcttcgacccctgggacctgccggagcgcgccctcttcgggcgccgcaagtggtacttcttcacgccgcgggaccgcaagtaccccaacggctcccgccccaaccgcgccgccgggtcgggctactggaaggccacgggcgcggacaagcccgtggagcacgagggccggacggcggggatcaagaaggcgctcgtgttctaccacggcaagccgccgcgcggggtcaagacggagtggatcatgcacgagtaccgcctcgccgaagccggcggcgcccgcgccaagaagtccggcgccggcacgctcaggctggatgactgggtgctgtgccgcctgtacaacaagaagaacgagtgggagaagatgcagcagcagaaggagaaggagaagaaggcgatggagtcggaggcgtcgctctcgcactcccactccgacacgcggacgccggaatcggagatcgacgacgaccccgttcccggagctgggctctctaccggcgttcgacgacatgggcgcagcccccagcccctgccggcgtcgtcctgcccaaggaggaggtggaggacttcggcgacctcggcggcgacgactggctcgcgggcatcaacctcgacgacctgcagatgccgggggacgccgccgatttctacggctccatgctcgtctcgccgatggccgccaagatggagccggacggcggcttccccttcttctgagatccttcggcgactccggggacgaccggatgcagcgcaacgcaaactgtgtatagttcagattttcttcatggaaccaacaacaacaaaaaaagttcttgctaatatcttgttctagtggtgtagtgcagaagtagcagcaacatgattgaagttccattgtagtactgatgttcatcgccacttgagctgtgacaagtgacgacattctttcgtttcttggctgcaaattcttcgttgtccagaatataatttcagatgggtaatgccaattcgggacgtgttg

SEQ ID NO: 32636 - protein, 381 aa, Zea mays subsp. mays
  peptide (1)..(381): Ceres Seq. ID no. 12412020
  misc_feature (65)..(191): Pfam Name: NAM Pfam Description: No apical meristem
  misc_feature (55)..(263): NCBI GI NO: 4218535 NR Description: GRAB1 protein [Triticum sp.]
  misc_feature (57)..(263): NCBI GI NO: 34900404 NR Description: OsNAC3 protein
  misc_feature (54)..(303): NCBI GI NO: 40786563 NR Description: putative NAC-domain protein
  misc_feature (56)..(275): NCBI GI NO: 34909234 NR Description: development regulation gene OsNAC4
  misc_feature (61)..(263): NCBI GI NO: 21105748 NR Description: nam-like protein 10 [Petunia x hybrida]
  misc_feature (62)..(323): NCBI GI NO: 21105734 NR Description: nam-like protein 3 [Petunia x hybrida]
  misc_feature (60)..(288): NCBI GI NO: 22326685 NR Description: Expressed protein; protein id: At5g08790
  misc_feature (62)..(233): NCBI GI NO: 40647397 NR Description: NAC domain protein [Lycopersicon esculentum]
  misc_feature (62)..(233): NCBI GI NO: 14485513 NR Description: putative NAC domain protein [Solanum tuberosum]
  misc_feature (50)..(261): NCBI GI NO: 30697896 NR Description: No apical meristem (NAM) protein family
KTKTNTTPLPPFPSPPAAASRQPTTEPTNQPTGHSERVKRPMVAMAAVQQQQQQQRRDAEAELNLPPGFRFHPTDEELVAHYLCARAAGRRPPVSIIAEVDLYRFDPWDLPERALFGRRKWYFFTPRDRKYPNGSRPNRAAGSGYWKATGADKPVEHEGRTAGIKKALVFYHGKPPRGVKTEWIMHEYRLAEAGGARAKKSGAGTLRLDDWVLCRLYNKKNEWEKMQQQKEKEKKAMESEASLSHSHSDTRTPESEIDDDPVPGAGLSTGVRRHGRSPQPLPASSCPRRRWRTSATSAATTGSRASTSTTCRCRGTPPISTAPCSSRRWPPRWSRTAASPSSEILRRLRGRPDAAQRKLCIVQIFFMEPTTTKKVLANILF

SEQ ID NO: 32637 - protein, 340 aa, Zea mays subsp. mays
  peptide (1)..(340): Ceres Seq. ID no. 12412021
  misc_feature (24)..(150): Pfam Name: NAM Pfam Description: No apical meristem
  misc_feature (14)..(222): NCBI GI NO: 4218535 NR Description: GRAB1 protein [Triticum sp.]
  misc_feature (16)..(222): NCBI GI NO: 34900404 NR Description: OsNAC3 protein
  misc_feature (13)..(262): NCBI GI NO: 40786563 NR Description: putative NAC-domain protein
  misc_feature (15)..(234): NCBI GI NO: 34909234 NR Description: development regulation gene OsNAC4
  misc_feature (20)..(222): NCBI GI NO: 21105748 NR Description: nam-like protein 10 [Petunia x hybrida]
  misc_feature (21)..(282): NCBI GI NO: 21105734 NR Description: nam-like protein 3 [Petunia x hybrida]
  misc_feature (19)..(247): NCBI GI NO: 22326685 NR Description: Expressed protein; protein id: At5g08790
  misc_feature (21)..(192): NCBI GI NO: 40647397 NR Description: NAC domain protein [Lycopersicon esculentum]
  misc_feature (21)..(192): NCBI GI NO: 14485513 NR Description: putative NAC domain protein [Solanum tuberosum]
  misc_feature (9)..(220): NCBI GI NO: 30697896 NR Description: No apical meristem (NAM) protein family
MVAMAAVQQQQQQQRRDAEAELNLPPGFRFHPTDEELVAHYLCARAAGRRPPVSIIAEVDLYRFDPWDLPERALFGRRKWYFFTPRDRKYPNGSRPNRAAGSGYWKATGADKPVEHEGRTAGIKKALVFYHGKPPRGVKTEWIMHEYRLAEAGGARAKKSGAGTLRLDDWVLCRLYNKKNEWEKMQQQKEKEKKAMESEASLSHSHSDTRTPESEIDDDPVPGAGLSTGVRRHGRSPQPLPASSCPRRRWRTSATSAATTGSRASTSTTCRCRGTPPISTAPCSSRRWPPRWSRTAASPSSEILRRLRGRPDAAQRKLCIVQIFFMEPTTTKKVLANILF

SEQ ID NO: 32638 - protein, 337 aa, Zea mays subsp. mays
  peptide (1)..(337): Ceres Seq. ID no. 12412022
  misc_feature (21)..(147): Pfam Name: NAM Pfam Description: No apical meristem
  misc_feature (11)..(219): NCBI GI NO: 4218535 NR Description: GRAB1 protein [Triticum sp.]
  misc_feature (13)..(219): NCBI GI NO: 34900404 NR Description: OsNAC3 protein
  misc_feature (10)..(259): NCBI GI NO: 40786563 NR Description: putative NAC-domain protein
  misc_feature (12)..(231): NCBI GI NO: 34909234 NR Description: development regulation gene OsNAC4
  misc_feature (17)..(219): NCBI GI NO: 21105748 NR Description: nam-like protein 10 [Petunia x hybrida]
  misc_feature (18)..(279): NCBI GI NO: 21105734 NR Description: nam-like protein 3 [Petunia x hybrida]
  misc_feature (16)..(244): NCBI GI NO: 22326685 NR Description: Expressed protein; protein id: At5g08790
  misc_feature (18)..(189): NCBI GI NO: 40647397 NR Description: NAC domain protein [Lycopersicon esculentum]
  misc_feature (18)..(189): NCBI GI NO: 14485513 NR Description: putative NAC domain protein [Solanum tuberosum]
  misc_feature (6)..(217): NCBI GI NO: 30697896 NR Description: No apical meristem (NAM) protein family
MAAVQQQQQQQRRDAEAELNLPPGFRFHPTDEELVAHYLCARAAGRRPPVSIIAEVDLYRFDPWDLPERALFGRRKWYFFTPRDRKYPNGSRPNRAAGSGYWKATGADKPVEHEGRTAGIKKALVFYHGKPPRGVKTEWIMHEYRLAEAGGARAKKSGAGTLRLDDWVLCRLYNKKNEWEKMQQQKEKEKKAMESEASLSHSHSDTRTPESEIDDDPVPGAGLSTGVRRHGRSPQPLPASSCPRRRWRTSATSAATTGSRASTSTTCRCRGTPPISTAPCSSRRWPPRWSRTAASPSSEILRRLRGRPDAAQRKLCIVQIFFMEPTTTKKVLANILF

SEQ ID NO: 32639 - DNA, 1516 bp, Zea mays subsp. mays
  misc_feature (1)..(1516): Ceres Seq. ID no. 12340974
aaccagctccggcccaaacacagccacgagcacctacacccccccgctgtcacctctccttccatcgccgcctcccttacccctctcgctgtgctcctccgcaccgtcattccctagcattccccacgggcgagtggcggcttggtcgagatgggcgatgcggttgatgacatcatctgtgcaacggatgcggcggtcgccgtcgaggatgcggccagtgggaagcccgcaatgctctctagcttaggggggcagggtgaggaagagcatgaggagaaggacaatgaggacaagtcaggcgagagcgaggtgatcaacccgccagaagacgctggcggggaggccacctcacccctggaagggttgaagcctcgcctttccaaggggaatcaaagccatggacctaatgctgtcaaatcaaagagcccaacgagtggagacgaaggtcagacgaggaaaaaggctcccaattcttctcttcctaaggcacccattgtccaggtgtcccatggtgacgctggtgtcggcagtaataaagatggcaagaatgagtctcgctcatcttccgtggatgcaacattgctggatgactccaaggagaaaaggaaaactcaaaagccattagcacagctcttttccatcaaaagtgacgaagaacagtcaaatggtgagagtgcaaagcctcgaaaagttggcagcattccatcatatggtttcaccttcaagtgtgatgagagatctgaaaaaagaagagagttctattcgaagcttgaggagaagattcatgcaagagagttagaaataagcaatttgcaagcgaaatcaaaggaaactgaagaagcagaactcaaaatgctgagaaagagtttgaacttcaaggcaacaccaatgccaagcttctataaggaaccaactcctgtcaaggttgaattgaaaaagatccccccaacaagagccaaatcgccaaagtttggtcgttctaaaaacaagtccacaccagagactgaagaaaatgctaccgcggaccagcctgcccacctgagcctcgaggagaatgtttctcaaaccggtgtgaaaaaaccaaccccgttgaatccagcaaagaagccccagaggaagtcactccccagactgccatctgaagaaaccggtccgcttgatgccacctcaaggcaacttataaagagcgccaagctggatgcagttagtgctccggagacaggatcagctacaggacaggcacaactacaaggaagtcagacggaaacagattctggtcaggggccagttgaagctggagctaatcctgatgaacaagacgccagcgaacagagtgttgtttagtgaagatcacgatgaccaaaccagctgatttgtgatgtgcatggtgttcctcggctttgtataatatattgtgcttgcctgctagagtaacctgtagtctgtattatgttatgtgatatatactactactcctggtttattttcctggaattgagccgtatgttgcttatcg

SEQ ID NO: 32640 - protein, 397 aa, Zea mays subsp. mays; identical to SEQ ID NO: 32513
  peptide (1)..(397): Ceres Seq. ID no. 12340975
  misc_feature (1)..(393): NCBI GI NO: 18417986 NR Description: putative protein; protein id: At4g32330
  misc_feature (6)..(395): NCBI GI NO: 15224733 NR Description: unknown protein; protein id: At2g25480.1
  misc_feature (48)..(325): NCBI GI NO: 18403980 NR Description: expressed protein; protein id: At2g35880
  misc_feature (121)..(325): NCBI GI NO: 25408425 NR Description: hypothetical protein At2g35880
  misc_feature (13)..(263): NCBI GI NO: 7485356 NR Description: hypothetical protein F10M6
  misc_feature (13)..(263): NCBI GI NO: 7486636 NR Description: hypothetical protein F8B4
  misc_feature (38)..(326): NCBI GI NO: 34897180 NR Description: unknown protein
  misc_feature (36)..(280): NCBI GI NO: 9294199 NR Description: gb|AAF04893
  misc_feature (36)..(280): NCBI GI NO: 15228950 NR Description: unknown protein; protein id: At3g23090.1
  misc_feature (155)..(280): NCBI GI NO: 32395575 NR Description: seed specific protein Bn15D14A [Brassica napus]

SEQ ID NO: 32641 - protein, 370 aa, Zea mays subsp. mays; identical to SEQ ID NO: 32514
  peptide (1)..(370): Ceres Seq. ID no. 12340976
  misc_feature (1)..(366): NCBI GI NO: 18417986 NR Description: putative protein; protein id: At4g32330
  misc_feature (1)..(368): NCBI GI NO: 15224733 NR Description: unknown protein; protein id: At2g25480.1
  misc_feature (21)..(298): NCBI GI NO: 18403980 NR Description: expressed protein; protein id: At2g35880
  misc_feature (94)..(298): NCBI GI NO: 25408425 NR Description: hypothetical protein At2g35880
  misc_feature (1)..(236): NCBI GI NO: 7485356 NR Description: hypothetical protein F10M6
  misc_feature (1)..(236): NCBI GI NO: 7486636 NR Description: hypothetical protein F8B4
  misc_feature (11)..(299): NCBI GI NO: 34897180 NR Description: unknown protein
  misc_feature (9)..(253): NCBI GI NO: 9294199 NR Description: gb|AAF04893
  misc_feature (9)..(253): NCBI GI NO: 15228950 NR Description: unknown protein; protein id: At3g23090.1
  misc_feature (128)..(253): NCBI GI NO: 32395575 NR Description: seed specific protein Bn15D14A [Brassica napus]

SEQ ID NO: 32642 - DNA, 1309 bp, Zea mays subsp. mays
  misc_feature (1)..(1309): Ceres Seq. ID no. 12412015
aggacgccattagcagcggttggccaccagcccaccacccgacgccggaggcccggaggaggaggcggcgatggcggggaagcacgggcgcaacggcttcgacgacgacaacgtcaaccctttcgcgggaggaagtgttccacctgccaccaattctcgtctctcacctctatcacatgaaccggctgatttctacaatgtggacattcctctcgactcatcaaaggatctgaagaaaaaggagaaagaactccaggctatggaggctgagctaaacaaaagagaacgggaattgaaaaggaaggaagaggcggcatcccgagctggcgttgtgatagaagagaaaaactggcctccctttttccccctcatccaccacgacatttccaatgaaatacctatccatctacaaaggatgcagtaccttgcattctcatcattcttgggattgatagcgtgtctcttttggaatgtcatagcaactacaacagcatggattaaaggggaaggtgttatgatctggctgcttgccattatctacttcatatctggtgcgcctggggcttatgtgttatggtatcgacctctttataatgcaatgagaactgagagcgctttgaagtttgggtggtttttcctattttacatgattcatataatattctgtgtgtgggcagctgtggctcctccattccctttcaaaggaaaatctttggctgggattttaccagcaattgatgtcataagcaagaatgctattgtcgggatattttacttcgttggatttggcttgttctgccttgaatcacttctgagcatcggtgtcattcagcaagtctacatgtatttccgtggaagtggaaaagctgcagagatgaaacgtgaggcagcacgtagtgctctaagttcagccttctgatgaacatagggcggtctgattagagcagtagatggataagggaagggaacgagatgtgccaattaagccacgcggtcttgtacatcactgcagtacgtggatttggatcgctgaaagcgtacagctgatcgtctttttgctcttctgtaaaatatgaacaatcatcatatggtccggatgcgtcagggtgttggtttcatttcttgccatggtttagatgtggttgatagggaaaacggtgaagtatttttttggagcagcgaatataatgtatcttcatcgtacttttacatgtgagtgtaatagcttatttcttgtggtaggaatacagctttgctgtgttttcgggaatgacatttgttgtgtaaggttattcacaatggctatttc

SEQ ID NO: 32643 - protein, 282 aa, Zea mays subsp. mays
  peptide (1)..(282): Ceres Seq. ID no. 12412016
  misc_feature (90)..(264): Pfam Name: Pfam Description:  SCAMP family
  misc_feature (1)..(282): NCBI GI NO: 7109232 NR Description: secretory carrier membrane protein [Oryza sativa]
  misc_feature (22)..(282): NCBI GI NO: 34899754 NR Description: putative secretory carrier membrane protein
  misc_feature (1)..(281): NCBI GI NO: 15219893 NR Description: secretory carrier membrane protein
  misc_feature (1)..(281): NCBI GI NO: 15220305 NR Description: secretory carrier membrane protein, putative
  misc_feature (4)..(281): NCBI GI NO: 15226410 NR Description: putative secretory carrier-associated membraneprotein
  misc_feature (1)..(281): NCBI GI NO: 3941289 NR Description: similarity to SCAMP37 [Pisum sativum]
  misc_feature (4)..(281): NCBI GI NO: 18379111 NR Description: expressed protein; protein id: At1g03550
  misc_feature (1)..(281): NCBI GI NO: 25402653 NR Description: hypothetical protein
  misc_feature (5)..(263): NCBI GI NO: 15222550 NR Description: secretory carrier membrane protein, putative
  misc_feature (5)..(263): NCBI GI NO: 38347080 NR Description: OSJNBa0006A01.21
MAGKHGRNGFDDDNVNPFAGGSVPPATNSRLSPLSHEPADFYNVDIPLDSSKDLKKKEKELQAMEAELNKRERELKRKEEAASRAGVVIEEKNWPPFFPLIHHDISNEIPIHLQRMQYLAFSSFLGLIACLFWNVIATTTAWIKGEGVMIWLLAIIYFISGAPGAYVLWYRPLYNAMRTESALKFGWFFLFYMIHIIFCVWAAVAPPFPFKGKSLAGILPAIDVISKNAIVGIFYFVGFGLFCLESLLSIGVIQQVYMYFRGSGKAAEMKREAARSALSSAF

SEQ ID NO: 32644 - protein, 219 aa, Zea mays subsp. mays
  peptide (1)..(219): Ceres Seq. ID no. 12412017
  misc_feature (27)..(201): Pfam Name: Pfam Description:  SCAMP family
  misc_feature (1)..(219): NCBI GI NO: 7109232 NR Description: secretory carrier membrane protein [Oryza sativa]
  misc_feature (1)..(219): NCBI GI NO: 34899754 NR Description: putative secretory carrier membrane protein
  misc_feature (1)..(218): NCBI GI NO: 15219893 NR Description: secretory carrier membrane protein
  misc_feature (1)..(218): NCBI GI NO: 15220305 NR Description: secretory carrier membrane protein, putative
  misc_feature (1)..(218): NCBI GI NO: 15226410 NR Description: putative secretory carrier-associated membraneprotein
  misc_feature (1)..(218): NCBI GI NO: 3941289 NR Description: similarity to SCAMP37 [Pisum sativum]
  misc_feature (1)..(218): NCBI GI NO: 18379111 NR Description: expressed protein; protein id: At1g03550
  misc_feature (1)..(218): NCBI GI NO: 25402653 NR Description: hypothetical protein
  misc_feature (1)..(200): NCBI GI NO: 15222550 NR Description: secretory carrier membrane protein, putative
  misc_feature (1)..(200): NCBI GI NO: 38347080 NR Description: OSJNBa0006A01.21
MEAELNKRERELKRKEEAASRAGVVIEEKNWPPFFPLIHHDISNEIPIHLQRMQYLAFSSFLGLIACLFWNVIATTTAWIKGEGVMIWLLAIIYFISGAPGAYVLWYRPLYNAMRTESALKFGWFFLFYMIHIIFCVWAAVAPPFPFKGKSLAGILPAIDVISKNAIVGIFYFVGFGLFCLESLLSIGVIQQVYMYFRGSGKAAEMKREAARSALSSAF

SEQ ID NO: 32645 - protein, 167 aa, Zea mays subsp. mays
  peptide (1)..(167): Ceres Seq. ID no. 12412018
  misc_feature (1)..(149): Pfam Name: Pfam Description:  SCAMP family
  misc_feature (1)..(167): NCBI GI NO: 7109232 NR Description: secretory carrier membrane protein [Oryza sativa]
  misc_feature (1)..(167): NCBI GI NO: 34899754 NR Description: putative secretory carrier membrane protein
  misc_feature (1)..(166): NCBI GI NO: 15219893 NR Description: secretory carrier membrane protein
  misc_feature (1)..(166): NCBI GI NO: 15220305 NR Description: secretory carrier membrane protein, putative
  misc_feature (1)..(166): NCBI GI NO: 15226410 NR Description: putative secretory carrier-associated membraneprotein
  misc_feature (1)..(166): NCBI GI NO: 3941289 NR Description: similarity to SCAMP37 [Pisum sativum]
  misc_feature (1)..(166): NCBI GI NO: 18379111 NR Description: expressed protein; protein id: At1g03550
  misc_feature (1)..(166): NCBI GI NO: 25402653 NR Description: hypothetical protein
  misc_feature (1)..(148): NCBI GI NO: 15222550 NR Description: secretory carrier membrane protein, putative
  misc_feature (1)..(148): NCBI GI NO: 38347080 NR Description: OSJNBa0006A01.21
MQYLAFSSFLGLIACLFWNVIATTTAWIKGEGVMIWLLAIIYFISGAPGAYVLWYRPLYNAMRTESALKFGWFFLFYMIHIIFCVWAAVAPPFPFKGKSLAGILPAIDVISKNAIVGIFYFVGFGLFCLESLLSIGVIQQVYMYFRGSGKAAEMKREAARSALSSAF

SEQ ID NO: 32646 - DNA, 1433 bp, Zea mays subsp. mays
  misc_feature (1)..(1433): Ceres Seq. ID no. 12413803
atgcctctcatcttcttctccgccgcagcccccctcgtcgccgtctccctgctgcccctccccacccactgctgcctccgcctcaccgccacccgcgcggccgccacgagcacaaccgccaccccgggtcccgctcccgcgagcaccttcgccgtcgaggactacctcatcgccagctgccacctcaccccaccgcaggcgctcaaggcgtccaagagcctggcgcacctcaagtccgcatccaacgcggacgcggtgctcgccttccttgcggacctcgggctctccccaaaggaggtggccgccgttgtggcgtccaatccgcgtgtcctctgcgctcgcatcgaccgttccctggctcctatctccacggagctccgcgcgctcggcctctccccgtcccagatcgcgcgcctcgcgcagatcgccggccgctacttcctctgccgcagcttcgtctccaaggtacggttctggctcccgctcttcggctcccccgagcggctcctccaggccagcgactggaactactggctcctcagctccgacctcgagaaggtggtggagcccaacgtggccttcctcaggaagtgcggcctcagcgcagtcgacatcgccaagctgctcgtggccgcgccgcggctcgtcaccatgcctccggagtatgtccaggacgcggtgcggcgtgccacgcagctcggcgtggcgccgggctcccagatgtttcgccacgcgctctccaccgcgggatgtatcgggcaggagaaggtcgactccaaggtcgccgtcctcaaggagacgctcgggtggtcgcaggaggaggtgagcctggccatcagtaaggcgccgcggatcctggttgcgtccgaggagaggctgcgccggaacgcggagttcctgctcaatgaggtcgggctgccgccgcagtacatcgcccgccgttcggtgcttctcatgtacagcctggagaggcggatagtgccccggcacctcgtgctggtggttctcaaagagaaggggttggttgagcaggaccggtgcttcttcaacgtggtggcaccaacagaagagaaattcttggagaaattcgttgctccctacgaggaatccatccctggtcttgccgatgcttacgagtctgcttgtatggggaaagtgacccggggtctatgactggaatgtcgaggagaatttcgaaggtgtgtgttccctccattgtgcatttgtgtaacctcattctactgatctcgcttcaacagaaaaattattccactgatgaactatcgaagacaaaggcagtttcgtggacattagcttaggtccacactagtaacagcataaattcatgttatagccatgaaaatgttcatttctaacttaaggatcgtttcatatgaaagtgcaagcaataaaattttttcccatgagatttt

SEQ ID NO: 32647 - protein, 390 aa, Zea mays subsp. mays
  peptide (1)..(390): Ceres Seq. ID no. 12413804
  misc_feature (87)..(361): Pfam Name: Pfam Description:  mTERF
  misc_feature (54)..(378): NCBI GI NO: 18415647 NR Description: expressed protein; protein id: At5g07900
  misc_feature (1)..(364): NCBI GI NO: 39545750 NR Description: OSJNBb0034I13.16
  misc_feature (19)..(386): NCBI GI NO: 34394750 NR Description: unknown protein
  misc_feature (37)..(383): NCBI GI NO: 15238313 NR Description: putative protein; protein id: At5g64950
  misc_feature (37)..(383): NCBI GI NO: 21553423 NR Description: unknown [Arabidopsis thaliana]
  misc_feature (49)..(380): NCBI GI NO: 15218140 NR Description: hypothetical protein; protein id: At1g21150.1
  misc_feature (49)..(380): NCBI GI NO: 25511650 NR Description: T22I11.2 protein - Arabidopsis thaliana
  misc_feature (87)..(381): NCBI GI NO: 18412304 NR Description: expressed protein; protein id: At1g79220
  misc_feature (28)..(301): NCBI GI NO: 15220664 NR Description: hypothetical protein; protein id: At1g61980.1
  misc_feature (268)..(369): NCBI GI NO: 15220664 NR Description: hypothetical protein; protein id: At1g61980.1
MPLIFFSAAAPLVAVSLLPLPTHCCLRLTATRAAATSTTATPGPAPASTFAVEDYLIASCHLTPPQALKASKSLAHLKSASNADAVLAFLADLGLSPKEVAAVVASNPRVLCARIDRSLAPISTELRALGLSPSQIARLAQIAGRYFLCRSFVSKVRFWLPLFGSPERLLQASDWNYWLLSSDLEKVVEPNVAFLRKCGLSAVDIAKLLVAAPRLVTMPPEYVQDAVRRATQLGVAPGSQMFRHALSTAGCIGQEKVDSKVAVLKETLGWSQEEVSLAISKAPRILVASEERLRRNAEFLLNEVGLPPQYIARRSVLLMYSLERRIVPRHLVLVVLKEKGLVEQDRCFFNVVAPTEEKFLEKFVAPYEESIPGLADAYESACMGKVTRGL

SEQ ID NO: 32648 - protein, 279 aa, Zea mays subsp. mays
  peptide (1)..(279): Ceres Seq. ID no. 12413805
ASHLLLRRSPPRRRLPAAPPHPLLPPPHRHPRGRHEHNRHPGSRSREHLRRRGLPHRQLPPHPTAGAQGVQEPGAPQVRIQRGRGARLPCGPRALPKGGGRRCGVQSACPLRSHRPFPGSYLHGAPRARPLPVPDRAPRADRRPLLPLPQLRLQGTVLAPALRLPRAAPPGQRLELLAPQLRPREGGGAQRGLPQEVRPQRSRHRQAARGRAAARHHASGVCPGRGAACHAARRGAGLPDVSPRALHRGMYRAGEGRLQGRRPQGDARVVAGGGEPGHQ

SEQ ID NO: 32649 - protein, 274 aa, Zea mays subsp. mays
  peptide (1)..(274): Ceres Seq. ID no. 12413806
  misc_feature (8)..(194): Pfam Name: Pfam Description:  Extensin-like region
  misc_feature (3)..(274): NCBI GI NO: 13592175 NR Description: ppg3 [Leishmania major]
  misc_feature (3)..(266): NCBI GI NO: 23017082 NR Description: hypothetical protein [Thermobifida fusca]
  misc_feature (3)..(264): NCBI GI NO: 13592175 NR Description: ppg3 [Leishmania major]
  misc_feature (3)..(274): NCBI GI NO: 13592175 NR Description: ppg3 [Leishmania major]
  misc_feature (3)..(268): NCBI GI NO: 13592175 NR Description: ppg3 [Leishmania major]
  misc_feature (1)..(274): NCBI GI NO: 3044086 NR Description: unknown [Myxococcus xanthus]
  misc_feature (3)..(264): NCBI GI NO: 5420387 NR Description: proteophosphoglycan [Leishmania major]
  misc_feature (3)..(264): NCBI GI NO: 5420387 NR Description: proteophosphoglycan [Leishmania major]
  misc_feature (3)..(264): NCBI GI NO: 13592175 NR Description: ppg3 [Leishmania major]
  misc_feature (4)..(244): NCBI GI NO: 11359723 NR Description: proteophosphoglycan, membrane-associated
CLSSSSPPQPPSSPSPCCPSPPTAASASPPPARPPRAQPPPRVPLPRAPSPSRTTSSPAATSPHRRRSRRPRAWRTSSPHPTRTRCSPSLRTSGSPQRRWPPLWRPIRVSSALASTVPWLLSPRSSARSASPRPRSRASRRSPAATSSAAASSPRYGSGSRSSAPPSGSSRPATGTTGSSAPTSRRWWSPTWPSSGSAASAQSTSPSCSWPRRGSSPCLRSMSRTRCGVPRSSAWRRAPRCFATRSPPRDVSGRRRSTPRSPSSRRRSGGRRRR

SEQ ID NO: 32650 - DNA, 1360 bp, Zea mays subsp. mays
  misc_feature (1)..(1360): Ceres Seq. ID no. 12412012
atcagggccggacactacactaccatttttcctttcgcagcgtcccgtctgtctgtctgtctgcctccctccgctcacctcctctgcttcttctcgctttcttccatcttggtccagcctccactcttcctgctgagccatggcggctgccgaagaagggccagagccactcaggtatcagactctggccctgagggtgagcatccactgcgagggttgcaagaagaaggtgaagaaggtgctccacagcatagaaggggtgtacaagacggacatagacacgcagcagcagaaggtggtggtcataggcaacgtctctgcagacgcgctcgtcaagaagctcctcaagtccgggaagcacgcggagccgtggccggagcctgctccagccccaccggccgccgacagcccgcccgggcccgacggatctcccggcagcgcaggcaagaagaagaaaaagaagaagggcaacaagagccccgaggcggcgaacaacaagcccgccgatccggcgccagcgcccgcgcccgcgccggcggagggcaacggcggacccaaccccccggagcagcacgacaaggctgacggcggcgcctcgtgcgatgaggcatcggatggtgagcaggataagcctgaggctggcggtggcggcggcaacggctcccctgacgccggagaagccaacgagggcggcaaggtggccccttccgccatgacgccgcacggcccgcagcccatcgcggctgccaccaacagcaatggtggtggtggtggtggcggcggcggcggcaagaagaaaggcaagaaaggtggccacggcaatgccaacagagacggcgccgggccaatcgtcgaggtccagcccccgccggacgcacccacgaagccggccgccggcaactccggccctctcactgtcatcgacgcgggaccgtacccaccaccggcagcggcggcgatgagctacccagggtactacgccgccggggtccacccgccggcgtacgtcatgagctacagcacggcgcacccgagctctgcgctccggagcagcgcgtactaccacccgatggccggtgcgccgtacacaccagggagcggcggcgggtacttctactcgacggcgccggcgccggcgccggcggcgcccggatcgtactacatgttcagcgaggagaacgccaacgcatgcagcgtcatgtgagaagattagacggttaataatcaactcaactcaattattaactgcaagaagatgttgcagagagtggatgtgctagtcattatgctcttgttgtgcccaagaactggttgtcattgcaacgttattttgctgtatctgcaaaatacatggattttg

SEQ ID NO: 32651 - protein, 354 aa, Zea mays subsp. mays
  peptide (1)..(354): Ceres Seq. ID no. 12412013
  misc_feature (17)..(77): Pfam Name: Pfam Description:  Heavy-metal-associated domain
  misc_feature (1)..(354): NCBI GI NO: 12083536 NR Description: hypothetical protein [Oryza sativa]
  misc_feature (8)..(354): NCBI GI NO: 27754505 NR Description: putative copper chaperone (CCH) protein
  misc_feature (8)..(354): NCBI GI NO: 18405728 NR Description: copper chaperone
  misc_feature (8)..(354): NCBI GI NO: 21536659 NR Description: unknown [Arabidopsis thaliana]
  misc_feature (93)..(354): NCBI GI NO: 15239643 NR Description: putative protein; protein id: At5g19090.1
  misc_feature (9)..(81): NCBI GI NO: 15239643 NR Description: putative protein; protein id: At5g19090.1
  misc_feature (5)..(79): NCBI GI NO: 15241025 NR Description: putative protein; protein id: At5g27690.1
  misc_feature (109)..(267): NCBI GI NO: 15239643 NR Description: putative protein; protein id: At5g19090.1
  misc_feature (1)..(300): NCBI GI NO: 33146848 NR Description: copper chaperone
  misc_feature (11)..(346): NCBI GI NO: 15219992 NR Description: expressed protein; protein id: At1g23000.1
MAAAEEGPEPLRYQTLALRVSIHCEGCKKKVKKVLHSIEGVYKTDIDTQQQKVVVIGNVSADALVKKLLKSGKHAEPWPEPAPAPPAADSPPGPDGSPGSAGKKKKKKKGNKSPEAANNKPADPAPAPAPAPAEGNGGPNPPEQHDKADGGASCDEASDGEQDKPEAGGGGGNGSPDAGEANEGGKVAPSAMTPHGPQPIAAATNSNGGGGGGGGGGKKKGKKGGHGNANRDGAGPIVEVQPPPDAPTKPAAGNSGPLTVIDAGPYPPPAAAAMSYPGYYAAGVHPPAYVMSYSTAHPSSALRSSAYYHPMAGAPYTPGSGGGYFYSTAPAPAPAAPGSYYMFSEENANACSVM

SEQ ID NO: 32652 - protein, 194 aa, Zea mays subsp. mays
  peptide (1)..(194): Ceres Seq. ID no. 12412014
IRAGHYTTIFPFAASRLSVCLPPSAHLLCFFSLSSILVQPPLFLLSHGGCRRRARATQVSDSGPEGEHPLRGLQEEGEEGAPQHRRGVQDGHRHAAAEGGGHRQRLCRRARQEAPQVREARGAVAGACSSPTGRRQPARARRISRQRRQEEEKEEGQQEPRGGEQQARRSGASARARAGGGQRRTQPPGAARQG

SEQ ID NO: 32653 - DNA, 1546 bp, Zea mays subsp. mays
  misc_feature (1)..(1546): Ceres Seq. ID no. 12412008
atactgcatcataccgcaccggcagtggcggagaaaagagatgagccagccggggccgggagccatcgccgcctcatgcctcccgactccgtgacggcccgcagccacaggccaccggataacgcacacagcggaaccatccaaaaacgcgggagctttcccccgtcaaagcccccaccctaatcccccgtctcgcgcgccaatcaaccagcaccgggagcaggagcaagagcaactcaccctcccctccggcttccgcggaactaggagctgccatgcagcccgacgccaacgctccctcgcaccgcctcgcccgcgtcgccgcgcacctaaacccccagcggccgcagatggaggaaggcgcgtccgcactgaggctcgtggtgtgccgcgccaagggcggcgcgccggggttcaaggtcgcgatcctgggcgccgcgggcgggatcggacagccgctgtcactgctcatgaagatgaatcctctcgtgtccgtgctgcacctctacgatgtcgtcaacacgccccggggtcacggccgatgtcagccacatggacaccagcgctgtggtccgcggcttccttggggcacagcagcttgatgccgcacttacaggaatggaccttgtaatcatacccgctggactccctaggaaaccaggaatgacaagagatgatttattcaacaaaaatgctgggattgttcgtacactatgtgaaggcgttgcaagatgctgtcctaatgcaattgtgaatctgatcagcaacccagtgaactcaactgtccccattgctgctgaggttttcaagaaagctggaacttatgatcccaagcggcttcttggagtgacaacactcgatgttgcgagggctaacacctttgtggccgaagtgcttggagttgatccaagagatgtcagtgttcctgttgttggagggcatgctgggataactatattgcccctcctctcccaggttacacctccgagctcattcactcaggatgaaaccagatatttgacagaccgcatacagaatggtggcacagaagttgtggaggcaaaggctggatcaggctccgcgactctgtcaatggcttttgctgcttctaaattcgctgacgcatgcttgcaagctatgcggggcgaagctggaatcgtggaatgctcatatgttgcatccgaggtgacagaactgccgttctttgcaacgaaagtgaggcttggccgtggtggagccgaggagatcctcccgcttggccctttgaatgatttcgagagagctggtctggaagcggcaaagaaggaactgggcgagagcattcagaagggcatcgctttcatgagcaagtgaagtggtacggagggagatcgtccctgagtcagatccggaccatacgtagtaacgtagatgtagggtgttgtgatatagtgctcctacctatacttgtaaggccacggtaaaaagaaggctaattaccctttagcaactgtgaccatctacttggcataatggcatggaataaatctttcgtcttcggtggcgg

SEQ ID NO: 32654 - protein, 280 aa, Zea mays subsp. mays
  peptide (1)..(280): Ceres Seq. ID no. 12412009
  misc_feature (114)..(278): Pfam Name: Pfam Description:  lactate/malate dehydrogenase
  misc_feature (6)..(280): NCBI GI NO: 34915204 NR Description: putative  glyoxysomal malate dehydrogenase
  misc_feature (6)..(280): NCBI GI NO: 3183079 NR Description: MALATE DEHYDROGENASE, GLYOXYSOMAL PRECURSOR
  misc_feature (6)..(278): NCBI GI NO: 126894 NR Description: MALATE DEHYDROGENASE, GLYOXYSOMAL PRECURSOR
  misc_feature (6)..(278): NCBI GI NO: 1170897 NR Description: MALATE DEHYDROGENASE, GLYOXYSOMAL PRECURSOR
  misc_feature (6)..(280): NCBI GI NO: 7431179 NR Description: malate dehydrogenase (EC 1
  misc_feature (6)..(280): NCBI GI NO: 12644436 NR Description: Malate dehydrogenase 1, glyoxysomal precursor
  misc_feature (6)..(280): NCBI GI NO: 15242466 NR Description: microbody NAD-dependent malate dehydrogenase
  misc_feature (6)..(280): NCBI GI NO: 16323157 NR Description: AT5g09660/F17I14_150 [Arabidopsis thaliana]
  misc_feature (6)..(280): NCBI GI NO: 11133654 NR Description: Malate dehydrogenase 2, glyoxysomal precursor
  misc_feature (6)..(280): NCBI GI NO: 1346501 NR Description: MALATE DEHYDROGENASE, GLYOXYSOMAL PRECURSOR
MSSTRPGVTADVSHMDTSAVVRGFLGAQQLDAALTGMDLVIIPAGLPRKPGMTRDDLFNKNAGIVRTLCEGVARCCPNAIVNLISNPVNSTVPIAAEVFKKAGTYDPKRLLGVTTLDVARANTFVAEVLGVDPRDVSVPVVGGHAGITILPLLSQVTPPSSFTQDETRYLTDRIQNGGTEVVEAKAGSGSATLSMAFAASKFADACLQAMRGEAGIVECSYVASEVTELPFFATKVRLGRGGAEEILPLGPLNDFERAGLEAAKKELGESIQKGIAFMSK

SEQ ID NO: 32655 - protein, 266 aa, Zea mays subsp. mays
  peptide (1)..(266): Ceres Seq. ID no. 12412010
  misc_feature (100)..(264): Pfam Name: Pfam Description:  lactate/malate dehydrogenase
  misc_feature (1)..(266): NCBI GI NO: 34915204 NR Description: putative  glyoxysomal malate dehydrogenase
  misc_feature (1)..(266): NCBI GI NO: 3183079 NR Description: MALATE DEHYDROGENASE, GLYOXYSOMAL PRECURSOR
  misc_feature (1)..(264): NCBI GI NO: 126894 NR Description: MALATE DEHYDROGENASE, GLYOXYSOMAL PRECURSOR
  misc_feature (1)..(264): NCBI GI NO: 1170897 NR Description: MALATE DEHYDROGENASE, GLYOXYSOMAL PRECURSOR
  misc_feature (1)..(266): NCBI GI NO: 7431179 NR Description: malate dehydrogenase (EC 1
  misc_feature (1)..(266): NCBI GI NO: 12644436 NR Description: Malate dehydrogenase 1, glyoxysomal precursor
  misc_feature (1)..(266): NCBI GI NO: 15242466 NR Description: microbody NAD-dependent malate dehydrogenase
  misc_feature (1)..(266): NCBI GI NO: 16323157 NR Description: AT5g09660/F17I14_150 [Arabidopsis thaliana]
  misc_feature (1)..(266): NCBI GI NO: 11133654 NR Description: Malate dehydrogenase 2, glyoxysomal precursor
  misc_feature (1)..(266): NCBI GI NO: 1346501 NR Description: MALATE DEHYDROGENASE, GLYOXYSOMAL PRECURSOR
MDTSAVVRGFLGAQQLDAALTGMDLVIIPAGLPRKPGMTRDDLFNKNAGIVRTLCEGVARCCPNAIVNLISNPVNSTVPIAAEVFKKAGTYDPKRLLGVTTLDVARANTFVAEVLGVDPRDVSVPVVGGHAGITILPLLSQVTPPSSFTQDETRYLTDRIQNGGTEVVEAKAGSGSATLSMAFAASKFADACLQAMRGEAGIVECSYVASEVTELPFFATKVRLGRGGAEEILPLGPLNDFERAGLEAAKKELGESIQKGIAFMSK

SEQ ID NO: 32656 - protein, 244 aa, Zea mays subsp. mays
  peptide (1)..(244): Ceres Seq. ID no. 12412011
  misc_feature (78)..(242): Pfam Name: Pfam Description:  lactate/malate dehydrogenase
  misc_feature (1)..(244): NCBI GI NO: 34915204 NR Description: putative  glyoxysomal malate dehydrogenase
  misc_feature (1)..(244): NCBI GI NO: 3183079 NR Description: MALATE DEHYDROGENASE, GLYOXYSOMAL PRECURSOR
  misc_feature (1)..(242): NCBI GI NO: 126894 NR Description: MALATE DEHYDROGENASE, GLYOXYSOMAL PRECURSOR
  misc_feature (1)..(242): NCBI GI NO: 1170897 NR Description: MALATE DEHYDROGENASE, GLYOXYSOMAL PRECURSOR
  misc_feature (1)..(244): NCBI GI NO: 7431179 NR Description: malate dehydrogenase (EC 1
  misc_feature (1)..(244): NCBI GI NO: 12644436 NR Description: Malate dehydrogenase 1, glyoxysomal precursor
  misc_feature (1)..(244): NCBI GI NO: 15242466 NR Description: microbody NAD-dependent malate dehydrogenase
  misc_feature (1)..(244): NCBI GI NO: 16323157 NR Description: AT5g09660/F17I14_150 [Arabidopsis thaliana]
  misc_feature (1)..(244): NCBI GI NO: 11133654 NR Description: Malate dehydrogenase 2, glyoxysomal precursor
  misc_feature (1)..(244): NCBI GI NO: 1346501 NR Description: MALATE DEHYDROGENASE, GLYOXYSOMAL PRECURSOR
MDLVIIPAGLPRKPGMTRDDLFNKNAGIVRTLCEGVARCCPNAIVNLISNPVNSTVPIAAEVFKKAGTYDPKRLLGVTTLDVARANTFVAEVLGVDPRDVSVPVVGGHAGITILPLLSQVTPPSSFTQDETRYLTDRIQNGGTEVVEAKAGSGSATLSMAFAASKFADACLQAMRGEAGIVECSYVASEVTELPFFATKVRLGRGGAEEILPLGPLNDFERAGLEAAKKELGESIQKGIAFMSK

SEQ ID NO: 32657 - DNA, 1709 bp, Zea mays subsp. mays
  misc_feature (1)..(1709): Ceres Seq. ID no. 12360736
gcacgagaccattacctagaacatcctaatcgaaaaaacccccagcagccgcgtgacacggtcactcgcgccacccgttctgcacctcggcccttctcatggcgacgcccgcctccgcgccggccacaccaaaccctaaccccgtctccggcgacccgccgtcgctgctgctacagcagcagcaggaggaagaggtgccagcgccggtcccggagacggcgccgacgcccctcaccacctcgatcgaccccaccccctccggcggcgaggagggcgaaagcgatgactcctcgtccgtctggtcggcgccctcctccgcgcccacccccgtcctcgcccccgcccccgcccccgcggcgccctcccccgcggccaaggacatcctccacatctccttcaaccaggactacggctgcttcgcagcgggcaccaagtcgggcttccgcatctacaactgcgaccccttccgagagatcttccgccgggacctcgccgccgagggcggagtcggcgccgggggagggggtatcggcgtcgtcgagatgctgttccgctgcaacatactcgcgctcgtcggcggcggagataacccccactacccgcccaacaaggtcatgatctgggacgatcaccagagccgctgcatcggggagctctccttccgctcccccgtccggggcgttcgtctccggcgcgagcgcatcatcgtggtgctcgagaacaaaatcttcgtctacaacttcgcggaccttaagctgttgcaccagatcgacactttgagcaaccccaagggcctctgcgccgtgtcacagcagcccgggtccattgtgcttgtttgccctggtgcccagaaggggcaggttagggtggaacactataagacaaggaagaccaagtttatcaatgcacacacttcccgcgtcgcgtgctttgcgttgtcgcaggatgggaggctcattgcgactgctagcaccaaggggactcttgttagaatctacaatgcagctgaaggcaatctcttgcaggaagtaaggagaggtgctgatagagcagaaatatatagcttggctttctcgaatgatttgcagtatttggctgtctccagtgataaaggaacaatacatgtcttcaacttaaagataaatgtgggatcaactgcaaatgacaagcctatgccttctccggatcctgaagttcctcacataaggccctctctttcattcattaagggtgtgctgccaaaatattttcactctgaatggtcagtagcccaattcaggctgcaggagggtgaacactatattgttgcatttggacatgagaagaatactgtggcagtcgttggcatggatggaagcttctacagatgccggtttgatccagtcaacggaggagaaatgctgcagctggattgctacagtttcctgaaaccgtcggatcaaccgtagtcactagtccgtagcaacgcaacatactgtcagcatcaccctcaatctattcatgcccactaccgcggtaccaggattgtacattatctttgtgtgccttcgttgactcgtgggtttagcaaaaataataatagtttatttgtaaatatatatttcttgttggctctgctgtttgttctgcggaagggctaaatcacccgtctgcagacgaacgtagtagaatgcatcgttatttatttcatgaataaaataaagtagccg

SEQ ID NO: 32658 - protein, 449 aa, Zea mays subsp. mays
  peptide (1)..(449): Ceres Seq. ID no. 12360737
  misc_feature (263)..(300): Pfam Name: Pfam Description:  WD domain, G-beta repeat
  misc_feature (1)..(449): NCBI GI NO: 34907164 NR Description: P0423A12.19
  misc_feature (34)..(445): NCBI GI NO: 14517420 NR Description: AT3g62770/F26K9_200 [Arabidopsis thaliana]
  misc_feature (34)..(445): NCBI GI NO: 11288364 NR Description: hypothetical protein F26K9
  misc_feature (52)..(374): NCBI GI NO: 34896164 NR Description: hypothetical protein~similar to Arabidopsisthaliana chromosome 2
  misc_feature (369)..(449): NCBI GI NO: 34896164 NR Description: hypothetical protein~similar to Arabidopsisthaliana chromosome 2
  misc_feature (94)..(449): NCBI GI NO: 30694449 NR Description: WD-40 repeat protein family [Arabidopsis thaliana]
  misc_feature (69)..(449): NCBI GI NO: 30688413 NR Description: WD-40 repeat protein family [Arabidopsis thaliana]
  misc_feature (94)..(449): NCBI GI NO: 7487233 NR Description: hypothetical protein At2g40810
  misc_feature (34)..(313): NCBI GI NO: 18412493 NR Description: putative protein; protein id: At3g62770
  misc_feature (87)..(438): NCBI GI NO: 15238452 NR Description: putative protein; protein id: At5g05150.1
MATPASAPATPNPNPVSGDPPSLLLQQQQEEEVPAPVPETAPTPLTTSIDPTPSGGEEGESDDSSSVWSAPSSAPTPVLAPAPAPAAPSPAAKDILHISFNQDYGCFAAGTKSGFRIYNCDPFREIFRRDLAAEGGVGAGGGGIGVVEMLFRCNILALVGGGDNPHYPPNKVMIWDDHQSRCIGELSFRSPVRGVRLRRERIIVVLENKIFVYNFADLKLLHQIDTLSNPKGLCAVSQQPGSIVLVCPGAQKGQVRVEHYKTRKTKFINAHTSRVACFALSQDGRLIATASTKGTLVRIYNAAEGNLLQEVRRGADRAEIYSLAFSNDLQYLAVSSDKGTIHVFNLKINVGSTANDKPMPSPDPEVPHIRPSLSFIKGVLPKYFHSEWSVAQFRLQEGEHYIVAFGHEKNTVAVVGMDGSFYRCRFDPVNGGEMLQLDCYSFLKPSDQP

SEQ ID NO: 32659 - protein, 301 aa, Zea mays subsp. mays
  peptide (1)..(301): Ceres Seq. ID no. 12360738
  misc_feature (115)..(152): Pfam Name: Pfam Description:  WD domain, G-beta repeat
  misc_feature (1)..(301): NCBI GI NO: 34907164 NR Description: P0423A12.19
  misc_feature (1)..(297): NCBI GI NO: 14517420 NR Description: AT3g62770/F26K9_200 [Arabidopsis thaliana]
  misc_feature (1)..(297): NCBI GI NO: 11288364 NR Description: hypothetical protein F26K9
  misc_feature (1)..(226): NCBI GI NO: 34896164 NR Description: hypothetical protein~similar to Arabidopsisthaliana chromosome 2
  misc_feature (221)..(301): NCBI GI NO: 34896164 NR Description: hypothetical protein~similar to Arabidopsisthaliana chromosome 2
  misc_feature (1)..(301): NCBI GI NO: 30694449 NR Description: WD-40 repeat protein family [Arabidopsis thaliana]
  misc_feature (1)..(301): NCBI GI NO: 30688413 NR Description: WD-40 repeat protein family [Arabidopsis thaliana]
  misc_feature (1)..(301): NCBI GI NO: 7487233 NR Description: hypothetical protein At2g40810
  misc_feature (1)..(165): NCBI GI NO: 18412493 NR Description: putative protein; protein id: At3g62770
  misc_feature (1)..(290): NCBI GI NO: 15238452 NR Description: putative protein; protein id: At5g05150.1
MLFRCNILALVGGGDNPHYPPNKVMIWDDHQSRCIGELSFRSPVRGVRLRRERIIVVLENKIFVYNFADLKLLHQIDTLSNPKGLCAVSQQPGSIVLVCPGAQKGQVRVEHYKTRKTKFINAHTSRVACFALSQDGRLIATASTKGTLVRIYNAAEGNLLQEVRRGADRAEIYSLAFSNDLQYLAVSSDKGTIHVFNLKINVGSTANDKPMPSPDPEVPHIRPSLSFIKGVLPKYFHSEWSVAQFRLQEGEHYIVAFGHEKNTVAVVGMDGSFYRCRFDPVNGGEMLQLDCYSFLKPSDQP

SEQ ID NO: 32660 - protein, 277 aa, Zea mays subsp. mays
  peptide (1)..(277): Ceres Seq. ID no. 12360739
  misc_feature (91)..(128): Pfam Name: Pfam Description:  WD domain, G-beta repeat
  misc_feature (1)..(277): NCBI GI NO: 34907164 NR Description: P0423A12.19
  misc_feature (1)..(273): NCBI GI NO: 14517420 NR Description: AT3g62770/F26K9_200 [Arabidopsis thaliana]
  misc_feature (1)..(273): NCBI GI NO: 11288364 NR Description: hypothetical protein F26K9
  misc_feature (1)..(202): NCBI GI NO: 34896164 NR Description: hypothetical protein~similar to Arabidopsisthaliana chromosome 2
  misc_feature (197)..(277): NCBI GI NO: 34896164 NR Description: hypothetical protein~similar to Arabidopsisthaliana chromosome 2
  misc_feature (1)..(277): NCBI GI NO: 30694449 NR Description: WD-40 repeat protein family [Arabidopsis thaliana]
  misc_feature (1)..(277): NCBI GI NO: 30688413 NR Description: WD-40 repeat protein family [Arabidopsis thaliana]
  misc_feature (1)..(277): NCBI GI NO: 7487233 NR Description: hypothetical protein At2g40810
  misc_feature (1)..(141): NCBI GI NO: 18412493 NR Description: putative protein; protein id: At3g62770
  misc_feature (1)..(266): NCBI GI NO: 15238452 NR Description: putative protein; protein id: At5g05150.1
MIWDDHQSRCIGELSFRSPVRGVRLRRERIIVVLENKIFVYNFADLKLLHQIDTLSNPKGLCAVSQQPGSIVLVCPGAQKGQVRVEHYKTRKTKFINAHTSRVACFALSQDGRLIATASTKGTLVRIYNAAEGNLLQEVRRGADRAEIYSLAFSNDLQYLAVSSDKGTIHVFNLKINVGSTANDKPMPSPDPEVPHIRPSLSFIKGVLPKYFHSEWSVAQFRLQEGEHYIVAFGHEKNTVAVVGMDGSFYRCRFDPVNGGEMLQLDCYSFLKPSDQP

SEQ ID NO: 32661 - DNA, 1594 bp, Zea mays subsp. mays
  misc_feature (1)..(1594): Ceres Seq. ID no. 12408178
attttttccgcgccgccggttcgtgccaaaaccctactccctagaaaatgcagcggcgcctaagctgaaatcagtgaatcgtgcgccgcggcgaagagagaactcgaactcggcaggacttgtgcgggaggaggaggggagcgggggtcagagagggagatagagatcatcaggtttgccatgtcctccagggctggcggcggcaagccgttgtggtctgcctccaccatcgtcgccaaagtcgcgagtgggtaccacatcctcaggatcgatggctactccaggaccatggagacccccacaggagagtccatcgcgtccctcccgttctcggtgggcggccgttgctggcgcattcgctactaccccaacggcgacaagttggagaataaagaatacatctcgctttatctttatctccacgacagaagcgtcgaggcagagaaggcgcagttaatgttccgtttcgtcggtgacgtagcggagcagccgttgattctgggaagactgcataccttcgaaaagcaaggttgggggtacgccaagttcatcaaaaggaaagatttggaagagtcgaagcatctcgtggacgattctttttccatcaggtgcgatgtggccgtgcgcttcaacgatgtccgcgtggagaaggcgccggaagccgctgctgcagcatctatgatttccgtgcaaccatctgacctgcaccagcacctcggcagtctcctgctgacccagaagggcgccgatgtggtgttcgacgtcgccggtgagacgttcgccgcgcaccggtgcgtgctcgcagcccgctctcctgtcttcactgcagagctctttggtgcgatgaaagagggccacaccggaggcgtggtgcgcatagaggacatggaacctcgggcgttcaaggcattgctctacttcctttacaccgatttactattcccaaagacaatggcaacgacgatgaatcaagctgaagacggagacgtaggcgacgacgatgaagacgttctgtgtcagcacctactggtcgctgcagacaaatacaacttggagaggctgaaatcgctatgtgaaaagaagctgtctgagtgcatccatgtgggcacggtagcaatcatcctgacgctagctgagcaacaccgctgccctggactgaagaaggtgtgcctccattttctcagatctcctgcaaatttgagggcagtcgcctccagcgacgcctttaagcatctgagcagcagctgcccctctgttatggtggagttggttgccatgcttggcaactcagcgtagaccttcatctaagcaggaaactgcacttggtgtttttttctggatcgacttgtattatcaagcggtcttggaaaaaatgctactagttcatagtgtccacttccagtagctatgcatcctaagtttcaagtagattctgaagtagttgaatccgttggcgcttttggtacaccatttcgcagcggatgattttggtatctggtagctagctttgaatgtctgccagaagtccgtctatgatgtccttaacatacaattctcagacgttggaaacttggaatgcaatgcagttcttgtt

SEQ ID NO: 32662 - protein, 371 aa, Zea mays subsp. mays
  peptide (1)..(371): Ceres Seq. ID no. 12408179
  misc_feature (179)..(303): Pfam Name: Pfam Description:  BTB/POZ domain
  misc_feature (1)..(367): NCBI GI NO: 37534574 NR Description: putative speckle-type protein
  misc_feature (1)..(367): NCBI GI NO: 37534558 NR Description: putative speckle-type protein
  misc_feature (8)..(367): NCBI GI NO: 37534570 NR Description: putative speckle-type protein
  misc_feature (13)..(370): NCBI GI NO: 37534532 NR Description: putative speckle-type protein
  misc_feature (122)..(369): NCBI GI NO: 37534590 NR Description: putative speckle-type protein
  misc_feature (1)..(85): NCBI GI NO: 37534590 NR Description: putative speckle-type protein
  misc_feature (13)..(369): NCBI GI NO: 37534534 NR Description: putative speckle-type protein
  misc_feature (1)..(367): NCBI GI NO: 37534548 NR Description: putative speckle-type protein
  misc_feature (2)..(356): NCBI GI NO: 37534556 NR Description: putative speckle-type protein
  misc_feature (9)..(365): NCBI GI NO: 37534480 NR Description: hypothetical protein
MSSRAGGGKPLWSASTIVAKVASGYHILRIDGYSRTMETPTGESIASLPFSVGGRCWRIRYYPNGDKLENKEYISLYLYLHDRSVEAEKAQLMFRFVGDVAEQPLILGRLHTFEKQGWGYAKFIKRKDLEESKHLVDDSFSIRCDVAVRFNDVRVEKAPEAAAAASMISVQPSDLHQHLGSLLLTQKGADVVFDVAGETFAAHRCVLAARSPVFTAELFGAMKEGHTGGVVRIEDMEPRAFKALLYFLYTDLLFPKTMATTMNQAEDGDVGDDDEDVLCQHLLVAADKYNLERLKSLCEKKLSECIHVGTVAIILTLAEQHRCPGLKKVCLHFLRSPANLRAVASSDAFKHLSSSCPSVMVELVAMLGNSA

SEQ ID NO: 32663 - protein, 335 aa, Zea mays subsp. mays
  peptide (1)..(335): Ceres Seq. ID no. 12408180
  misc_feature (143)..(267): Pfam Name: Pfam Description:  BTB/POZ domain
  misc_feature (1)..(331): NCBI GI NO: 37534574 NR Description: putative speckle-type protein
  misc_feature (1)..(331): NCBI GI NO: 37534558 NR Description: putative speckle-type protein
  misc_feature (1)..(331): NCBI GI NO: 37534570 NR Description: putative speckle-type protein
  misc_feature (1)..(334): NCBI GI NO: 37534532 NR Description: putative speckle-type protein
  misc_feature (86)..(333): NCBI GI NO: 37534590 NR Description: putative speckle-type protein
  misc_feature (1)..(49): NCBI GI NO: 37534590 NR Description: putative speckle-type protein
  misc_feature (1)..(333): NCBI GI NO: 37534534 NR Description: putative speckle-type protein
  misc_feature (1)..(331): NCBI GI NO: 37534548 NR Description: putative speckle-type protein
  misc_feature (1)..(320): NCBI GI NO: 37534556 NR Description: putative speckle-type protein
  misc_feature (1)..(329): NCBI GI NO: 37534480 NR Description: hypothetical protein
METPTGESIASLPFSVGGRCWRIRYYPNGDKLENKEYISLYLYLHDRSVEAEKAQLMFRFVGDVAEQPLILGRLHTFEKQGWGYAKFIKRKDLEESKHLVDDSFSIRCDVAVRFNDVRVEKAPEAAAAASMISVQPSDLHQHLGSLLLTQKGADVVFDVAGETFAAHRCVLAARSPVFTAELFGAMKEGHTGGVVRIEDMEPRAFKALLYFLYTDLLFPKTMATTMNQAEDGDVGDDDEDVLCQHLLVAADKYNLERLKSLCEKKLSECIHVGTVAIILTLAEQHRCPGLKKVCLHFLRSPANLRAVASSDAFKHLSSSCPSVMVELVAMLGNSA

SEQ ID NO: 32664 - protein, 279 aa, Zea mays subsp. mays
  peptide (1)..(279): Ceres Seq. ID no. 12408181
  misc_feature (87)..(211): Pfam Name: Pfam Description:  BTB/POZ domain
  misc_feature (1)..(275): NCBI GI NO: 37534574 NR Description: putative speckle-type protein
  misc_feature (1)..(275): NCBI GI NO: 37534558 NR Description: putative speckle-type protein
  misc_feature (1)..(275): NCBI GI NO: 37534570 NR Description: putative speckle-type protein
  misc_feature (1)..(278): NCBI GI NO: 37534532 NR Description: putative speckle-type protein
  misc_feature (30)..(277): NCBI GI NO: 37534590 NR Description: putative speckle-type protein
  misc_feature (1)..(277): NCBI GI NO: 37534534 NR Description: putative speckle-type protein
  misc_feature (1)..(275): NCBI GI NO: 37534548 NR Description: putative speckle-type protein
  misc_feature (1)..(264): NCBI GI NO: 37534556 NR Description: putative speckle-type protein
  misc_feature (1)..(273): NCBI GI NO: 37534480 NR Description: hypothetical protein
  misc_feature (85)..(275): NCBI GI NO: 37534536 NR Description: putative speckle-type protein
MFRFVGDVAEQPLILGRLHTFEKQGWGYAKFIKRKDLEESKHLVDDSFSIRCDVAVRFNDVRVEKAPEAAAAASMISVQPSDLHQHLGSLLLTQKGADVVFDVAGETFAAHRCVLAARSPVFTAELFGAMKEGHTGGVVRIEDMEPRAFKALLYFLYTDLLFPKTMATTMNQAEDGDVGDDDEDVLCQHLLVAADKYNLERLKSLCEKKLSECIHVGTVAIILTLAEQHRCPGLKKVCLHFLRSPANLRAVASSDAFKHLSSSCPSVMVELVAMLGNSA

SEQ ID NO: 32665 - DNA, 1233 bp, Zea mays subsp. mays
  misc_feature (1)..(1233): Ceres Seq. ID no. 12423932
  misc_feature (548)..(548): n is a, c, t, g, unknown, or other
  misc_feature (587)..(587): n is a, c, t, g, unknown, or other
ctctctcaaattcacaaggccccgccgccgccgcctcgtcccccattcatcttcgccgaaaccctaaccctagtcgccgcggccacccttcccggcgacgccatgtcgaacccgaagggctccaagatgctccagttcatcaactaccgcatgcgggtgacgatccaggacgggcgccaacttgtgggcaagttcatggcgttcgaccgccacatgaacctcgtcctcggcgattgcgaggagtttcgccgcctcccgccctccaagtcctccaagactaccggtgaacgcgaagagcgccgcacgctcggcctcctcctcctccgcggcgaggaggtagtatccatgaccgtcgagggcccaccaccgcccgacgagtcccgcgccaaggccgcggcggcgggcggagccctcgccggccctggcatcggccgcgccgctgggcgcggtgtgcccaccggcccgctgctccaggcagctcctgggctcgctggtcctgtacgtggggttggtggacccgcccccggcatgatgcagccccagatctngcggccgccgatgcccaacctgtcggcccagccggtgtngtatccgcaggtcgtgcgcccgccgcaggggatgcctcccccaatgcgtcctggaatgccgccgcagatgcagatgccgttccgcccgcctggagcgccgcctgctccgttccctggggcaccgccacaacagttcatgaggggaccaccgccgatggggccgccacaagtgaggcccgggatgccggggccaccacctcctggaatgaggcctggaatgcctccgccaccattcggacagccgaggccagggatgccacctccgccacctggcccgcagcagcctggacagaacccgcctcagtagttccttacctggataagcttcttgcagatacacctatgggagatttttttgtatcgcgagaaaggatcataaatcacacctatggaagacgaagacctgtgaattgcaccaatgctttcaccattctgtctcatatcagggtatctagtgtgtaccactcatcctttgatgtgagaggggactttgtatgtaaagaggccaggactttaactgttggtattggttaagttaggaaatatggataacttatttcatcgttgtcttaattctggacccacccttttccgtgtgtgtcgatgaagcgaggtaattgacttgtagaaattactttctggtttc

SEQ ID NO: 32666 - protein, 297 aa, Zea mays subsp. mays
  peptide (1)..(297): Ceres Seq. ID no. 12423933
  misc_feature (41)..(118): Pfam Name: Pfam Description:  LSM domain
  misc_feature (31)..(297): NCBI GI NO: 34900024 NR Description: putative snRNP protein
  misc_feature (35)..(297): NCBI GI NO: 33146808 NR Description: putative snRNP
  misc_feature (35)..(283): NCBI GI NO: 15237095 NR Description: putative snRNP protein; protein id: At4g20440
  misc_feature (35)..(286): NCBI GI NO: 15241519 NR Description: putative protein; protein id: At5g44500
  misc_feature (35)..(286): NCBI GI NO: 21536707 NR Description: putative snRNP protein [Arabidopsis thaliana]
  misc_feature (35)..(286): NCBI GI NO: 38150007 NR Description: small nuclear ribonucleo protein polypeptide B/B'isoform B'
  misc_feature (35)..(286): NCBI GI NO: 12643865 NR Description: Small nuclear ribonucleo protein associated proteinB'
  misc_feature (35)..(286): NCBI GI NO: 10720263 NR Description: Small nuclear ribonucleo protein associated proteinB'
  misc_feature (35)..(273): NCBI GI NO: 8099650 NR Description: snRNP-associated protein; SmB [Danio rerio]
  misc_feature (35)..(286): NCBI GI NO: 7208221 NR Description: small nuclear ribonucleoprotein B'
  misc_feature (183)..(183): Xaa is any aa, unknown or other
  misc_feature (196)..(196): Xaa is any aa, unknown or other
LSQIHKAPPPPPRPPFIFAETLTLVAAATLPGDAMSNPKGSKMLQFINYRMRVTIQDGRQLVGKFMAFDRHMNLVLGDCEEFRRLPPSKSSKTTGEREERRTLGLLLLRGEEVVSMTVEGPPPPDESRAKAAAAGGALAGPGIGRAAGRGVPTGPLLQAAPGLAGPVRGVGGPAPGMMQPQIXRPPMPNLSAQPVXYPQVVRPPQGMPPPMRPGMPPQMQMPFRPPGAPPAPFPGAPPQQFMRGPPPMGPPQVRPGMPGPPPPGMRPGMPPPPFGQPRPGMPPPPPGPQQPGQNPPQ

SEQ ID NO: 32667 - protein, 263 aa, Zea mays subsp. mays
  peptide (1)..(263): Ceres Seq. ID no. 12423934
  misc_feature (7)..(84): Pfam Name: Pfam Description:  LSM domain
  misc_feature (1)..(263): NCBI GI NO: 34900024 NR Description: putative snRNP protein
  misc_feature (1)..(263): NCBI GI NO: 33146808 NR Description: putative snRNP
  misc_feature (1)..(249): NCBI GI NO: 15237095 NR Description: putative snRNP protein; protein id: At4g20440
  misc_feature (1)..(252): NCBI GI NO: 15241519 NR Description: putative protein; protein id: At5g44500
  misc_feature (1)..(252): NCBI GI NO: 21536707 NR Description: putative snRNP protein [Arabidopsis thaliana]
  misc_feature (1)..(252): NCBI GI NO: 38150007 NR Description: small nuclear ribonucleo protein polypeptide B/B'isoform B'
  misc_feature (1)..(252): NCBI GI NO: 12643865 NR Description: Small nuclear ribonucleo protein associated proteinB'
  misc_feature (1)..(252): NCBI GI NO: 10720263 NR Description: Small nuclear ribonucleo protein associated proteinB'
  misc_feature (1)..(239): NCBI GI NO: 8099650 NR Description: snRNP-associated protein; SmB [Danio rerio]
  misc_feature (1)..(252): NCBI GI NO: 7208221 NR Description: small nuclear ribonucleoprotein B'
  misc_feature (149)..(149): Xaa is any aa, unknown or other
  misc_feature (162)..(162): Xaa is any aa, unknown or other
MSNPKGSKMLQFINYRMRVTIQDGRQLVGKFMAFDRHMNLVLGDCEEFRRLPPSKSSKTTGEREERRTLGLLLLRGEEVVSMTVEGPPPPDESRAKAAAAGGALAGPGIGRAAGRGVPTGPLLQAAPGLAGPVRGVGGPAPGMMQPQIXRPPMPNLSAQPVXYPQVVRPPQGMPPPMRPGMPPQMQMPFRPPGAPPAPFPGAPPQQFMRGPPPMGPPQVRPGMPGPPPPGMRPGMPPPPFGQPRPGMPPPPPGPQQPGQNPPQ

SEQ ID NO: 32668 - protein, 255 aa, Zea mays subsp. mays
  peptide (1)..(255): Ceres Seq. ID no. 12423935
  misc_feature (1)..(76): Pfam Name: Pfam Description:  LSM domain
  misc_feature (1)..(255): NCBI GI NO: 34900024 NR Description: putative snRNP protein
  misc_feature (1)..(255): NCBI GI NO: 33146808 NR Description: putative snRNP
  misc_feature (1)..(241): NCBI GI NO: 15237095 NR Description: putative snRNP protein; protein id: At4g20440
  misc_feature (1)..(244): NCBI GI NO: 15241519 NR Description: putative protein; protein id: At5g44500
  misc_feature (1)..(244): NCBI GI NO: 21536707 NR Description: putative snRNP protein [Arabidopsis thaliana]
  misc_feature (1)..(244): NCBI GI NO: 38150007 NR Description: small nuclear ribonucleo protein polypeptide B/B'isoform B'
  misc_feature (1)..(244): NCBI GI NO: 12643865 NR Description: Small nuclear ribonucleo protein associated proteinB'
  misc_feature (1)..(244): NCBI GI NO: 10720263 NR Description: Small nuclear ribonucleo protein associated proteinB'
  misc_feature (1)..(231): NCBI GI NO: 8099650 NR Description: snRNP-associated protein; SmB [Danio rerio]
  misc_feature (1)..(244): NCBI GI NO: 7208221 NR Description: small nuclear ribonucleoprotein B'
  misc_feature (141)..(141): Xaa is any aa, unknown or other
  misc_feature (154)..(154): Xaa is any aa, unknown or other
MLQFINYRMRVTIQDGRQLVGKFMAFDRHMNLVLGDCEEFRRLPPSKSSKTTGEREERRTLGLLLLRGEEVVSMTVEGPPPPDESRAKAAAAGGALAGPGIGRAAGRGVPTGPLLQAAPGLAGPVRGVGGPAPGMMQPQIXRPPMPNLSAQPVXYPQVVRPPQGMPPPMRPGMPPQMQMPFRPPGAPPAPFPGAPPQQFMRGPPPMGPPQVRPGMPGPPPPGMRPGMPPPPFGQPRPGMPPPPPGPQQPGQNPPQ

SEQ ID NO: 32669 - DNA, 554 bp, Zea mays subsp. mays
  misc_feature (1)..(554): Ceres Seq. ID no. 12414961
gttgctttcgttgagatcttaattaccagcccccaacttcgcgtgcagaccgcgagagaatacaagctcgcggacctcactcccatggagtcgggttgctgccgcccgccagcagagtgcgggttcccagctctgaacgcgtcctatttcgatctgagctatcacccggcgagcgccaacgccgactgcaaactgtacaggaacgcgcgctctgtccggtgctacgactgcagctcttgcaaagctggtgtcgcgcagtacatgaagacggagtggcgagtggtggctatcttcaacgtgatattgttcgtcatcctgtcgttcgtgtacttcgttggctgctgcgcgcggcgaaacgctggaggaggcgacgcgaaaggccgtggcaggtgacgggatcacttcttcgaggtgaagtgaagcgcttggccatcctatgtggagttagttaagcttagtatcaacaccccccctgtaaaattgttccatcaaaatattcaaagttcctttgatgaagtaccaggacctgtcgctgcctagtaatactctgttgc

SEQ ID NO: 32670 - protein, 130 aa, Zea mays subsp. mays
  peptide (1)..(130): Ceres Seq. ID no. 12414962
  misc_feature (14)..(106): Pfam Name: Pfam Description:  Tetraspanin family
  misc_feature (14)..(126): NCBI GI NO: 37535820 NR Description: putative senescence-associated protein
  misc_feature (14)..(126): NCBI GI NO: 30696823 NR Description: senescence-associated protein family
  misc_feature (14)..(106): NCBI GI NO: 25404415 NR Description: hypothetical protein F9N12.12
  misc_feature (21)..(128): NCBI GI NO: 20197174 NR Description: hypothetical protein [Arabidopsis thaliana]
  misc_feature (21)..(128): NCBI GI NO: 30682205 NR Description: senescence-associated protein family
  misc_feature (16)..(119): NCBI GI NO: 3551954 NR Description: senescence-associated protein 5
  misc_feature (16)..(119): NCBI GI NO: 15231187 NR Description: putative protein; protein id: At3g45600
  misc_feature (16)..(119): NCBI GI NO: 15238641 NR Description: senescence-associated protein - like
  misc_feature (11)..(120): NCBI GI NO: 15237490 NR Description: senescence-associated protein 5-like protein
  misc_feature (11)..(120): NCBI GI NO: 17979386 NR Description: putative senescence-associated protein 5
VAFVEILITSPQLRVQTAREYKLADLTPMESGCCRPPAECGFPALNASYFDLSYHPASANADCKLYRNARSVRCYDCSSCKAGVAQYMKTEWRVVAIFNVILFVILSFVYFVGCCARRNAGGGDAKGRGR

SEQ ID NO: 32671 - protein, 102 aa, Zea mays subsp. mays
  peptide (1)..(102): Ceres Seq. ID no. 12414963
  misc_feature (1)..(78): Pfam Name: Pfam Description:  Tetraspanin family
  misc_feature (1)..(98): NCBI GI NO: 37535820 NR Description: putative senescence-associated protein
  misc_feature (1)..(98): NCBI GI NO: 30696823 NR Description: senescence-associated protein family
  misc_feature (1)..(78): NCBI GI NO: 25404415 NR Description: hypothetical protein F9N12.12
  misc_feature (1)..(100): NCBI GI NO: 20197174 NR Description: hypothetical protein [Arabidopsis thaliana]
  misc_feature (1)..(100): NCBI GI NO: 30682205 NR Description: senescence-associated protein family
  misc_feature (1)..(91): NCBI GI NO: 3551954 NR Description: senescence-associated protein 5
  misc_feature (1)..(91): NCBI GI NO: 15231187 NR Description: putative protein; protein id: At3g45600
  misc_feature (1)..(91): NCBI GI NO: 15238641 NR Description: senescence-associated protein - like
  misc_feature (1)..(92): NCBI GI NO: 15237490 NR Description: senescence-associated protein 5-like protein
  misc_feature (1)..(92): NCBI GI NO: 17979386 NR Description: putative senescence-associated protein 5
MESGCCRPPAECGFPALNASYFDLSYHPASANADCKLYRNARSVRCYDCSSCKAGVAQYMKTEWRVVAIFNVILFVILSFVYFVGCCARRNAGGGDAKGRGR

SEQ ID NO: 32672 - DNA, 1368 bp, Zea mays subsp. mays
  misc_feature (1)..(1368): Ceres Seq. ID no. 12343891
agagggggcagtgcagaaggcatgtttccgatggcgtcttcctcactgtcgtcgccgccgctatcacttatcctcctccggccgctcccgtgcatacccgtcctcctcttgagacaaaggaagccattcccagctgtccgcgtagaagcaaggtctcagcagcggttgcagcggaggccggtgactggccagtggaggaggagctgcagaaggggcggaggctacgcgtgtttctcctacaatgccaagaacaagacgcccccgccttcagataagagttcagacgagtgggcgatcgttcgccgatgggatgtgccatgggaatggcaaactgttgtgctcagcatggtaggctgtggagtaagctttgttctgacaggattggttgagcaattggctttgcaagaactgggatttaaagctgtggaggcaactatagatgagaaggcagaaatactcttctttgggcagctgagtgtgacagtagtagtgcttggtgttatatttggcatcaccaacacttttcgaccattcccagatgatgtgtttcgttatcatattaaagaaccgttcaagctgcaaaatggatggcttttgtgggctggaattggtctctttggagcagtaatttctattgccttagccggagctgctatgacttatctgaatggtgaaactccagcgagagagactgattcactagtccttttgttgccgctgattggctcatccactaccagtactgcctttttggtgggaatcactggagttctagcaccacttctcgaggagacactgtttcgaggatttctaatggtgtccttgactaagtggtttcctactccagcttgtgtacttgtcagtgctgctgtatttgcccttgctcatctgactcctggacaatttccgcagctgtttatacttggtgttgcattgggattttcatatgctcagacccgcaatcttctaactccgatcacaattcatgcattttggaactcaggagtaatacttctgctaacctttcttcagctgcaaggatatgatctcaaggagctcttgggagcatcgtgaaggtttgaacgaaccaggcacatataatttgtgcataatatatatggtatcaaggagatccgttgggtatgtgctcttgtacacctgatgccaacaaaactacgtgaaaggaaatatgagtcttcaagttagctgatggttgcgtttccagaagtgttacgaggcatcactagtctgtaaagctgtttatacagtataagatggcagattgaacttaacgtaagaacagctgcccttttgagagtgtttcttacaactggagtactcgattaaattgtgctgatattgtttgtt

SEQ ID NO: 32673 - protein, 357 aa, Zea mays subsp. mays
  peptide (1)..(357): Ceres Seq. ID no. 12343892
  misc_feature (251)..(340): Pfam Name: Pfam Description:  CAAX amino terminal protease family
  misc_feature (76)..(357): NCBI GI NO: 21593106 NR Description: unknown [Arabidopsis thaliana]
  misc_feature (76)..(357): NCBI GI NO: 30683693 NR Description: CAAX amino terminal protease family
  misc_feature (94)..(357): NCBI GI NO: 25518680 NR Description: hypothetical protein F14L17
  misc_feature (137)..(357): NCBI GI NO: 20259411 NR Description: unknown protein [Arabidopsis thaliana]
  misc_feature (102)..(343): NCBI GI NO: 16331018 NR Description: unknown protein [Synechocystis sp. PCC 6803]
  misc_feature (103)..(343): NCBI GI NO: 17231277 NR Description: hypothetical protein [Nostoc sp. PCC 7120]
  misc_feature (103)..(343): NCBI GI NO: 23130090 NR Description: hypothetical protein [Nostoc punctiforme]
  misc_feature (98)..(340): NCBI GI NO: 9759339 NR Description: gene_id:MUP24
  misc_feature (98)..(340): NCBI GI NO: 18424393 NR Description: putative protein; protein id: At5g60750
  misc_feature (103)..(343): NCBI GI NO: 37522744 NR Description: hypothetical protein gll3175
RGGSAEGMFPMASSSLSSPPLSLILLRPLPCIPVLLLRQRKPFPAVRVEARSQQRLQRRPVTGQWRRSCRRGGGYACFSYNAKNKTPPPSDKSSDEWAIVRRWDVPWEWQTVVLSMVGCGVSFVLTGLVEQLALQELGFKAVEATIDEKAEILFFGQLSVTVVVLGVIFGITNTFRPFPDDVFRYHIKEPFKLQNGWLLWAGIGLFGAVISIALAGAAMTYLNGETPARETDSLVLLLPLIGSSTTSTAFLVGITGVLAPLLEETLFRGFLMVSLTKWFPTPACVLVSAAVFALAHLTPGQFPQLFILGVALGFSYAQTRNLLTPITIHAFWNSGVILLLTFLQLQGYDLKELLGAS

SEQ ID NO: 32674 - protein, 350 aa, Zea mays subsp. mays
  peptide (1)..(350): Ceres Seq. ID no. 12343893
  misc_feature (244)..(333): Pfam Name: Pfam Description:  CAAX amino terminal protease family
  misc_feature (69)..(350): NCBI GI NO: 21593106 NR Description: unknown [Arabidopsis thaliana]
  misc_feature (69)..(350): NCBI GI NO: 30683693 NR Description: CAAX amino terminal protease family
  misc_feature (87)..(350): NCBI GI NO: 25518680 NR Description: hypothetical protein F14L17
  misc_feature (130)..(350): NCBI GI NO: 20259411 NR Description: unknown protein [Arabidopsis thaliana]
  misc_feature (95)..(336): NCBI GI NO: 16331018 NR Description: unknown protein [Synechocystis sp. PCC 6803]
  misc_feature (96)..(336): NCBI GI NO: 17231277 NR Description: hypothetical protein [Nostoc sp. PCC 7120]
  misc_feature (96)..(336): NCBI GI NO: 23130090 NR Description: hypothetical protein [Nostoc punctiforme]
  misc_feature (91)..(333): NCBI GI NO: 9759339 NR Description: gene_id:MUP24
  misc_feature (91)..(333): NCBI GI NO: 18424393 NR Description: putative protein; protein id: At5g60750
  misc_feature (96)..(336): NCBI GI NO: 37522744 NR Description: hypothetical protein gll3175
MFPMASSSLSSPPLSLILLRPLPCIPVLLLRQRKPFPAVRVEARSQQRLQRRPVTGQWRRSCRRGGGYACFSYNAKNKTPPPSDKSSDEWAIVRRWDVPWEWQTVVLSMVGCGVSFVLTGLVEQLALQELGFKAVEATIDEKAEILFFGQLSVTVVVLGVIFGITNTFRPFPDDVFRYHIKEPFKLQNGWLLWAGIGLFGAVISIALAGAAMTYLNGETPARETDSLVLLLPLIGSSTTSTAFLVGITGVLAPLLEETLFRGFLMVSLTKWFPTPACVLVSAAVFALAHLTPGQFPQLFILGVALGFSYAQTRNLLTPITIHAFWNSGVILLLTFLQLQGYDLKELLGAS

SEQ ID NO: 32675 - protein, 347 aa, Zea mays subsp. mays
  peptide (1)..(347): Ceres Seq. ID no. 12343894
  misc_feature (241)..(330): Pfam Name: Pfam Description:  CAAX amino terminal protease family
  misc_feature (66)..(347): NCBI GI NO: 21593106 NR Description: unknown [Arabidopsis thaliana]
  misc_feature (66)..(347): NCBI GI NO: 30683693 NR Description: CAAX amino terminal protease family
  misc_feature (84)..(347): NCBI GI NO: 25518680 NR Description: hypothetical protein F14L17
  misc_feature (127)..(347): NCBI GI NO: 20259411 NR Description: unknown protein [Arabidopsis thaliana]
  misc_feature (92)..(333): NCBI GI NO: 16331018 NR Description: unknown protein [Synechocystis sp. PCC 6803]
  misc_feature (93)..(333): NCBI GI NO: 17231277 NR Description: hypothetical protein [Nostoc sp. PCC 7120]
  misc_feature (93)..(333): NCBI GI NO: 23130090 NR Description: hypothetical protein [Nostoc punctiforme]
  misc_feature (88)..(330): NCBI GI NO: 9759339 NR Description: gene_id:MUP24
  misc_feature (88)..(330): NCBI GI NO: 18424393 NR Description: putative protein; protein id: At5g60750
  misc_feature (93)..(333): NCBI GI NO: 37522744 NR Description: hypothetical protein gll3175
MASSSLSSPPLSLILLRPLPCIPVLLLRQRKPFPAVRVEARSQQRLQRRPVTGQWRRSCRRGGGYACFSYNAKNKTPPPSDKSSDEWAIVRRWDVPWEWQTVVLSMVGCGVSFVLTGLVEQLALQELGFKAVEATIDEKAEILFFGQLSVTVVVLGVIFGITNTFRPFPDDVFRYHIKEPFKLQNGWLLWAGIGLFGAVISIALAGAAMTYLNGETPARETDSLVLLLPLIGSSTTSTAFLVGITGVLAPLLEETLFRGFLMVSLTKWFPTPACVLVSAAVFALAHLTPGQFPQLFILGVALGFSYAQTRNLLTPITIHAFWNSGVILLLTFLQLQGYDLKELLGAS

SEQ ID NO: 32676 - DNA, 875 bp, Zea mays subsp. mays
  misc_feature (1)..(875): Ceres Seq. ID no. 12404015
accacgcaaaaaacaaacacactcgaaggcagcgaagcccgagccttcccttccctccaatcgatcacccgcttcgatccgctagctagctagcagcgcgatggcttccctcaccgtgtccacgaagaccgcggcggccggcggcaacaagcagcgcgagggcgcggaggtcatcacgggcgcggaggcctgcttcgcgcactccaagcagatgctccaggcgctgggcttcccgggcggcgtgatgccgctgcgggggctggaggagtgcggctgggtgcgcgagaccgggttcgtgtggatgcggcagaaggccccctacgagcactacttccgcggcacgggcacgcgggtgcgctacgacgccgaggtcaccgcgtacgtggaggacggccggatgaagcgcatgaccggggtgcgcagcaagccaggtcatgctctgggtgcccatcgtcgagatgagcctcgacggagagaagcgcgacaagatctacttcaagtccaacgtcgggatcggccgctcgttccccgcctccgccttcgctgacgaggacgagcaagcggaggaggaggagaagaagaagaatgagaacaaggaggagaacggcgacaagccagccgccgccgccgccgatgccgccggcaagtgagacggagacccgagcgcgcgcgtgttgtcgtcgtgccgggtactgtgcgcggttgcagggcaccgttgcgcgacgcatctcgcgcgtaaccacgcgtgaagatgcacgtatctatcgtctttctttgctactttgtattgcttgtcctttttcctccttttttttctttcaaaaaatgtattattgcctgtatctatcgatcgttgcatgtttaccgcgtttgat

SEQ ID NO: 32677 - protein, 148 aa, Zea mays subsp. mays
  peptide (1)..(148): Ceres Seq. ID no. 12404016
  misc_feature (48)..(107): Pfam Name: Pfam Description:  Protein of unknown function, DUF538
  misc_feature (48)..(107): NCBI GI NO: 37536100 NR Description: hypothetical protein
  misc_feature (7)..(109): NCBI GI NO: 15233705 NR Description: putative protein; protein id: At4g24130.1
  misc_feature (19)..(109): NCBI GI NO: 34903866 NR Description: unnamed protein product
  misc_feature (19)..(109): NCBI GI NO: 18391006 NR Description: expressed protein; protein id: At1g09310
  misc_feature (19)..(109): NCBI GI NO: 34915378 NR Description: hypothetical protein~similar to Oryza sativachromosome 7
  misc_feature (19)..(109): NCBI GI NO: 34915416 NR Description: hypothetical protein~similar to Arabidopsisthaliana chromosome1
  misc_feature (18)..(109): NCBI GI NO: 18422648 NR Description: expressed protein; protein id: At5g46230
  misc_feature (19)..(109): NCBI GI NO: 34915376 NR Description: hypothetical protein~similar to Oryza sativachromosome 7
  misc_feature (19)..(109): NCBI GI NO: 34915410 NR Description: hypothetical protein~similar to Arabidopsisthaliana chromosome1
  misc_feature (19)..(109): NCBI GI NO: 33146557 NR Description: unknown protein
MASLTVSTKTAAAGGNKQREGAEVITGAEACFAHSKQMLQALGFPGGVMPLRGLEECGWVRETGFVWMRQKAPYEHYFRGTGTRVRYDAEVTAYVEDGRMKRMTGVRSKPGHALGAHRRDEPRRREARQDLLQVQRRDRPLVPRLRLR

SEQ ID NO: 32678 - protein, 111 aa, Zea mays subsp. mays
  peptide (1)..(111): Ceres Seq. ID no. 12404017
  misc_feature (11)..(70): Pfam Name: Pfam Description:  Protein of unknown function, DUF538
  misc_feature (11)..(70): NCBI GI NO: 37536100 NR Description: hypothetical protein
  misc_feature (1)..(72): NCBI GI NO: 15233705 NR Description: putative protein; protein id: At4g24130.1
  misc_feature (1)..(72): NCBI GI NO: 34903866 NR Description: unnamed protein product
  misc_feature (1)..(72): NCBI GI NO: 18391006 NR Description: expressed protein; protein id: At1g09310
  misc_feature (1)..(72): NCBI GI NO: 34915378 NR Description: hypothetical protein~similar to Oryza sativachromosome 7
  misc_feature (1)..(72): NCBI GI NO: 34915416 NR Description: hypothetical protein~similar to Arabidopsisthaliana chromosome1
  misc_feature (1)..(72): NCBI GI NO: 18422648 NR Description: expressed protein; protein id: At5g46230
  misc_feature (1)..(72): NCBI GI NO: 34915376 NR Description: hypothetical protein~similar to Oryza sativachromosome 7
  misc_feature (1)..(72): NCBI GI NO: 34915410 NR Description: hypothetical protein~similar to Arabidopsisthaliana chromosome1
  misc_feature (1)..(72): NCBI GI NO: 33146557 NR Description: unknown protein
MLQALGFPGGVMPLRGLEECGWVRETGFVWMRQKAPYEHYFRGTGTRVRYDAEVTAYVEDGRMKRMTGVRSKPGHALGAHRRDEPRRREARQDLLQVQRRDRPLVPRLRLR

SEQ ID NO: 32679 - protein, 100 aa, Zea mays subsp. mays
  peptide (1)..(100): Ceres Seq. ID no. 12404018
  misc_feature (1)..(59): Pfam Name: Pfam Description:  Protein of unknown function, DUF538
  misc_feature (1)..(59): NCBI GI NO: 37536100 NR Description: hypothetical protein
  misc_feature (1)..(61): NCBI GI NO: 15233705 NR Description: putative protein; protein id: At4g24130.1
  misc_feature (1)..(61): NCBI GI NO: 34903866 NR Description: unnamed protein product
  misc_feature (1)..(61): NCBI GI NO: 18391006 NR Description: expressed protein; protein id: At1g09310
  misc_feature (1)..(61): NCBI GI NO: 34915378 NR Description: hypothetical protein~similar to Oryza sativachromosome 7
  misc_feature (1)..(61): NCBI GI NO: 34915416 NR Description: hypothetical protein~similar to Arabidopsisthaliana chromosome1
  misc_feature (1)..(61): NCBI GI NO: 18422648 NR Description: expressed protein; protein id: At5g46230
  misc_feature (1)..(61): NCBI GI NO: 34915376 NR Description: hypothetical protein~similar to Oryza sativachromosome 7
  misc_feature (1)..(61): NCBI GI NO: 34915410 NR Description: hypothetical protein~similar to Arabidopsisthaliana chromosome1
  misc_feature (1)..(61): NCBI GI NO: 33146557 NR Description: unknown protein
MPLRGLEECGWVRETGFVWMRQKAPYEHYFRGTGTRVRYDAEVTAYVEDGRMKRMTGVRSKPGHALGAHRRDEPRRREARQDLLQVQRRDRPLVPRLRLR

SEQ ID NO: 32680 - DNA, 798 bp, Zea mays subsp. mays
  misc_feature (1)..(798): Ceres Seq. ID no. 12579040
atttttcgaccgccgccgcccccagtccccgatccgaagctgtgcctcgtaccatttcgatccaatggcgccgacgtcgaagctgtcgacgggcatcaagcgcgcttcgcggtcgcacacgtaccatcgccgtgggctgtgggccatcaaggccaagaacggcggcgccttccccaaggccgacaaggccgccgccgccgtggaacccaatttctaccctgccgacgacgtcaagccccgcgttcccagcacccgcaagcctaagcctaccaagctcaggtcgagcatcacgcctgggacggtgctgatcctcctcgcagggcgcttcatggggaagagagtggtgtttctcaagcagctcaagtctggcctgctccttatctctgggcctttcaagatcaatggagtaccgatccgccgtgtgaaccagacctatggagaagaagcagaaggtgaagaagaccgagggcgagctttttgagacagaaaaggaggcatccaagtcactgcctgacttcaagaaggatgaccagaaggctgtggattctgctctgatcaaggctatcgaggctgtcctggagctgaaaacctatcttggcgcccggttctctctcagggatggtgacaagccccatgagatggtattctaagtttctagttttggagttcgtaggaagctgttttgtctgtgttcttgtacttctgagttttgtaccagtagcgaacgtttcattgtgattgaagtcttcctgccaaatattataagatctaagaaagttctatccgtgttggtggtcc

SEQ ID NO: 32681 - protein, 159 aa, Zea mays subsp. mays
  peptide (1)..(159): Ceres Seq. ID no. 12579041
  misc_feature (22)..(145): NCBI GI NO: 38344818 NR Description: OSJNBb0022F23.11
  misc_feature (28)..(145): NCBI GI NO: 15221126 NR Description: putative 60S ribosomal protein L6
  misc_feature (28)..(145): NCBI GI NO: 15221127 NR Description: putative 60S ribosomal protein L6
  misc_feature (28)..(145): NCBI GI NO: 15221798 NR Description: 60S ribosomal protein L6, putative
  misc_feature (27)..(145): NCBI GI NO: 464621 NR Description: 60S RIBOSOMAL PROTEIN L6 (YL16-LIKE)
  misc_feature (28)..(145): NCBI GI NO: 21593910 NR Description: 60S ribosomal protein L6, putative
  misc_feature (28)..(145): NCBI GI NO: 7208784 NR Description: 60S ribosomal protein L6 [Cicer arietinum]
  misc_feature (69)..(145): NCBI GI NO: 6012952 NR Description: 60S ribosomal protein L6 (YL 16 like)
  misc_feature (67)..(145): NCBI GI NO: 7271018 NR Description: ribosomal protein L16 [Candida albicans]
  misc_feature (64)..(145): NCBI GI NO: 6323567 NR Description: Homology to rat L6 and human L6; Rpl6ap
FFDRRRPQSPIRSCASYHFDPMAPTSKLSTGIKRASRSHTYHRRGLWAIKAKNGGAFPKADKAAAAVEPNFYPADDVKPRVPSTRKPKPTKLRSSITPGTVLILLAGRFMGKRVVFLKQLKSGLLLISGPFKINGVPIRRVNQTYGEEAEGEEDRGRAF

SEQ ID NO: 32682 - protein, 138 aa, Zea mays subsp. mays
  peptide (1)..(138): Ceres Seq. ID no. 12579042
  misc_feature (1)..(124): NCBI GI NO: 38344818 NR Description: OSJNBb0022F23.11
  misc_feature (7)..(124): NCBI GI NO: 15221126 NR Description: putative 60S ribosomal protein L6
  misc_feature (7)..(124): NCBI GI NO: 15221127 NR Description: putative 60S ribosomal protein L6
  misc_feature (7)..(124): NCBI GI NO: 15221798 NR Description: 60S ribosomal protein L6, putative
  misc_feature (6)..(124): NCBI GI NO: 464621 NR Description: 60S RIBOSOMAL PROTEIN L6 (YL16-LIKE)
  misc_feature (7)..(124): NCBI GI NO: 21593910 NR Description: 60S ribosomal protein L6, putative
  misc_feature (7)..(124): NCBI GI NO: 7208784 NR Description: 60S ribosomal protein L6 [Cicer arietinum]
  misc_feature (48)..(124): NCBI GI NO: 6012952 NR Description: 60S ribosomal protein L6 (YL 16 like)
  misc_feature (46)..(124): NCBI GI NO: 7271018 NR Description: ribosomal protein L16 [Candida albicans]
  misc_feature (43)..(124): NCBI GI NO: 6323567 NR Description: Homology to rat L6 and human L6; Rpl6ap
MAPTSKLSTGIKRASRSHTYHRRGLWAIKAKNGGAFPKADKAAAAVEPNFYPADDVKPRVPSTRKPKPTKLRSSITPGTVLILLAGRFMGKRVVFLKQLKSGLLLISGPFKINGVPIRRVNQTYGEEAEGEEDRGRAF

SEQ ID NO: 32683 - protein, 101 aa, Zea mays subsp. mays
  peptide (1)..(101): Ceres Seq. ID no. 12579043
FSTAAAPSPRSEAVPRTISIQWRRRRSCRRASSALRGRTRTIAVGCGPSRPRTAAPSPRPTRPPPPWNPISTLPTTSSPAFPAPASLSLPSSGRASRLGRC

SEQ ID NO: 32684 - DNA, 1654 bp, Zea mays subsp. mays
  misc_feature (1)..(1654): Ceres Seq. ID no. 12351319
gcgcctggccagtggccatccatcccttcccttcgcttcgacgcaccaatcttgtcccggcgcctgccaaatccagcaaggccacacagcccgaggcaggaagggcagcgcaggaacagggagcgagcagcgcaccggcaatggcggcttcttccgggacgcgctccgtgcgcctgctgctgctgctgctctgcctgctcgggttctgcgtcgcgctgagccaccaggagtcgtcggcggactcgtgcgccagggccaaggtcgcggtcgccagcctcgtgcccttcgactccacgtccttccgctgcaccgccgcctggaagcagcaggacttcgtcctcaggtacaagaacacggggcccagcgagtggagcttcatcctctcggcgccggacaggggctcgtacgtggcggtcggcttctcgggcaagggcgccatggtggggagcagcgccgtcgtcgggtgggtggcccaacggcaggggcaccgtcaagcagtactacctcggcgggaagagccccgaggagtgcgcccccaacaggggcctcctcaagctcgtcaggaacaggaccgccgtcgcctcgcgctccggccgcctctacctcgccttccagctcagcaccgactacccgcagccgtacctgatctacgccgtcgggccagacggcagcctgccgcagtccgactcgctgcggctgccggcgcaccagaacatggcctcccgctccttcaactacacctccgggctgtcgtacaacgtcgccgggtccggcgacgccgcgttcccgccggagaggaagcacgggctgctgggcatgatggggtggggcgtgctgatgcccatcggcatgatcaccgcgcgctacttccggcagctggacccgtgctggttctacacccacatggccatccaggtggctggctacgccgtcggcatcgcgggcatcgtcctcggcttccgcctcagcgaggacgggctcaggaacgtggacgtgcacaaggcgctcggcatcgccatcttggccatggcgtctcttcaggtgatggcgatcctggcgcggccggacaagacgtccaaggtgcggcggttctggaactggtaccaccacaacatcgggcgcgcggcgatcctgctggccatcggcaacatcttcctgggcctctccatcgcgcaggagaccagcgcctacatcgtctcctacggcgtgttcgtcgccgtctgggtgctcgccgtcgccgccttcgagatgaagcgctgctacgccgacgacgactgatgagctagcgacacgtaagagtcacagttcggtcccaacagctgacggcgaagtttggtgtcgttaaactgagcgttccacggccagctgggacgtgacagacacacgagctccgagcgcgcgcgcgcacacacacacaacattcttgttgttccgtagctcgcagctggacagtgcattattggttcggggaggtcgtgctttggttggctaatttaaaaaaaaaattgtttttttttgaggtataggatgtgaggaaggggacggtctgctgtttctaggctagctggacgctctgattcataaatttgtacattgattggtacgtggtcgtgttgtgttgtaccctttttggacgatagcatgttcttcgccc

SEQ ID NO: 32685 - protein, 427 aa, Zea mays subsp. mays
  peptide (1)..(427): Ceres Seq. ID no. 12351320
  misc_feature (109)..(214): Pfam Name: Pfam Description:  DOMON domain
  misc_feature (48)..(181): NCBI GI NO: 21740784 NR Description: OSJNBa0067K08.25
  misc_feature (6)..(155): NCBI GI NO: 34907602 NR Description: B1078G07.42
  misc_feature (54)..(157): NCBI GI NO: 34907596 NR Description: B1078G07.39
  misc_feature (60)..(186): NCBI GI NO: 34911180 NR Description: P0019E03.5
  misc_feature (47)..(114): NCBI GI NO: 34907570 NR Description: B1078G07.26
  misc_feature (121)..(155): NCBI GI NO: 34907570 NR Description: B1078G07.26
  misc_feature (60)..(214): NCBI GI NO: 30680365 NR Description: auxin-induced protein-related
  misc_feature (60)..(214): NCBI GI NO: 6466940 NR Description: unknown protein [Arabidopsis thaliana]
AWPVAIHPFPSLRRTNLVPAPAKSSKATQPEAGRAAQEQGASSAPAMAASSGTRSVRLLLLLLCLLGFCVALSHQESSADSCARAKVAVASLVPFDSTSFRCTAAWKQQDFVLRYKNTGPSEWSFILSAPDRGSYVAVGFSGKGAMVGSSAVVGWVAQRQGHRQAVLPRREEPRGVRPQQGPPQARQEQDRRRLALRPPLPRLPAQHRLPAAVPDLRRRARRQPAAVRLAAAAGAPEHGLPLLQLHLRAVVQRRRVRRRRVPAGEEARAAGHDGVGRADAHRHDHRALLPAAGPVLVLHPHGHPGGWLRRRHRGHRPRLPPQRGRAQERGRAQGARHRHLGHGVSSGDGDPGAAGQDVQGAAVLELVPPQHRARGDPAGHRQHLPGPLHRAGDQRLHRLLRRVRRRLGARRRRLRDEALLRRRRLMS

SEQ ID NO: 32686 - protein, 381 aa, Zea mays subsp. mays
  peptide (1)..(381): Ceres Seq. ID no. 12351321
  misc_feature (63)..(168): Pfam Name: Pfam Description:  DOMON domain
  misc_feature (2)..(135): NCBI GI NO: 21740784 NR Description: OSJNBa0067K08.25
  misc_feature (1)..(109): NCBI GI NO: 34907602 NR Description: B1078G07.42
  misc_feature (8)..(111): NCBI GI NO: 34907596 NR Description: B1078G07.39
  misc_feature (14)..(140): NCBI GI NO: 34911180 NR Description: P0019E03.5
  misc_feature (1)..(68): NCBI GI NO: 34907570 NR Description: B1078G07.26
  misc_feature (75)..(109): NCBI GI NO: 34907570 NR Description: B1078G07.26
  misc_feature (14)..(168): NCBI GI NO: 30680365 NR Description: auxin-induced protein-related
  misc_feature (14)..(168): NCBI GI NO: 6466940 NR Description: unknown protein [Arabidopsis thaliana]
MAASSGTRSVRLLLLLLCLLGFCVALSHQESSADSCARAKVAVASLVPFDSTSFRCTAAWKQQDFVLRYKNTGPSEWSFILSAPDRGSYVAVGFSGKGAMVGSSAVVGWVAQRQGHRQAVLPRREEPRGVRPQQGPPQARQEQDRRRLALRPPLPRLPAQHRLPAAVPDLRRRARRQPAAVRLAAAAGAPEHGLPLLQLHLRAVVQRRRVRRRRVPAGEEARAAGHDGVGRADAHRHDHRALLPAAGPVLVLHPHGHPGGWLRRRHRGHRPRLPPQRGRAQERGRAQGARHRHLGHGVSSGDGDPGAAGQDVQGAAVLELVPPQHRARGDPAGHRQHLPGPLHRAGDQRLHRLLRRVRRRLGARRRRLRDEALLRRRRLMS

SEQ ID NO: 32687 - protein, 282 aa, Zea mays subsp. mays
  peptide (1)..(282): Ceres Seq. ID no. 12351322
  misc_feature (1)..(69): Pfam Name: Pfam Description:  DOMON domain
  misc_feature (1)..(36): NCBI GI NO: 21740784 NR Description: OSJNBa0067K08.25
  misc_feature (1)..(12): NCBI GI NO: 34907596 NR Description: B1078G07.39
  misc_feature (1)..(41): NCBI GI NO: 34911180 NR Description: P0019E03.5
  misc_feature (1)..(69): NCBI GI NO: 30680365 NR Description: auxin-induced protein-related
  misc_feature (1)..(69): NCBI GI NO: 6466940 NR Description: unknown protein [Arabidopsis thaliana]
MVGSSAVVGWVAQRQGHRQAVLPRREEPRGVRPQQGPPQARQEQDRRRLALRPPLPRLPAQHRLPAAVPDLRRRARRQPAAVRLAAAAGAPEHGLPLLQLHLRAVVQRRRVRRRRVPAGEEARAAGHDGVGRADAHRHDHRALLPAAGPVLVLHPHGHPGGWLRRRHRGHRPRLPPQRGRAQERGRAQGARHRHLGHGVSSGDGDPGAAGQDVQGAAVLELVPPQHRARGDPAGHRQHLPGPLHRAGDQRLHRLLRRVRRRLGARRRRLRDEALLRRRRLMS

SEQ ID NO: 32688 - DNA, 1507 bp, Zea mays subsp. mays
  misc_feature (1)..(1507): Ceres Seq. ID no. 12413799
ctcactactttgagctgcaaggtccgaactaaaaagcacaagaaatggcggccgccttctcctccaccgtcggagctccggcctccaccccgaccaggagcagcttcctcgggaagaagctcaacaagccgcaggtgtccgcggccgtgacctaccatggcaagagctccagcagcaacagcaggttcaaggcgatggctgccaaggaggtggacgagacgaagcagaccgacgaggacaggtggaagggcctggcctacgacatctcggacgaccagcaggacatcaccaggggcaagggcctcgtcgacaacctcttccaggcgcctatgggggacggcacccacgtcgccgtgctcagctcctacgactacatcagccagggccaaaagtcttacaacttcgacaacatgatggatggcttctacatagccaagggcttcatggacaagctcgtcgtccacctctccaagaacttcatgaccctgccaaacatcaaggttcccctcatcctgggtatctggggaggcaaaggccagggaaaatcgttccaatgcgagctggtcttcgccaagatgggcatcacccccatcatgatgagcgccggcgagctggagagcggcaacgccggagagcccgccaagctcatcaggcagcgctaccgtgaggcctccgacctcatcaagaagggcaagatgtcctgcctcttcatcaacgacttggacgccggcgcgggtcgcatgggcggcaccacccagtacacggtgaacaaccagatggtcaacgccaccctgatgaacatcgccgacaaccccaccaacgtgcagctcccggggatgtacaacaaggaggacaacccccgcgtgcccatcatcgtcaccggcaacgacttctccacgctctacgcgccgctcatccgcgacggccgcatggagaagttctactgggcgcccacccgcgaggaccgcatcggcgtctgcaagggcatcttccgcaccgacggcgtcgacgaggagcacgtcgtccagctggtcgacaccttccctggccagtccatcgatttcttcggcgcgctgcgtgcccgggtctacgacgacgaggtccgacggtgggtgagcgagaccggcgtcgagaacatcgccaggaagctcgtcaactccaaggagggcccgcccacgttcgagcagcccaagataacgatcgagaagctcttggagtacggacacatgctggtggcggagcaggagaacgtcaagcgtgtgcagcttgctgacaagtacctcaacgaggctgctcttggtgaagccaacgaggacgccatgaagactggctccttcttcaagtagaaagcaactctttgctattgctagctaggcgcgaggccggcataggatcgaggaggtgaatatatatattacttggatagttttgtaatatataattgcagctgaacgaggacatgcatacatatattcgtctatataatggatcatatatatttcatttc

SEQ ID NO: 32689 - protein, 433 aa, Zea mays subsp. mays
  peptide (1)..(433): Ceres Seq. ID no. 12413800
  misc_feature (156)..(354): Pfam Name: AAA Pfam Description: ATPase family associated with various cellular activities
  misc_feature (1)..(433): NCBI GI NO: 29429152 NR Description: Ribulose bisphosphate carboxylase/ oxygenaseactivase
  misc_feature (1)..(432): NCBI GI NO: 8918359 NR Description: RuBisCO activase large isoform precursor
  misc_feature (1)..(432): NCBI GI NO: 8918361 NR Description: RuBisCO activase small isoform precursor
  misc_feature (1)..(432): NCBI GI NO: 3914603 NR Description: Ribulose bisphosphate carboxylase/ oxygenaseactivase
  misc_feature (1)..(432): NCBI GI NO: 7960277 NR Description: ribulose bisphosphate carboxylase activase B
  misc_feature (1)..(432): NCBI GI NO: 167096 NR Description: ribulose 1
  misc_feature (1)..(432): NCBI GI NO: 12643756 NR Description: Ribulose bisphosphate carboxylase/ oxygenaseactivase A
  misc_feature (1)..(432): NCBI GI NO: 100615 NR Description: ribulose-bisphosphate carboxylase activase (EC6
  misc_feature (1)..(432): NCBI GI NO: 10720253 NR Description: Ribulose bisphosphate carboxylase/ oxygenaseactivase B
  misc_feature (10)..(431): NCBI GI NO: 12620881 NR Description: ribulose-1
MAAAFSSTVGAPASTPTRSSFLGKKLNKPQVSAAVTYHGKSSSSNSRFKAMAAKEVDETKQTDEDRWKGLAYDISDDQQDITRGKGLVDNLFQAPMGDGTHVAVLSSYDYISQGQKSYNFDNMMDGFYIAKGFMDKLVVHLSKNFMTLPNIKVPLILGIWGGKGQGKSFQCELVFAKMGITPIMMSAGELESGNAGEPAKLIRQRYREASDLIKKGKMSCLFINDLDAGAGRMGGTTQYTVNNQMVNATLMNIADNPTNVQLPGMYNKEDNPRVPIIVTGNDFSTLYAPLIRDGRMEKFYWAPTREDRIGVCKGIFRTDGVDEEHVVQLVDTFPGQSIDFFGALRARVYDDEVRRWVSETGVENIARKLVNSKEGPPTFEQPKITIEKLLEYGHMLVAEQENVKRVQLADKYLNEAALGEANEDAMKTGSFFK

SEQ ID NO: 32690 - protein, 383 aa, Zea mays subsp. mays
  peptide (1)..(383): Ceres Seq. ID no. 12413801
  misc_feature (106)..(304): Pfam Name: AAA Pfam Description: ATPase family associated with various cellular activities
  misc_feature (1)..(383): NCBI GI NO: 29429152 NR Description: Ribulose bisphosphate carboxylase/ oxygenaseactivase
  misc_feature (1)..(382): NCBI GI NO: 8918359 NR Description: RuBisCO activase large isoform precursor
  misc_feature (1)..(382): NCBI GI NO: 8918361 NR Description: RuBisCO activase small isoform precursor
  misc_feature (1)..(382): NCBI GI NO: 3914603 NR Description: Ribulose bisphosphate carboxylase/ oxygenaseactivase
  misc_feature (1)..(382): NCBI GI NO: 7960277 NR Description: ribulose bisphosphate carboxylase activase B
  misc_feature (1)..(382): NCBI GI NO: 167096 NR Description: ribulose 1
  misc_feature (1)..(382): NCBI GI NO: 12643756 NR Description: Ribulose bisphosphate carboxylase/ oxygenaseactivase A
  misc_feature (1)..(382): NCBI GI NO: 100615 NR Description: ribulose-bisphosphate carboxylase activase (EC6
  misc_feature (1)..(382): NCBI GI NO: 10720253 NR Description: Ribulose bisphosphate carboxylase/ oxygenaseactivase B
  misc_feature (1)..(381): NCBI GI NO: 12620881 NR Description: ribulose-1
MAAKEVDETKQTDEDRWKGLAYDISDDQQDITRGKGLVDNLFQAPMGDGTHVAVLSSYDYISQGQKSYNFDNMMDGFYIAKGFMDKLVVHLSKNFMTLPNIKVPLILGIWGGKGQGKSFQCELVFAKMGITPIMMSAGELESGNAGEPAKLIRQRYREASDLIKKGKMSCLFINDLDAGAGRMGGTTQYTVNNQMVNATLMNIADNPTNVQLPGMYNKEDNPRVPIIVTGNDFSTLYAPLIRDGRMEKFYWAPTREDRIGVCKGIFRTDGVDEEHVVQLVDTFPGQSIDFFGALRARVYDDEVRRWVSETGVENIARKLVNSKEGPPTFEQPKITIEKLLEYGHMLVAEQENVKRVQLADKYLNEAALGEANEDAMKTGSFFK

SEQ ID NO: 32691 - protein, 338 aa, Zea mays subsp. mays
  peptide (1)..(338): Ceres Seq. ID no. 12413802
  misc_feature (61)..(259): Pfam Name: AAA Pfam Description: ATPase family associated with various cellular activities
  misc_feature (1)..(338): NCBI GI NO: 29429152 NR Description: Ribulose bisphosphate carboxylase/ oxygenaseactivase
  misc_feature (1)..(337): NCBI GI NO: 8918359 NR Description: RuBisCO activase large isoform precursor
  misc_feature (1)..(337): NCBI GI NO: 8918361 NR Description: RuBisCO activase small isoform precursor
  misc_feature (1)..(337): NCBI GI NO: 3914603 NR Description: Ribulose bisphosphate carboxylase/ oxygenaseactivase
  misc_feature (1)..(337): NCBI GI NO: 7960277 NR Description: ribulose bisphosphate carboxylase activase B
  misc_feature (1)..(337): NCBI GI NO: 167096 NR Description: ribulose 1
  misc_feature (1)..(337): NCBI GI NO: 12643756 NR Description: Ribulose bisphosphate carboxylase/ oxygenaseactivase A
  misc_feature (1)..(337): NCBI GI NO: 100615 NR Description: ribulose-bisphosphate carboxylase activase (EC6
  misc_feature (1)..(337): NCBI GI NO: 10720253 NR Description: Ribulose bisphosphate carboxylase/ oxygenaseactivase B
  misc_feature (1)..(336): NCBI GI NO: 12620881 NR Description: ribulose-1
MGDGTHVAVLSSYDYISQGQKSYNFDNMMDGFYIAKGFMDKLVVHLSKNFMTLPNIKVPLILGIWGGKGQGKSFQCELVFAKMGITPIMMSAGELESGNAGEPAKLIRQRYREASDLIKKGKMSCLFINDLDAGAGRMGGTTQYTVNNQMVNATLMNIADNPTNVQLPGMYNKEDNPRVPIIVTGNDFSTLYAPLIRDGRMEKFYWAPTREDRIGVCKGIFRTDGVDEEHVVQLVDTFPGQSIDFFGALRARVYDDEVRRWVSETGVENIARKLVNSKEGPPTFEQPKITIEKLLEYGHMLVAEQENVKRVQLADKYLNEAALGEANEDAMKTGSFFK

SEQ ID NO: 32692 - DNA, 1191 bp, Zea mays subsp. mays
  misc_feature (1)..(1191): Ceres Seq. ID no. 12374274
aatatctcaaaaagcccatcttctcttcctctctcgcagcaccgcctctcaacctccgccgccgctcgcccggggcgtcacccacccgcgcagaaggcccccgccgctcaaactaccggtgccctaaaccccgatattcttcttcgcctccctttcctcctcagcacccaaaccccgaccttcagggttccgccgccatgccgcagggagaccacatcgagcttcaccagaagcgccatggcaagcgcctggaccacgaggagcgcaagcgcaagcgcgaggcgcgcgaggtgcacaggcgctcgaaggacgcccgcaatttgattggtgctaagggcaagaggttcgccaagaaacgctatgctgagaaggcgcagatgaagaagaccctgaaaatgcacgatgaatcaaataagcgacagaaggttgatgatgatgtccaagagggtgctcttcctccgtatctactggatcgtgatcagacacagcgtgctaaggtactcagcaacacaatcaagcaaaagaggaaggaaaaggctggcaaatgggatgttccgctgccaaaggtcagacctgttgctgaagaagaaatgttcaaggtgctacgaactggcaagcgaaaaaccaagcagtggaagagaatggttaccaaagccacttttgttggagctggatttacaaggaaaccaccaaagtatgagcggttcattcgaccaactggtctgcgtttcaccaaagctcatgtgactcacccagaactgaagtgcactttcaaccttgacataatttctgtgaagaaaaacccaaatggtccgatgtacacttctcttggtgttatgacaaggggaacaatcattgaggtaaatgtcagtgagcttggtctggtaactcccgctggaaaagttgtttgggggaaatatgctcaagttacaaacaacccggagaatgatgggtgtatcaatgctgttttgctagtgtagaaccatagtgagattttgtttatggtgatgaatcgtcccatttgtatctgctcttgataagatgctcccttttgaccgatctcatggctattcccaggagtttgttttgcaccgtggtccatgggcgagcattctatatccttgctatgtgcgacaagccgacaaatgacttggctattatagcctgctataaagttgactaatacaaatt

SEQ ID NO: 32693 - protein, 325 aa, Zea mays subsp. mays
  peptide (1)..(325): Ceres Seq. ID no. 12374275
  misc_feature (66)..(302): Pfam Name: Pfam Description:  Ribosomal protein S8e
  misc_feature (66)..(325): NCBI GI NO: 33146852 NR Description: putative TGF
  misc_feature (66)..(325): NCBI GI NO: 15240023 NR Description: putative protein; protein id: At5g06360
  misc_feature (66)..(325): NCBI GI NO: 21553587 NR Description: unknown [Arabidopsis thaliana]
  misc_feature (66)..(325): NCBI GI NO: 28278483 NR Description: Similar to RIKEN cDNA 5730427N09 gene
  misc_feature (66)..(325): NCBI GI NO: 7662677 NR Description: hypothetical protein YR-29
  misc_feature (66)..(325): NCBI GI NO: 34925411 NR Description: TGF beta-inducible nuclear protein 1
  misc_feature (66)..(325): NCBI GI NO: 34924868 NR Description: TGF beta-inducible nuclear protein 1
  misc_feature (66)..(325): NCBI GI NO: 12856931 NR Description: unnamed protein product [Mus musculus]
  misc_feature (66)..(325): NCBI GI NO: 9438133 NR Description: unknown [Ochlerotatus triseriatus]
  misc_feature (66)..(325): NCBI GI NO: 29248956 NR Description: GLP_159_37795_38577 [Giardia lamblia ATCC 50803]
YLKKPIFSSSLAAPPLNLRRRSPGASPTRAEGPRRSNYRCPKPRYSSSPPFPPQHPNPDLQGSAAMPQGDHIELHQKRHGKRLDHEERKRKREAREVHRRSKDARNLIGAKGKRFAKKRYAEKAQMKKTLKMHDESNKRQKVDDDVQEGALPPYLLDRDQTQRAKVLSNTIKQKRKEKAGKWDVPLPKVRPVAEEEMFKVLRTGKRKTKQWKRMVTKATFVGAGFTRKPPKYERFIRPTGLRFTKAHVTHPELKCTFNLDIISVKKNPNGPMYTSLGVMTRGTIIEVNVSELGLVTPAGKVVWGKYAQVTNNPENDGCINAVLLV

SEQ ID NO: 32694 - protein, 260 aa, Zea mays subsp. mays; identical to SEQ ID NO: 28810
  peptide (1)..(260): Ceres Seq. ID no. 12374276
  misc_feature (1)..(237): Pfam Name: Pfam Description:  Ribosomal protein S8e
  misc_feature (1)..(260): NCBI GI NO: 33146852 NR Description: putative TGF
  misc_feature (1)..(260): NCBI GI NO: 15240023 NR Description: putative protein; protein id: At5g06360
  misc_feature (1)..(260): NCBI GI NO: 21553587 NR Description: unknown [Arabidopsis thaliana]
  misc_feature (1)..(260): NCBI GI NO: 28278483 NR Description: Similar to RIKEN cDNA 5730427N09 gene
  misc_feature (1)..(260): NCBI GI NO: 7662677 NR Description: hypothetical protein YR-29
  misc_feature (1)..(260): NCBI GI NO: 34925411 NR Description: TGF beta-inducible nuclear protein 1
  misc_feature (1)..(260): NCBI GI NO: 34924868 NR Description: TGF beta-inducible nuclear protein 1
  misc_feature (1)..(260): NCBI GI NO: 12856931 NR Description: unnamed protein product [Mus musculus]
  misc_feature (1)..(260): NCBI GI NO: 9438133 NR Description: unknown [Ochlerotatus triseriatus]
  misc_feature (1)..(260): NCBI GI NO: 29248956 NR Description: GLP_159_37795_38577 [Giardia lamblia ATCC 50803]

SEQ ID NO: 32695 - protein, 200 aa, Zea mays subsp. mays; identical to SEQ ID NO: 28811
  peptide (1)..(200): Ceres Seq. ID no. 12374277
  misc_feature (1)..(177): Pfam Name: Pfam Description:  Ribosomal protein S8e
  misc_feature (1)..(200): NCBI GI NO: 33146852 NR Description: putative TGF
  misc_feature (1)..(200): NCBI GI NO: 15240023 NR Description: putative protein; protein id: At5g06360
  misc_feature (1)..(200): NCBI GI NO: 21553587 NR Description: unknown [Arabidopsis thaliana]
  misc_feature (1)..(200): NCBI GI NO: 28278483 NR Description: Similar to RIKEN cDNA 5730427N09 gene
  misc_feature (1)..(200): NCBI GI NO: 7662677 NR Description: hypothetical protein YR-29
  misc_feature (1)..(200): NCBI GI NO: 34925411 NR Description: TGF beta-inducible nuclear protein 1
  misc_feature (1)..(200): NCBI GI NO: 34924868 NR Description: TGF beta-inducible nuclear protein 1
  misc_feature (1)..(200): NCBI GI NO: 12856931 NR Description: unnamed protein product [Mus musculus]
  misc_feature (1)..(200): NCBI GI NO: 9438133 NR Description: unknown [Ochlerotatus triseriatus]
  misc_feature (1)..(200): NCBI GI NO: 29248956 NR Description: GLP_159_37795_38577 [Giardia lamblia ATCC 50803]

SEQ ID NO: 32696 - DNA, 997 bp, Zea mays subsp. mays
  misc_feature (1)..(997): Ceres Seq. ID no. 12413811
caggagggagcggatgagatagacaaacagaaagagcccgtgtgcgtgacgcacggacgccgtgactccgccgcaaagagagggagtccacggtctgaagaagcaacggcgacgcccccgacgacgagcatagctgccccgcaaactagcagcgccctcgtcagttccgtctcgttcccaacctctcccggattcgattcgattgacccgtccgctccaaatcgaatctaatcagcagttttggagttgcggaagggagaaagagagaggagagggggcatggatcaggtgctaaacaaggtggggagctactggttcagcaaaagggccagcaaggaaatcgactccatcggcgacgacatcagctcgatctcaagcagcattggagggtcagccaaatggatggtgaacaaaattaaagggaagatgcagaaagcacttccagatctcctcaaggaatatgacatgccagcagggctcttcccacgggacacgactaactatgagttcaatgaagagacaaagaagctgacagtgtacatcccgtcagcctgtgatgttggttacaaggactcgtcagtgctgcggttcttcacctgtgtgaccggctaccttgaaaaggggaagttttccgacatcgagggcatgaagaccaaagtgctggtctggaccaaggtgactgccatcaagaccgagggcccaaaggtccatttcactgcaggcgtgaagaagactcggagccgtgatgcctatgaggtcgtcagagatggtatcaccatagacaagttctagagcatatacctggcatgaaaaatgtgacgcggttattcatatatgcttctctcctctcagttggtacaccgaaattcatacaatatcgtgggctaattctgcatttgtatgaaagtttaatatgcttgacgtgttaatcacactgctagagcatgcgataaatcgcagttggttcattattaggaaattgcattgagctgtaatc

SEQ ID NO: 32697 - protein, 170 aa, Zea mays subsp. mays
  peptide (1)..(170): Ceres Seq. ID no. 12413812
  misc_feature (32)..(169): Pfam Name: Pfam Description:  Protein of unknown function, DUF538
  misc_feature (1)..(170): NCBI GI NO: 34914210 NR Description: OSJNBb0049O23.18
  misc_feature (1)..(170): NCBI GI NO: 18398279 NR Description: expressed protein; protein id: At3g08890
  misc_feature (1)..(170): NCBI GI NO: 40642817 NR Description: cp protein [Celosia cristata]
  misc_feature (1)..(170): NCBI GI NO: 15240103 NR Description: putative protein; protein id: At5g37070.1
  misc_feature (1)..(170): NCBI GI NO: 15241019 NR Description: putative protein; protein id: At5g01610
  misc_feature (1)..(170): NCBI GI NO: 28466909 NR Description: At5g01610 [Arabidopsis thaliana]
  misc_feature (7)..(167): NCBI GI NO: 21553803 NR Description: unknown [Arabidopsis thaliana]
  misc_feature (7)..(167): NCBI GI NO: 18395537 NR Description: expressed protein; protein id: At2g03350
  misc_feature (57)..(168): NCBI GI NO: 18379014 NR Description: Expressed protein; protein id: At1g02816
  misc_feature (56)..(167): NCBI GI NO: 6041854 NR Description: unknown protein [Arabidopsis thaliana]
MDQVLNKVGSYWFSKRASKEIDSIGDDISSISSSIGGSAKWMVNKIKGKMQKALPDLLKEYDMPAGLFPRDTTNYEFNEETKKLTVYIPSACDVGYKDSSVLRFFTCVTGYLEKGKFSDIEGMKTKVLVWTKVTAIKTEGPKVHFTAGVKKTRSRDAYEVVRDGITIDKF

SEQ ID NO: 32698 - protein, 129 aa, Zea mays subsp. mays
  peptide (1)..(129): Ceres Seq. ID no. 12413813
  misc_feature (1)..(128): Pfam Name: Pfam Description:  Protein of unknown function, DUF538
  misc_feature (1)..(129): NCBI GI NO: 34914210 NR Description: OSJNBb0049O23.18
  misc_feature (1)..(129): NCBI GI NO: 18398279 NR Description: expressed protein; protein id: At3g08890
  misc_feature (1)..(129): NCBI GI NO: 40642817 NR Description: cp protein [Celosia cristata]
  misc_feature (1)..(129): NCBI GI NO: 15240103 NR Description: putative protein; protein id: At5g37070.1
  misc_feature (1)..(129): NCBI GI NO: 15241019 NR Description: putative protein; protein id: At5g01610
  misc_feature (1)..(129): NCBI GI NO: 28466909 NR Description: At5g01610 [Arabidopsis thaliana]
  misc_feature (1)..(126): NCBI GI NO: 21553803 NR Description: unknown [Arabidopsis thaliana]
  misc_feature (1)..(126): NCBI GI NO: 18395537 NR Description: expressed protein; protein id: At2g03350
  misc_feature (16)..(127): NCBI GI NO: 18379014 NR Description: Expressed protein; protein id: At1g02816
  misc_feature (15)..(126): NCBI GI NO: 6041854 NR Description: unknown protein [Arabidopsis thaliana]
MVNKIKGKMQKALPDLLKEYDMPAGLFPRDTTNYEFNEETKKLTVYIPSACDVGYKDSSVLRFFTCVTGYLEKGKFSDIEGMKTKVLVWTKVTAIKTEGPKVHFTAGVKKTRSRDAYEVVRDGITIDKF

SEQ ID NO: 32699 - protein, 121 aa, Zea mays subsp. mays
  peptide (1)..(121): Ceres Seq. ID no. 12413814
  misc_feature (1)..(120): Pfam Name: Pfam Description:  Protein of unknown function, DUF538
  misc_feature (1)..(121): NCBI GI NO: 34914210 NR Description: OSJNBb0049O23.18
  misc_feature (1)..(121): NCBI GI NO: 18398279 NR Description: expressed protein; protein id: At3g08890
  misc_feature (1)..(121): NCBI GI NO: 40642817 NR Description: cp protein [Celosia cristata]
  misc_feature (1)..(121): NCBI GI NO: 15240103 NR Description: putative protein; protein id: At5g37070.1
  misc_feature (1)..(121): NCBI GI NO: 15241019 NR Description: putative protein; protein id: At5g01610
  misc_feature (1)..(121): NCBI GI NO: 28466909 NR Description: At5g01610 [Arabidopsis thaliana]
  misc_feature (1)..(118): NCBI GI NO: 21553803 NR Description: unknown [Arabidopsis thaliana]
  misc_feature (1)..(118): NCBI GI NO: 18395537 NR Description: expressed protein; protein id: At2g03350
  misc_feature (8)..(119): NCBI GI NO: 18379014 NR Description: Expressed protein; protein id: At1g02816
  misc_feature (7)..(118): NCBI GI NO: 6041854 NR Description: unknown protein [Arabidopsis thaliana]
MQKALPDLLKEYDMPAGLFPRDTTNYEFNEETKKLTVYIPSACDVGYKDSSVLRFFTCVTGYLEKGKFSDIEGMKTKVLVWTKVTAIKTEGPKVHFTAGVKKTRSRDAYEVVRDGITIDKF

SEQ ID NO: 32700 - DNA, 1253 bp, Zea mays subsp. mays
  misc_feature (1)..(1253): Ceres Seq. ID no. 12374278
acgctggccccccgccccgccgcgggatcaaatacgccgcctccgcccgtccactccctcgccgcccccgtctcctctcctctcctctcccccgcatccacggccgcaggccgcagccagccactcgacgatctagtcgtctctctctccccgctctgccgcctcgctgccgcggcttcccgtcggctggaggatgaaggtcacggtcgtgtcccggagcggccgggaggtcgtcaagggcggcatcgacctcaaggactcggccaaggtcgcggacctgcaggaggccatccatgccaggactaagaagtattatccttctaggcagcggctcaccctcccccttcaacctggaaaaggcgggaagccagttgtcctcagtccgaaggccagcctgctagaatactgcgagaagggttctgggtcactgacagtggtcttcaaagatttagggccacaggtctactacagcacactgttcttcttcgagtacctgggtcctctcatcatctaccccatgttctactatctgcctgtctacaaatacttcgggtacgagggggagcgggccatgcaccctgtccagacctacgccatgtactactggtgcttccactacttcaagcggatcatggagacattcttcgtgcaccgcttcagccacgcgacgtcgccgctctcgaacgtcttcaggaactgtgcctactactggaccttcggcgcctacattgcttactactgcaaccacccgctgtacaccccagtgagtgatctgcagatgaagattgggtttggttttggggtcgtctgccaggtcgcgaacttctactgccacatcctgctgcggaacctcaggagcccaagcggcagcggcgggtaccagatcccccgcggtttcttgttcaacatcgtgacctgcgccaattacaccaccgagatctatcagtgggtcggcttcaacatcgccacgcagaccgtggcaggttacgtcttccttgtcgtggcggcaggcatcatgaccaactgggcgctcggcaagcacagccgtctgaagaagctgtttgacggcaaggatgggaggcccaagtaccctcgccggtgggtgattctccctccgttcctgtgaagaggtggtggtggtcggcctattgtgattcgatgtctacagacagttgtactgtactaatcgtgcctgtttagcggttgaacttggattccgttgtccgaaatttctaatccgaaagatggattcc

SEQ ID NO: 32701 - protein, 310 aa, Zea mays subsp. mays; identical to SEQ ID NO: 24079
  peptide (1)..(310): Ceres Seq. ID no. 12374279
  misc_feature (158)..(310): Pfam Name: Pfam Description:  3-oxo-5-alpha-steroid 4-dehydrogenase
  misc_feature (1)..(310): NCBI GI NO: 34895848 NR Description: putative glycoprotein
  misc_feature (1)..(310): NCBI GI NO: 15233250 NR Description: synaptic glycoprotein SC2-like protein
  misc_feature (1)..(310): NCBI GI NO: 25004880 NR Description: steroid 5-alpha reductase [Cicer arietinum]
  misc_feature (38)..(310): NCBI GI NO: 39590267 NR Description: Hypothetical protein CBG11196
  misc_feature (38)..(310): NCBI GI NO: 17531783 NR Description: Synaptic glycoprotein SC2 (35.1 kD)
  misc_feature (24)..(291): NCBI GI NO: 13111809 NR Description: Unknown (protein for IMAGE:2901253) [Homo sapiens]
  misc_feature (24)..(291): NCBI GI NO: 24475816 NR Description: glycoprotein, synaptic 2
  misc_feature (24)..(291): NCBI GI NO: 30585427 NR Description: Homo sapiens glycoprotein, synaptic 2
  misc_feature (24)..(310): NCBI GI NO: 33585860 NR Description: Glycoprotein, synaptic 2 [Xenopus laevis]
  misc_feature (20)..(291): NCBI GI NO: 19924091 NR Description: synaptic glycoprotein SC2 [Rattus norvegicus]

SEQ ID NO: 32702 - protein, 202 aa, Zea mays subsp. mays; identical to SEQ ID NO: 24080
  peptide (1)..(202): Ceres Seq. ID no. 12374280
  misc_feature (50)..(202): Pfam Name: Pfam Description:  3-oxo-5-alpha-steroid 4-dehydrogenase
  misc_feature (1)..(202): NCBI GI NO: 34895848 NR Description: putative glycoprotein
  misc_feature (1)..(202): NCBI GI NO: 15233250 NR Description: synaptic glycoprotein SC2-like protein
  misc_feature (1)..(202): NCBI GI NO: 25004880 NR Description: steroid 5-alpha reductase [Cicer arietinum]
  misc_feature (1)..(202): NCBI GI NO: 39590267 NR Description: Hypothetical protein CBG11196
  misc_feature (1)..(202): NCBI GI NO: 17531783 NR Description: Synaptic glycoprotein SC2 (35.1 kD)
  misc_feature (1)..(183): NCBI GI NO: 13111809 NR Description: Unknown (protein for IMAGE:2901253) [Homo sapiens]
  misc_feature (1)..(183): NCBI GI NO: 24475816 NR Description: glycoprotein, synaptic 2
  misc_feature (1)..(183): NCBI GI NO: 30585427 NR Description: Homo sapiens glycoprotein, synaptic 2
  misc_feature (1)..(202): NCBI GI NO: 33585860 NR Description: Glycoprotein, synaptic 2 [Xenopus laevis]
  misc_feature (1)..(183): NCBI GI NO: 19924091 NR Description: synaptic glycoprotein SC2 [Rattus norvegicus]

SEQ ID NO: 32703 - protein, 184 aa, Zea mays subsp. mays; identical to SEQ ID NO: 24081
  peptide (1)..(184): Ceres Seq. ID no. 12374281
  misc_feature (32)..(184): Pfam Name: Pfam Description:  3-oxo-5-alpha-steroid 4-dehydrogenase
  misc_feature (1)..(184): NCBI GI NO: 34895848 NR Description: putative glycoprotein
  misc_feature (1)..(184): NCBI GI NO: 15233250 NR Description: synaptic glycoprotein SC2-like protein
  misc_feature (1)..(184): NCBI GI NO: 25004880 NR Description: steroid 5-alpha reductase [Cicer arietinum]
  misc_feature (1)..(184): NCBI GI NO: 39590267 NR Description: Hypothetical protein CBG11196
  misc_feature (1)..(184): NCBI GI NO: 17531783 NR Description: Synaptic glycoprotein SC2 (35.1 kD)
  misc_feature (1)..(165): NCBI GI NO: 13111809 NR Description: Unknown (protein for IMAGE:2901253) [Homo sapiens]
  misc_feature (1)..(165): NCBI GI NO: 24475816 NR Description: glycoprotein, synaptic 2
  misc_feature (1)..(165): NCBI GI NO: 30585427 NR Description: Homo sapiens glycoprotein, synaptic 2
  misc_feature (1)..(184): NCBI GI NO: 33585860 NR Description: Glycoprotein, synaptic 2 [Xenopus laevis]
  misc_feature (1)..(165): NCBI GI NO: 19924091 NR Description: synaptic glycoprotein SC2 [Rattus norvegicus]

SEQ ID NO: 32704 - DNA, 1228 bp, Zea mays subsp. mays
  misc_feature (1)..(1228): Ceres Seq. ID no. 12353392
aaacggacgcagattgccgttcatgatccggctctttaaaataacgcagtagaaacggagagcgatctgaacacggtctgcagatttcaacgaggtgtggtgtgagcgcgatgagcgttcatggcccgtaatccgacgggatatccgacatttgtgccgtatccagcgcatgccgacaatccgtccggagatccctctccctctctctcatggcattcatgttttaaaccaaccaagccgcctctgctgctccgatccgtctccctctgttccagcagtcaggatggaggccgccgcaacacttccgccgctgctgctcctcatcctccttgctgcgactgcggtgccggctccgtcgcacgcatggggagtcgacggccatctcatggtctgccagatcgcacagggccgtctgagtggcgcggcggccgcggcggtgaaggacctgctgccgtcctacgccggcaacaacctgagcagcctctgctcctgggcggacgacgtcaagttcaggtacccctggtcgtcgccgctccactacatcgacacccccgacggcctctgcacctaccgctacgacagggactgcaaggacgaggacggcgtcgagggccggtgcgtcgcgggcgccatcaacaactacacctcccagctcctcgcctaccggagatcttcacccactgagtataacctaacgcaagcgctcctcttcctctcgcacttcatcggagacatacaccagccacttcacgtggggttcacctccgacaaaggagggaacaccattgacgtccactggtacacaaggaagactgttctacaccatgtttgggacgccagcatcatccagacggccgaagatgacttctacggcgacagcgtagccgggtatatcgacaccctgaagaaaaatataacgcagggagaatggtcggagcaagtgtctagctgggaagcgtgcggtacgaaccagactgcatgtccagacatatatgcgtctgagagcgtcgctgcagcatgcgactgggcgtacaagggagtcgaggaagactcaaccctacaagatccctatttctccagcaggctgccggtagtcagcctgaggctagcgcaaggcggcgtcagattagccgccactctgaacaggatttttggataatggtggagtacatttactatacatggaactattatggaattaaatgatatatataactattggtttccc

SEQ ID NO: 32705 - protein, 329 aa, Zea mays subsp. mays
  peptide (1)..(329): Ceres Seq. ID no. 12353393
  misc_feature (174)..(328): Pfam Name: Pfam Description:  S1/P1 Nuclease
  misc_feature (174)..(328): NCBI GI NO: 34895512 NR Description: putative bifunctional nuclease
  misc_feature (43)..(81): NCBI GI NO: 34895512 NR Description: putative bifunctional nuclease
  misc_feature (48)..(329): NCBI GI NO: 4099833 NR Description: bifunctional nuclease [Zinnia elegans]
  misc_feature (48)..(329): NCBI GI NO: 15221343 NR Description: putative bifunctional nuclease
  misc_feature (48)..(329): NCBI GI NO: 21554516 NR Description: putative bifunctional nuclease
  misc_feature (33)..(329): NCBI GI NO: 9558456 NR Description: unnamed protein product
  misc_feature (33)..(329): NCBI GI NO: 34895514 NR Description: putative bifunctional nuclease
  misc_feature (42)..(328): NCBI GI NO: 38345900 NR Description: OSJNBa0060D06.10
  misc_feature (52)..(328): NCBI GI NO: 3551956 NR Description: senescence-associated protein 6
  misc_feature (50)..(329): NCBI GI NO: 7229711 NR Description: CEL I mismatch endonuclease [Apium graveolens]
MPTIRPEIPLPLSHGIHVLNQPSRLCCSDPSPSVPAVRMEAAATLPPLLLLILLAATAVPAPSHAWGVDGHLMVCQIAQGRLSGAAAAAVKDLLPSYAGNNLSSLCSWADDVKFRYPWSSPLHYIDTPDGLCTYRYDRDCKDEDGVEGRCVAGAINNYTSQLLAYRRSSPTEYNLTQALLFLSHFIGDIHQPLHVGFTSDKGGNTIDVHWYTRKTVLHHVWDASIIQTAEDDFYGDSVAGYIDTLKKNITQGEWSEQVSSWEACGTNQTACPDIYASESVAAACDWAYKGVEEDSTLQDPYFSSRLPVVSLRLAQGGVRLAATLNRIFG

SEQ ID NO: 32706 - protein, 291 aa, Zea mays subsp. mays
  peptide (1)..(291): Ceres Seq. ID no. 12353394
  misc_feature (136)..(290): Pfam Name: Pfam Description:  S1/P1 Nuclease
  misc_feature (136)..(290): NCBI GI NO: 34895512 NR Description: putative bifunctional nuclease
  misc_feature (5)..(43): NCBI GI NO: 34895512 NR Description: putative bifunctional nuclease
  misc_feature (10)..(291): NCBI GI NO: 4099833 NR Description: bifunctional nuclease [Zinnia elegans]
  misc_feature (10)..(291): NCBI GI NO: 15221343 NR Description: putative bifunctional nuclease
  misc_feature (10)..(291): NCBI GI NO: 21554516 NR Description: putative bifunctional nuclease
  misc_feature (1)..(291): NCBI GI NO: 9558456 NR Description: unnamed protein product
  misc_feature (1)..(291): NCBI GI NO: 34895514 NR Description: putative bifunctional nuclease
  misc_feature (4)..(290): NCBI GI NO: 38345900 NR Description: OSJNBa0060D06.10
  misc_feature (14)..(290): NCBI GI NO: 3551956 NR Description: senescence-associated protein 6
  misc_feature (12)..(291): NCBI GI NO: 7229711 NR Description: CEL I mismatch endonuclease [Apium graveolens]
MEAAATLPPLLLLILLAATAVPAPSHAWGVDGHLMVCQIAQGRLSGAAAAAVKDLLPSYAGNNLSSLCSWADDVKFRYPWSSPLHYIDTPDGLCTYRYDRDCKDEDGVEGRCVAGAINNYTSQLLAYRRSSPTEYNLTQALLFLSHFIGDIHQPLHVGFTSDKGGNTIDVHWYTRKTVLHHVWDASIIQTAEDDFYGDSVAGYIDTLKKNITQGEWSEQVSSWEACGTNQTACPDIYASESVAAACDWAYKGVEEDSTLQDPYFSSRLPVVSLRLAQGGVRLAATLNRIFG

SEQ ID NO: 32707 - protein, 257 aa, Zea mays subsp. mays
  peptide (1)..(257): Ceres Seq. ID no. 12353395
  misc_feature (102)..(256): Pfam Name: Pfam Description:  S1/P1 Nuclease
  misc_feature (102)..(256): NCBI GI NO: 34895512 NR Description: putative bifunctional nuclease
  misc_feature (1)..(257): NCBI GI NO: 4099833 NR Description: bifunctional nuclease [Zinnia elegans]
  misc_feature (1)..(257): NCBI GI NO: 15221343 NR Description: putative bifunctional nuclease
  misc_feature (1)..(257): NCBI GI NO: 21554516 NR Description: putative bifunctional nuclease
  misc_feature (1)..(257): NCBI GI NO: 9558456 NR Description: unnamed protein product
  misc_feature (1)..(257): NCBI GI NO: 34895514 NR Description: putative bifunctional nuclease
  misc_feature (1)..(256): NCBI GI NO: 38345900 NR Description: OSJNBa0060D06.10
  misc_feature (1)..(256): NCBI GI NO: 3551956 NR Description: senescence-associated protein 6
  misc_feature (1)..(257): NCBI GI NO: 7229711 NR Description: CEL I mismatch endonuclease [Apium graveolens]
  misc_feature (1)..(256): NCBI GI NO: 4099835 NR Description: bifunctional nuclease [Zinnia elegans]
MVCQIAQGRLSGAAAAAVKDLLPSYAGNNLSSLCSWADDVKFRYPWSSPLHYIDTPDGLCTYRYDRDCKDEDGVEGRCVAGAINNYTSQLLAYRRSSPTEYNLTQALLFLSHFIGDIHQPLHVGFTSDKGGNTIDVHWYTRKTVLHHVWDASIIQTAEDDFYGDSVAGYIDTLKKNITQGEWSEQVSSWEACGTNQTACPDIYASESVAAACDWAYKGVEEDSTLQDPYFSSRLPVVSLRLAQGGVRLAATLNRIFG

SEQ ID NO: 32708 - DNA, 541 bp, Zea mays subsp. mays
  misc_feature (1)..(541): Ceres Seq. ID no. 13564049
aagacgatacaggaatgtgatggacatgaatgcggggataggtggctttgcagctgcattgatgaagtaccctctttgggtgatgaatgttgtgccttcaggcttggcccatgacaccctgggtgttatttacgaacgagggtttattggcacgtaccatgattggtgtgaggctttctcaacgtacccgaggacctacgacctcatccatgctgataaagttttcagcagttaccaggacaggtgtgacataacgtacatcctactggagatggaccgaattctaaggcctgaggggactgtgatcatcagggacaacgtagaggtgttggtgaaggtacaagctatcactggaggcatgaggtggaagagccaaatcatggaccatgagtccggtccattcaacaccgacaagatcctagtggctgtcaagacttactggaccgggaagctcgtgcaaaaacaataatcgtcgccttgttactgtttttcgtctgcgaaaatgtaggcatgacttgcctgtcagttctgtcttcattgc

SEQ ID NO: 32709 - protein, 155 aa, Zea mays subsp. mays
  peptide (1)..(155): Ceres Seq. ID no. 13564050
  misc_feature (2)..(144): Pfam Name: Pfam Description:  Putative methyltransferase
  misc_feature (2)..(155): NCBI GI NO: 24413975 NR Description: hypothetical protein~similar to Oryza sativachromosome 10
  misc_feature (2)..(148): NCBI GI NO: 37535962 NR Description: unknown protein
  misc_feature (2)..(149): NCBI GI NO: 9665165 NR Description: Unknown Protein [Arabidopsis thaliana]
  misc_feature (2)..(149): NCBI GI NO: 18398763 NR Description: dehydration-induced protein family
  misc_feature (2)..(150): NCBI GI NO: 15235080 NR Description: dehydration-induced protein family
  misc_feature (7)..(149): NCBI GI NO: 21617988 NR Description: unknown [Arabidopsis thaliana]
  misc_feature (2)..(148): NCBI GI NO: 34898042 NR Description: OSJNBa0038F22.19
  misc_feature (2)..(148): NCBI GI NO: 38567915 NR Description: OSJNBa0088I22.11
  misc_feature (2)..(155): NCBI GI NO: 6752888 NR Description: unknown [Malus x domestica]
  misc_feature (2)..(147): NCBI GI NO: 18396075 NR Description: dehydration-induced protein family
RRYRNVMDMNAGIGGFAAALMKYPLWVMNVVPSGLAHDTLGVIYERGFIGTYHDWCEAFSTYPRTYDLIHADKVFSSYQDRCDITYILLEMDRILRPEGTVIIRDNVEVLVKVQAITGGMRWKSQIMDHESGPFNTDKILVAVKTYWTGKLVQKQ

SEQ ID NO: 32710 - protein, 149 aa, Zea mays subsp. mays
  peptide (1)..(149): Ceres Seq. ID no. 13564051
  misc_feature (1)..(138): Pfam Name: Pfam Description:  Putative methyltransferase
  misc_feature (1)..(149): NCBI GI NO: 24413975 NR Description: hypothetical protein~similar to Oryza sativachromosome 10
  misc_feature (1)..(142): NCBI GI NO: 37535962 NR Description: unknown protein
  misc_feature (1)..(143): NCBI GI NO: 9665165 NR Description: Unknown Protein [Arabidopsis thaliana]
  misc_feature (1)..(143): NCBI GI NO: 18398763 NR Description: dehydration-induced protein family
  misc_feature (1)..(144): NCBI GI NO: 15235080 NR Description: dehydration-induced protein family
  misc_feature (1)..(143): NCBI GI NO: 21617988 NR Description: unknown [Arabidopsis thaliana]
  misc_feature (1)..(142): NCBI GI NO: 34898042 NR Description: OSJNBa0038F22.19
  misc_feature (1)..(142): NCBI GI NO: 38567915 NR Description: OSJNBa0088I22.11
  misc_feature (1)..(149): NCBI GI NO: 6752888 NR Description: unknown [Malus x domestica]
  misc_feature (1)..(141): NCBI GI NO: 18396075 NR Description: dehydration-induced protein family
MDMNAGIGGFAAALMKYPLWVMNVVPSGLAHDTLGVIYERGFIGTYHDWCEAFSTYPRTYDLIHADKVFSSYQDRCDITYILLEMDRILRPEGTVIIRDNVEVLVKVQAITGGMRWKSQIMDHESGPFNTDKILVAVKTYWTGKLVQKQ

SEQ ID NO: 32711 - protein, 147 aa, Zea mays subsp. mays
  peptide (1)..(147): Ceres Seq. ID no. 13564052
  misc_feature (1)..(136): Pfam Name: Pfam Description:  Putative methyltransferase
  misc_feature (1)..(147): NCBI GI NO: 24413975 NR Description: hypothetical protein~similar to Oryza sativachromosome 10
  misc_feature (1)..(140): NCBI GI NO: 37535962 NR Description: unknown protein
  misc_feature (1)..(141): NCBI GI NO: 9665165 NR Description: Unknown Protein [Arabidopsis thaliana]
  misc_feature (1)..(141): NCBI GI NO: 18398763 NR Description: dehydration-induced protein family
  misc_feature (1)..(142): NCBI GI NO: 15235080 NR Description: dehydration-induced protein family
  misc_feature (1)..(141): NCBI GI NO: 21617988 NR Description: unknown [Arabidopsis thaliana]
  misc_feature (1)..(140): NCBI GI NO: 34898042 NR Description: OSJNBa0038F22.19
  misc_feature (1)..(140): NCBI GI NO: 38567915 NR Description: OSJNBa0088I22.11
  misc_feature (1)..(147): NCBI GI NO: 6752888 NR Description: unknown [Malus x domestica]
  misc_feature (1)..(139): NCBI GI NO: 18396075 NR Description: dehydration-induced protein family
MNAGIGGFAAALMKYPLWVMNVVPSGLAHDTLGVIYERGFIGTYHDWCEAFSTYPRTYDLIHADKVFSSYQDRCDITYILLEMDRILRPEGTVIIRDNVEVLVKVQAITGGMRWKSQIMDHESGPFNTDKILVAVKTYWTGKLVQKQ

SEQ ID NO: 32712 - DNA, 1307 bp, Zea mays subsp. mays
  misc_feature (1)..(1307): Ceres Seq. ID no. 12361396
agaagccccctgtgccttgctcctcggtgtttcctccagatagtagtgtttcctcagtggactagtgtgaagctgtgcttagcgtagcggaagggaggaaggacaaggcaaggcaactgatggcggcgggcggcggaggcggctcggcggcgccgttcgtgtggaagacgtacacgatggtggaggaccccgggacggcaggggtgatcggctggggcagcggcaacaacagcttcgtcgtcgccgaccccttcgtcttctcgcagacgctgctccccgcgcacttcaagcacaacaacttctccagcttcgtccgccagctcaacacctatggcttccgcaaggttgatccggaccggtgggagttcgcccacgcgtcgttcctgcgcggccagacgcacctcctgcgcaacatcgtccgccgcggcagcagcgccgcccggtgccggaggcggaaagaggaaggacgccagccccacggagctggcctccggggacgacatgaccatggtggccacggaggtggtgcgcctcaagcaagagcagcgcgccatcgacgaccgcgtcgcctccatgtggcgccgcgtgcaggagacggagcgcaggcccaagcagatgctcgcgttcctcctcaaggtcgtcggcgaccgcgacaggctgcaccgcctcgtcggcgacgcccccgtgccagataacgggttcgcctccggcggtgccgccgagccgcccgccgcggaggtcggcgagaagcgggccaggctgctgctcgacggtgacagcatggtggcgctcggtcccgaggccgtcgacttcgccgggttctacagcggcggcggtgcgttcggcgatgttgccgtggatgctgccgctgggtcccgcggaggcgggttctcgtttgcgttcggcgtggacgcggggtactgaatgacgagcaggcgccgccattgtcagcagcttggcccgcttatgctgctgtcgagcttcctgccaatgccattgcgctgagcggcggcagccgtcacatggaagcatggcaggggatggatgataatgatgttaagttctatccctgctacatggataggatgtgtgtctgatgctgcttttcgtggatctatatgggcggggagcgactactccgtcgagatctaaaaataaggggatatactgtcatggagtgtgaccttcgaagttcccaatatgagtaggtttgatgttgtacatgaccagtgcagcagcactaatatttcaatctcctgcggatacgcagctggaaaattggcatcgctattatttagcccttttct

SEQ ID NO: 32713 - protein, 197 aa, Zea mays subsp. mays
  peptide (1)..(197): Ceres Seq. ID no. 12361397
  misc_feature (61)..(114): Pfam Name: Pfam Description:  HSF-type DNA-binding
  misc_feature (43)..(162): NCBI GI NO: 34910182 NR Description: putative heat shock transcription factor
  misc_feature (61)..(114): NCBI GI NO: 15230127 NR Description: heat shock transcription factor HSF1, putative
  misc_feature (57)..(104): NCBI GI NO: 11386827 NR Description: Heat shock factor protein HSF8
  misc_feature (57)..(127): NCBI GI NO: 729775 NR Description: HEAT SHOCK FACTOR PROTEIN HSF8
  misc_feature (57)..(113): NCBI GI NO: 37534406 NR Description: putative auxin-induced protein
  misc_feature (57)..(114): NCBI GI NO: 28971956 NR Description: putative heat shock transcription factor
  misc_feature (57)..(114): NCBI GI NO: 33087081 NR Description: heat stress protein
  misc_feature (57)..(114): NCBI GI NO: 27261140 NR Description: HSF3 DNA-binding domain/ VP16 activation domainfusion
  misc_feature (57)..(106): NCBI GI NO: 15225255 NR Description: putative heat shock transcription factor
  misc_feature (57)..(114): NCBI GI NO: 30686034 NR Description: heat shock transcription factor 3 (HSF3)
MASARLIRTGGSSPTRRSCAARRTSCATSSAAAAAPPGAGGGKRKDASPTELASGDDMTMVATEVVRLKQEQRAIDDRVASMWRRVQETERRPKQMLAFLLKVVGDRDRLHRLVGDAPVPDNGFASGGAAEPPAAEVGEKRARLLLDGDSMVALGPEAVDFAGFYSGGGAFGDVAVDAAAGSRGGGFSFAFGVDAGY

SEQ ID NO: 32714 - protein, 191 aa, Zea mays subsp. mays
  peptide (1)..(191): Ceres Seq. ID no. 12361398
  misc_feature (11)..(116): Pfam Name: Pfam Description:  HSF-type DNA-binding
  misc_feature (1)..(121): NCBI GI NO: 34910182 NR Description: putative heat shock transcription factor
  misc_feature (11)..(116): NCBI GI NO: 15230127 NR Description: heat shock transcription factor HSF1, putative
  misc_feature (12)..(121): NCBI GI NO: 11386827 NR Description: Heat shock factor protein HSF8
  misc_feature (12)..(121): NCBI GI NO: 729775 NR Description: HEAT SHOCK FACTOR PROTEIN HSF8
  misc_feature (12)..(102): NCBI GI NO: 37534406 NR Description: putative auxin-induced protein
  misc_feature (12)..(102): NCBI GI NO: 28971956 NR Description: putative heat shock transcription factor
  misc_feature (12)..(102): NCBI GI NO: 33087081 NR Description: heat stress protein
  misc_feature (9)..(105): NCBI GI NO: 27261140 NR Description: HSF3 DNA-binding domain/ VP16 activation domainfusion
  misc_feature (12)..(102): NCBI GI NO: 15225255 NR Description: putative heat shock transcription factor
  misc_feature (9)..(105): NCBI GI NO: 30686034 NR Description: heat shock transcription factor 3 (HSF3)
MAAGGGGGSAAPFVWKTYTMVEDPGTAGVIGWGSGNNSFVVADPFVFSQTLLPAHFKHNNFSSFVRQLNTYGFRKVDPDRWEFAHASFLRGQTHLLRNIVRRGSSAARCRRRKEEGRQPHGAGLRGRHDHGGHGGGAPQARAARHRRPRRLHVAPRAGDGAQAQADARVPPQGRRRPRQAAPPRRRRPRAR

SEQ ID NO: 32715 - protein, 172 aa, Zea mays subsp. mays
  peptide (1)..(172): Ceres Seq. ID no. 12361399
  misc_feature (1)..(97): Pfam Name: Pfam Description:  HSF-type DNA-binding
  misc_feature (1)..(102): NCBI GI NO: 34910182 NR Description: putative heat shock transcription factor
  misc_feature (1)..(97): NCBI GI NO: 15230127 NR Description: heat shock transcription factor HSF1, putative
  misc_feature (1)..(102): NCBI GI NO: 11386827 NR Description: Heat shock factor protein HSF8
  misc_feature (1)..(102): NCBI GI NO: 729775 NR Description: HEAT SHOCK FACTOR PROTEIN HSF8
  misc_feature (1)..(83): NCBI GI NO: 37534406 NR Description: putative auxin-induced protein
  misc_feature (1)..(83): NCBI GI NO: 28971956 NR Description: putative heat shock transcription factor
  misc_feature (1)..(83): NCBI GI NO: 33087081 NR Description: heat stress protein
  misc_feature (1)..(86): NCBI GI NO: 27261140 NR Description: HSF3 DNA-binding domain/ VP16 activation domainfusion
  misc_feature (1)..(83): NCBI GI NO: 15225255 NR Description: putative heat shock transcription factor
  misc_feature (1)..(86): NCBI GI NO: 30686034 NR Description: heat shock transcription factor 3 (HSF3)
MVEDPGTAGVIGWGSGNNSFVVADPFVFSQTLLPAHFKHNNFSSFVRQLNTYGFRKVDPDRWEFAHASFLRGQTHLLRNIVRRGSSAARCRRRKEEGRQPHGAGLRGRHDHGGHGGGAPQARAARHRRPRRLHVAPRAGDGAQAQADARVPPQGRRRPRQAAPPRRRRPRAR

SEQ ID NO: 32716 - DNA, 1367 bp, Zea mays subsp. mays
  misc_feature (1)..(1367): Ceres Seq. ID no. 12341058
agcagtctcgatggccgccgccgactcctccccgctccacatcgtcattttcccttggctcgcgttcggccacttgatccccggcctcgagttcgccgagcgcctcgctcatcgacttggtggccctcccgttcccgcgcattgacggcctccccgatggcgccgaggccactagcgacctcccgcccggcacggccgagctccacgtgcaggccatggaccgcctcgccccggccttctccgccttcctcggtgccgcctgcgccgacgggagcgaccgtaaggtggactgggtgctcctcgacaacttccacgcgtccatggcggacgtcgccagcgagcacaaggttccctgcatactgaacatgccctactcctcggcgacgacagaggatttcggcattccagacccgtcggttctaccaatgttccggccatttgtcgagaccttcaagagatgcaaagtcatcgctgctcgtagcagcttcgagttggaaccggagtccctgcctctcatgacaaagatcctcgggaagccggtcatccccgtgggcctacttcctccggcgcccgccggaggcaacacgcagcgcgacgacagcgcagccctgtcgtggctcgacgagcagccgtccaagtccgtggtctacgtcgccttcgggagcgagtacccgatgaccgtcaagcagctgcacgagatcgcgcgcgggctggagctcgccgggacgcgcttcctctgggccctcaagaggcctagcgtcgcccaccccgacgaggacctcctgccgccaggtttcgaggagcgcacgcgcggccgtggctccgtcgtcacgggctgggttcctcagaccagcatactggggcatggcgccgtcgccgcgttcatgatgcactgcggctggggctccaccatcgaggcgcttcagtacggccatcctctggtcatgatgccagttctcgtcgaccacctgtccaccgcgcgggtgatggagcagcggaaggtcggagtcaaggtgcggaaggagaagagtgacgaagcgttccttggtgacaacatcgccacagcgatacgggctgtcatgtgcgaagaagagagcaagaggatctttgtggccaatgctaagaggatgcaggagattgtggcagacgacgagtgccacaagaggtacatagacgaattcgttcagagcctgagaacctacaagaactgaaacatgcatggtattggtcagtgcactcagcatacttggcattggcgttacacaagtgattcgctggactccagcttatacgatgtatcttattttgctgcaatatgcaactttatcattgtttggttgtaaaaagatttgaatttgtttctcgtg

SEQ ID NO: 32717 - protein, 331 aa, Zea mays subsp. mays
  peptide (1)..(331): Ceres Seq. ID no. 12341059
  misc_feature (1)..(55): Pfam Name: Pfam Description:  UDP-glucoronosyl and UDP-glucosyl transferase
  misc_feature (80)..(326): NCBI GI NO: 37530678 NR Description: putative anthocyanidin-3-glucosiderhamnosyltransferase
  misc_feature (1)..(55): NCBI GI NO: 37530678 NR Description: putative anthocyanidin-3-glucosiderhamnosyltransferase
  misc_feature (82)..(330): NCBI GI NO: 34393978 NR Description: putative UDP-glucosyltransferase
  misc_feature (1)..(49): NCBI GI NO: 34393978 NR Description: putative UDP-glucosyltransferase
  misc_feature (80)..(327): NCBI GI NO: 34393985 NR Description: putative UDP-glucosyltransferase
  misc_feature (1)..(62): NCBI GI NO: 34393985 NR Description: putative UDP-glucosyltransferase
  misc_feature (77)..(330): NCBI GI NO: 34393982 NR Description: putative UDP-glucosyltransferase
  misc_feature (1)..(46): NCBI GI NO: 34393982 NR Description: putative UDP-glucosyltransferase
  misc_feature (79)..(326): NCBI GI NO: 21435782 NR Description: UDP-glucosyltransferase [Stevia rebaudiana]
  misc_feature (1)..(41): NCBI GI NO: 21435782 NR Description: UDP-glucosyltransferase [Stevia rebaudiana]
MDRLAPAFSAFLGAACADGSDRKVDWVLLDNFHASMADVASEHKVPCILNMPYSSATTEDFGIPDPSVLPMFRPFVETFKRCKVIAARSSFELEPESLPLMTKILGKPVIPVGLLPPAPAGGNTQRDDSAALSWLDEQPSKSVVYVAFGSEYPMTVKQLHEIARGLELAGTRFLWALKRPSVAHPDEDLLPPGFEERTRGRGSVVTGWVPQTSILGHGAVAAFMMHCGWGSTIEALQYGHPLVMMPVLVDHLSTARVMEQRKVGVKVRKEKSDEAFLGDNIATAIRAVMCEEESKRIFVANAKRMQEIVADDECHKRYIDEFVQSLRTYKN

SEQ ID NO: 32718 - protein, 296 aa, Zea mays subsp. mays
  peptide (1)..(296): Ceres Seq. ID no. 12341060
  misc_feature (45)..(291): Pfam Name: Pfam Description:  UDP-glucoronosyl and UDP-glucosyl transferase
  misc_feature (45)..(291): NCBI GI NO: 37530678 NR Description: putative anthocyanidin-3-glucosiderhamnosyltransferase
  misc_feature (1)..(20): NCBI GI NO: 37530678 NR Description: putative anthocyanidin-3-glucosiderhamnosyltransferase
  misc_feature (47)..(295): NCBI GI NO: 34393978 NR Description: putative UDP-glucosyltransferase
  misc_feature (1)..(14): NCBI GI NO: 34393978 NR Description: putative UDP-glucosyltransferase
  misc_feature (45)..(292): NCBI GI NO: 34393985 NR Description: putative UDP-glucosyltransferase
  misc_feature (1)..(27): NCBI GI NO: 34393985 NR Description: putative UDP-glucosyltransferase
  misc_feature (42)..(295): NCBI GI NO: 34393982 NR Description: putative UDP-glucosyltransferase
  misc_feature (1)..(11): NCBI GI NO: 34393982 NR Description: putative UDP-glucosyltransferase
  misc_feature (44)..(291): NCBI GI NO: 21435782 NR Description: UDP-glucosyltransferase [Stevia rebaudiana]
  misc_feature (28)..(295): NCBI GI NO: 34908562 NR Description: putative anthocyanidine rhamnosyl-transferase
MADVASEHKVPCILNMPYSSATTEDFGIPDPSVLPMFRPFVETFKRCKVIAARSSFELEPESLPLMTKILGKPVIPVGLLPPAPAGGNTQRDDSAALSWLDEQPSKSVVYVAFGSEYPMTVKQLHEIARGLELAGTRFLWALKRPSVAHPDEDLLPPGFEERTRGRGSVVTGWVPQTSILGHGAVAAFMMHCGWGSTIEALQYGHPLVMMPVLVDHLSTARVMEQRKVGVKVRKEKSDEAFLGDNIATAIRAVMCEEESKRIFVANAKRMQEIVADDECHKRYIDEFVQSLRTYKN

SEQ ID NO: 32719 - protein, 281 aa, Zea mays subsp. mays
  peptide (1)..(281): Ceres Seq. ID no. 12341061
  misc_feature (30)..(276): Pfam Name: Pfam Description:  UDP-glucoronosyl and UDP-glucosyl transferase
  misc_feature (30)..(276): NCBI GI NO: 37530678 NR Description: putative anthocyanidin-3-glucosiderhamnosyltransferase
  misc_feature (32)..(280): NCBI GI NO: 34393978 NR Description: putative UDP-glucosyltransferase
  misc_feature (30)..(277): NCBI GI NO: 34393985 NR Description: putative UDP-glucosyltransferase
  misc_feature (1)..(12): NCBI GI NO: 34393985 NR Description: putative UDP-glucosyltransferase
  misc_feature (27)..(280): NCBI GI NO: 34393982 NR Description: putative UDP-glucosyltransferase
  misc_feature (29)..(276): NCBI GI NO: 21435782 NR Description: UDP-glucosyltransferase [Stevia rebaudiana]
  misc_feature (13)..(280): NCBI GI NO: 34908562 NR Description: putative anthocyanidine rhamnosyl-transferase
  misc_feature (1)..(12): NCBI GI NO: 34908562 NR Description: putative anthocyanidine rhamnosyl-transferase
  misc_feature (32)..(278): NCBI GI NO: 15450577 NR Description: At2g22590/T9I22.3 [Arabidopsis thaliana]
  misc_feature (32)..(278): NCBI GI NO: 18400022 NR Description: putative anthocyanidin-3-glucosiderhamnosyltransferase
MPYSSATTEDFGIPDPSVLPMFRPFVETFKRCKVIAARSSFELEPESLPLMTKILGKPVIPVGLLPPAPAGGNTQRDDSAALSWLDEQPSKSVVYVAFGSEYPMTVKQLHEIARGLELAGTRFLWALKRPSVAHPDEDLLPPGFEERTRGRGSVVTGWVPQTSILGHGAVAAFMMHCGWGSTIEALQYGHPLVMMPVLVDHLSTARVMEQRKVGVKVRKEKSDEAFLGDNIATAIRAVMCEEESKRIFVANAKRMQEIVADDECHKRYIDEFVQSLRTYKN

SEQ ID NO: 32720 - DNA, 1408 bp, Zea mays subsp. mays
  misc_feature (1)..(1408): Ceres Seq. ID no. 12383163
gcacgagaccattacctagaacatcctaatcgaaaaaagaacagtagaccaaagacaaaggaactaaggaaggcgagggccaccatccccaaaacccgtaaaaaaacccgaattgacaaattgagtcgacggggaaggaaataaagaaggggaagagcacgcgccgccgccagcaccgcgtccgccatggccgcctcctcccgccgcgcgtctcaattgctggggtccgcggcctcccgcctcctcatcgggcggggcttcgccgcggcagccgccgcgccctcgccggcggtcttcgtcgacaagagcacccgtgtgatctgccagggcatcacggggaagaacggcaccttccacaccgagcaggccatcgagtacggcaccaacatggttggtggagtgactcctaagaaaggtggaactgaacatttagggctcccagtgtttaactctgtagcagaagctaaggctgaaacaaaagctaatgcatctgttatatatgttccaccaccatttgctgccgccgctataatggagtcaatggaggctgagctcgaccttgttgtctgcattacggaaggaattccccagcatgacatggtgaaagtgaaggctgcactaaatagacaatctaaaactcgattgattgggccaaattgccctggtatcattaagcctggtgagtgtaaaattggaatcatgccaggttacatccacaagcctgggcgtattgggattgtatctcgttctggtaccttgacatatgaagcggtgtttcaaacaacagctgtaggcttggggcagtcaacttgtgtaggcattggtggtgacccattcaatggcacaaattttgttgattgccttgaaaaatttgtcgatgaccctcagacagaaggcattgttctcattggtgaaattggaggtacggctgaggaggatgctgcaacgttcatccaggaaagcaaaacacaaaagcctgttgttgcattcattgctggacttacggcacccccaggccgtcgcatgggtcatgctggagctatcgtggcaggaggaaagggtactgcccaggacaaaatcaaggcactcagagaggctggtgttaccgttgtcgagtcaccagcgaagattggttctaccatgtttgaaatcttcaaacagcgtggaatggtagaatagacagtggtacatagagagacattgagaaaccgctttttgatgcttgcgggcaatcgcgagcaattcctcggtagatccgtctccctggccacaaacaaaactactgaggttttcttttcgtacgtgtcttatctttggaagatggcctggccttcttcacttggataacctttcgatgagctcgtttcaataagacgtttcggagccatggaaatgctatgtcgcttgg

SEQ ID NO: 32721 - protein, 330 aa, Zea mays subsp. mays
  peptide (1)..(330): Ceres Seq. ID no. 12383164
  misc_feature (37)..(148): Pfam Name: Pfam Description:  CoA binding domain
  misc_feature (1)..(330): NCBI GI NO: 34393512 NR Description: putative succinyl-CoA ligase alpha subunit
  misc_feature (30)..(329): NCBI GI NO: 27357175 NR Description: succinyl-CoA ligase alpha subunit
  misc_feature (1)..(330): NCBI GI NO: 15241592 NR Description: succinyl-CoA-ligase alpha subunit
  misc_feature (19)..(330): NCBI GI NO: 15237260 NR Description: succinyl-CoA synthetase, alpha subunit
  misc_feature (19)..(330): NCBI GI NO: 21593483 NR Description: succinyl-CoA synthetase, alpha subunit
  misc_feature (36)..(330): NCBI GI NO: 1076415 NR Description: succinate-CoA ligase (GDP-forming) (EC 6
  misc_feature (20)..(319): NCBI GI NO: 1711574 NR Description: SUCCINYL-COA LIGASE
  misc_feature (1)..(329): NCBI GI NO: 2258465 NR Description: succinyl-CoA synthetase alpha subunit [Sus scrofa]
  misc_feature (36)..(329): NCBI GI NO: 38181885 NR Description: Suclg1 protein [Rattus norvegicus]
  misc_feature (36)..(329): NCBI GI NO: 4104377 NR Description: ATP-specific succinyl-CoA synthetase alpha subunit
MAASSRRASQLLGSAASRLLIGRGFAAAAAAPSPAVFVDKSTRVICQGITGKNGTFHTEQAIEYGTNMVGGVTPKKGGTEHLGLPVFNSVAEAKAETKANASVIYVPPPFAAAAIMESMEAELDLVVCITEGIPQHDMVKVKAALNRQSKTRLIGPNCPGIIKPGECKIGIMPGYIHKPGRIGIVSRSGTLTYEAVFQTTAVGLGQSTCVGIGGDPFNGTNFVDCLEKFVDDPQTEGIVLIGEIGGTAEEDAATFIQESKTQKPVVAFIAGLTAPPGRRMGHAGAIVAGGKGTAQDKIKALREAGVTVVESPAKIGSTMFEIFKQRGMVE

SEQ ID NO: 32722 - protein, 263 aa, Zea mays subsp. mays
  peptide (1)..(263): Ceres Seq. ID no. 12383165
  misc_feature (1)..(81): Pfam Name: Pfam Description:  CoA binding domain
  misc_feature (1)..(263): NCBI GI NO: 34393512 NR Description: putative succinyl-CoA ligase alpha subunit
  misc_feature (1)..(262): NCBI GI NO: 27357175 NR Description: succinyl-CoA ligase alpha subunit
  misc_feature (1)..(263): NCBI GI NO: 15241592 NR Description: succinyl-CoA-ligase alpha subunit
  misc_feature (1)..(263): NCBI GI NO: 15237260 NR Description: succinyl-CoA synthetase, alpha subunit
  misc_feature (1)..(263): NCBI GI NO: 21593483 NR Description: succinyl-CoA synthetase, alpha subunit
  misc_feature (1)..(263): NCBI GI NO: 1076415 NR Description: succinate-CoA ligase (GDP-forming) (EC 6
  misc_feature (1)..(252): NCBI GI NO: 1711574 NR Description: SUCCINYL-COA LIGASE
  misc_feature (1)..(262): NCBI GI NO: 2258465 NR Description: succinyl-CoA synthetase alpha subunit [Sus scrofa]
  misc_feature (1)..(262): NCBI GI NO: 38181885 NR Description: Suclg1 protein [Rattus norvegicus]
  misc_feature (1)..(262): NCBI GI NO: 4104377 NR Description: ATP-specific succinyl-CoA synthetase alpha subunit
MVGGVTPKKGGTEHLGLPVFNSVAEAKAETKANASVIYVPPPFAAAAIMESMEAELDLVVCITEGIPQHDMVKVKAALNRQSKTRLIGPNCPGIIKPGECKIGIMPGYIHKPGRIGIVSRSGTLTYEAVFQTTAVGLGQSTCVGIGGDPFNGTNFVDCLEKFVDDPQTEGIVLIGEIGGTAEEDAATFIQESKTQKPVVAFIAGLTAPPGRRMGHAGAIVAGGKGTAQDKIKALREAGVTVVESPAKIGSTMFEIFKQRGMVE

SEQ ID NO: 32723 - protein, 215 aa, Zea mays subsp. mays
  peptide (1)..(215): Ceres Seq. ID no. 12383166
  misc_feature (1)..(215): NCBI GI NO: 34393512 NR Description: putative succinyl-CoA ligase alpha subunit
  misc_feature (1)..(214): NCBI GI NO: 27357175 NR Description: succinyl-CoA ligase alpha subunit
  misc_feature (1)..(215): NCBI GI NO: 15241592 NR Description: succinyl-CoA-ligase alpha subunit
  misc_feature (1)..(215): NCBI GI NO: 15237260 NR Description: succinyl-CoA synthetase, alpha subunit
  misc_feature (1)..(215): NCBI GI NO: 21593483 NR Description: succinyl-CoA synthetase, alpha subunit
  misc_feature (1)..(215): NCBI GI NO: 1076415 NR Description: succinate-CoA ligase (GDP-forming) (EC 6
  misc_feature (1)..(204): NCBI GI NO: 1711574 NR Description: SUCCINYL-COA LIGASE
  misc_feature (1)..(214): NCBI GI NO: 2258465 NR Description: succinyl-CoA synthetase alpha subunit [Sus scrofa]
  misc_feature (1)..(214): NCBI GI NO: 38181885 NR Description: Suclg1 protein [Rattus norvegicus]
  misc_feature (1)..(214): NCBI GI NO: 4104377 NR Description: ATP-specific succinyl-CoA synthetase alpha subunit
MESMEAELDLVVCITEGIPQHDMVKVKAALNRQSKTRLIGPNCPGIIKPGECKIGIMPGYIHKPGRIGIVSRSGTLTYEAVFQTTAVGLGQSTCVGIGGDPFNGTNFVDCLEKFVDDPQTEGIVLIGEIGGTAEEDAATFIQESKTQKPVVAFIAGLTAPPGRRMGHAGAIVAGGKGTAQDKIKALREAGVTVVESPAKIGSTMFEIFKQRGMVE

SEQ ID NO: 32724 - DNA, 1680 bp, Zea mays subsp. mays
  misc_feature (1)..(1680): Ceres Seq. ID no. 12351340
ggcccaccaacctgttcatcgatcttctttcttctcaagaaaagaaaacaaaccgcttgtttgcccttccgactacgtctctccctgactcggcttctctttttcggcggcgacggctggtcgagttgcggcgctctgttcagtgttcattgtgcccttcgccacgacgattatcctccagtagtaagtcaccatgtcttcgtccatgcaatcttcataccttcctgctaccactgagtccgtagccaaggctcaggaggccaaggacgcttctgagtccatctcaatcctctaccacgtgcttgaggatccctcttcatctgcggatgcactgagagtaaaagagcttgccatcacgaatctcacaaactacctcacaaaagagaacagagctgaagacctcaggaaccttttgacccagctcaggcccttttttgcattgatccccaaggcgaagactgcgaagattgtgcgtggcatcattgatgccgttgccaaggtgcctggaacatctcagcttcagatctcactgtgcaaggagatggtagaatggacccgtgcagagaagcgaaccttcctcaggcagcgtgtggaagcaaggctggcagcccttctgttggagaatcaggagtatactgaggctcttacactcctttctggactcatcaaggaagttaggaggctggatgacaagttgcttcttgtggacatcgaccttttggagagcaagctccatttctctctgagaaaccttccaaaggccaaagcttctctgactgctgccagaactgcagccaatgccatttatgtgccgccatctcagcagggcacaattgatctgcagagtgggatccttcatgctgaagagaaggattacaagactgcttacagctacttcttcgaagcatttgaagctttcagttcactggaagatcccaaggctatcttcagcttgaagtacatgcttctgtgcaagataatggtcaaccaagctgatgatgttgcaggaatcatctcatcgaaggctggcctcaagtatctgggtcctgatgttgatgctatgaaagctgtggccgatgcctactccaaaaggtctctgaagtacttcgaaactgctctccgtgattacaaagctcagctggaagaagatcctattgtccacaggcacctttcctcgctgtatgacactctcttggagcagaacctctgcaggctgattgagccctactcaagggtggagattgctcacatagcagagatgattgagctgccaatgaaccatgttgagaagaagctgtcccagatgatcctcgacaagaaattcgcagggacacttgatcaaggcgctggctgcctcatcatcttcgaggacagcaagactgaggagatcttccctgccacacttgaaacgatcacgaatgttggcaaggttgtggacagcctgtacatgagatcggccaagatcatggcctgaaagatgcagtgggaggcctaggtgtcgtcagcttcttttcttggtctattgtcagttcagttaaccaaactttagctgtccaagagacatcttattgtggatttttttttatttgtggttttgggtggcagactgtttgcgttacaatttggtcatgttgctcatgaatactcatgtttctgtttgatggaagtactgttaaggct

SEQ ID NO: 32725 - protein, 426 aa, Zea mays subsp. mays
  peptide (1)..(426): Ceres Seq. ID no. 12351341
  misc_feature (288)..(392): Pfam Name: Pfam Description:  PCI domain
  misc_feature (3)..(426): NCBI GI NO: 38344536 NR Description: OSJNBa0027P08.4
  misc_feature (12)..(426): NCBI GI NO: 15218845 NR Description: 26S proteasome regulatory subunit
  misc_feature (12)..(419): NCBI GI NO: 25332510 NR Description: 19S proteosome subunit 9
  misc_feature (117)..(426): NCBI GI NO: 38093742 NR Description: putative proteosome subunit
  misc_feature (21)..(424): NCBI GI NO: 17137740 NR Description: Proteasome p44.5 subunit CG10149-PB
  misc_feature (18)..(424): NCBI GI NO: 26342168 NR Description: unnamed protein product [Mus musculus]
  misc_feature (18)..(424): NCBI GI NO: 33585718 NR Description: Unknown (protein for IMAGE:3964625) [Mus musculus]
  misc_feature (18)..(424): NCBI GI NO: 2150046 NR Description: 26S proteasome subunit 9 [Homo sapiens]
  misc_feature (18)..(424): NCBI GI NO: 28872725 NR Description: proteasome 26S non-ATPase subunit 11
  misc_feature (18)..(424): NCBI GI NO: 34872897 NR Description: similar to 26S proteasome non-ATPase regulatory subunit 11
MSSSMQSSYLPATTESVAKAQEAKDASESISILYHVLEDPSSSADALRVKELAITNLTNYLTKENRAEDLRNLLTQLRPFFALIPKAKTAKIVRGIIDAVAKVPGTSQLQISLCKEMVEWTRAEKRTFLRQRVEARLAALLLENQEYTEALTLLSGLIKEVRRLDDKLLLVDIDLLESKLHFSLRNLPKAKASLTAARTAANAIYVPPSQQGTIDLQSGILHAEEKDYKTAYSYFFEAFEAFSSLEDPKAIFSLKYMLLCKIMVNQADDVAGIISSKAGLKYLGPDVDAMKAVADAYSKRSLKYFETALRDYKAQLEEDPIVHRHLSSLYDTLLEQNLCRLIEPYSRVEIAHIAEMIELPMNHVEKKLSQMILDKKFAGTLDQGAGCLIIFEDSKTEEIFPATLETITNVGKVVDSLYMRSAKIMA

SEQ ID NO: 32726 - protein, 422 aa, Zea mays subsp. mays
  peptide (1)..(422): Ceres Seq. ID no. 12351342
  misc_feature (284)..(388): Pfam Name: Pfam Description:  PCI domain
  misc_feature (1)..(422): NCBI GI NO: 38344536 NR Description: OSJNBa0027P08.4
  misc_feature (8)..(422): NCBI GI NO: 15218845 NR Description: 26S proteasome regulatory subunit
  misc_feature (8)..(415): NCBI GI NO: 25332510 NR Description: 19S proteosome subunit 9
  misc_feature (113)..(422): NCBI GI NO: 38093742 NR Description: putative proteosome subunit
  misc_feature (17)..(420): NCBI GI NO: 17137740 NR Description: Proteasome p44.5 subunit CG10149-PB
  misc_feature (14)..(420): NCBI GI NO: 26342168 NR Description: unnamed protein product [Mus musculus]
  misc_feature (14)..(420): NCBI GI NO: 33585718 NR Description: Unknown (protein for IMAGE:3964625) [Mus musculus]
  misc_feature (14)..(420): NCBI GI NO: 2150046 NR Description: 26S proteasome subunit 9 [Homo sapiens]
  misc_feature (14)..(420): NCBI GI NO: 28872725 NR Description: proteasome 26S non-ATPase subunit 11
  misc_feature (14)..(420): NCBI GI NO: 34872897 NR Description: similar to 26S proteasome non-ATPase regulatory subunit 11
MQSSYLPATTESVAKAQEAKDASESISILYHVLEDPSSSADALRVKELAITNLTNYLTKENRAEDLRNLLTQLRPFFALIPKAKTAKIVRGIIDAVAKVPGTSQLQISLCKEMVEWTRAEKRTFLRQRVEARLAALLLENQEYTEALTLLSGLIKEVRRLDDKLLLVDIDLLESKLHFSLRNLPKAKASLTAARTAANAIYVPPSQQGTIDLQSGILHAEEKDYKTAYSYFFEAFEAFSSLEDPKAIFSLKYMLLCKIMVNQADDVAGIISSKAGLKYLGPDVDAMKAVADAYSKRSLKYFETALRDYKAQLEEDPIVHRHLSSLYDTLLEQNLCRLIEPYSRVEIAHIAEMIELPMNHVEKKLSQMILDKKFAGTLDQGAGCLIIFEDSKTEEIFPATLETITNVGKVVDSLYMRSAKIMA

SEQ ID NO: 32727 - protein, 310 aa, Zea mays subsp. mays
  peptide (1)..(310): Ceres Seq. ID no. 12351343
  misc_feature (172)..(276): Pfam Name: Pfam Description:  PCI domain
  misc_feature (1)..(310): NCBI GI NO: 38344536 NR Description: OSJNBa0027P08.4
  misc_feature (1)..(310): NCBI GI NO: 15218845 NR Description: 26S proteasome regulatory subunit
  misc_feature (1)..(303): NCBI GI NO: 25332510 NR Description: 19S proteosome subunit 9
  misc_feature (1)..(310): NCBI GI NO: 38093742 NR Description: putative proteosome subunit
  misc_feature (1)..(308): NCBI GI NO: 17137740 NR Description: Proteasome p44.5 subunit CG10149-PB
  misc_feature (1)..(308): NCBI GI NO: 26342168 NR Description: unnamed protein product [Mus musculus]
  misc_feature (1)..(308): NCBI GI NO: 33585718 NR Description: Unknown (protein for IMAGE:3964625) [Mus musculus]
  misc_feature (1)..(308): NCBI GI NO: 2150046 NR Description: 26S proteasome subunit 9 [Homo sapiens]
  misc_feature (1)..(308): NCBI GI NO: 28872725 NR Description: proteasome 26S non-ATPase subunit 11
  misc_feature (1)..(308): NCBI GI NO: 34872897 NR Description: similar to 26S proteasome non-ATPase regulatory subunit 11
MVEWTRAEKRTFLRQRVEARLAALLLENQEYTEALTLLSGLIKEVRRLDDKLLLVDIDLLESKLHFSLRNLPKAKASLTAARTAANAIYVPPSQQGTIDLQSGILHAEEKDYKTAYSYFFEAFEAFSSLEDPKAIFSLKYMLLCKIMVNQADDVAGIISSKAGLKYLGPDVDAMKAVADAYSKRSLKYFETALRDYKAQLEEDPIVHRHLSSLYDTLLEQNLCRLIEPYSRVEIAHIAEMIELPMNHVEKKLSQMILDKKFAGTLDQGAGCLIIFEDSKTEEIFPATLETITNVGKVVDSLYMRSAKIMA

SEQ ID NO: 32728 - DNA, 1686 bp, Zea mays subsp. mays
  misc_feature (1)..(1686): Ceres Seq. ID no. 12406705
aaggtatcaccacgttcactgtcgctcgacctctgttcttgagctgcttcatgcgatagcgactggaccaaagttgtactctgctgcctccccgtgcctttagtgattcggtcctcgggtttgcgtgcaatttttaatcttcgcctccagccatgggtaaggagaagtctcacatcaacattgtggttattggccacgtcgactctggcaagtcgacaaccaccggccacctgatctacaagcttggaggcattgacaagcgtgtgatcgagaggtttgagaaggaggccgctgaaatgaacaagcggtcctttaagtatgcttgggtgcttgacaagctcaaggctgagcgtgagaggggtatcaccattgatattgctctgtggaagtttgagaccaccaagtactattgcaccgttattgatgcccctggacaccgtgactttatcaagaacatgatcactggtacctcccaggctgactgtgctgtccttatcattgactccaccactggtggttttgaggctggtatctccaaggatggccagacacgtgagcatgctctccttgcgttcacacttggagtgaagcagatgatttgctgctgcaacaagatggatgcaaccactcccaaatactccaaggcacgttatgatgagattgtgaaggaagtctcatcttacctcaagaaagttgggtacaaccctgataagatagcatttgttcccatctctggttttgagggtgacaacatgattgagaggtccaccaaccttgactggtacaaaggcccaaccctgcttgaggctcttgaccagatcaccgagcccaagagaccctcggacaagcccctgcgtctccccctccaggatgtgtacaagattggtggtattggaactgtgccagttggtcgtgtggagactggtgtcatcaagcctggtatggttgtcacctttggtccaactggcctgactactgaggtgaagtctgttgagatgcaccatgaggctcttcaggaggcccttcctggtgacaatgttggcttcaacgtgaagaacgtcgctgtgaaggatatcaagcgtggttatgtggcctccaactccaaggatgaccctgccaaggaggctgccagcttcacctcccaggtcatcatcatgaaccaccctgggcagatcggtaacggttatgccccagtgctggactgccacacctcccatattgctgtcaagtttgctgagctcattaccaagatcgacaggcgttctggcaaggagcttgagaaagagcccaagttcttgaagaacggtgatgctggtatggtgaagatgattcccaccaagcccatggtggtggagacattctcgcagtatcctcccctgggtaggtttgctgtccgtgacatgagacagacggttgctgttggagtcatcaagagtgtggagaagaaggacccgaccggtgccaaggtgaccaaggctgctgccaagaagaaatgatgcgacctgtcgttgatgcagcgtctgcttttccaatacgtagctgagatgttccattttgacataagttttgtatgctgtggttgctgtttaccttgtgaactgttgagctctactattgggtgtccgtttatctgtttatgtagcatcttgttatttcacctattgcaatacaagaatgctatatgac

SEQ ID NO: 32729 - protein, 447 aa, Zea mays subsp. mays
  peptide (1)..(447): Ceres Seq. ID no. 12406706
  misc_feature (5)..(227): Pfam Name: Pfam Description:  Elongation factor Tu GTP binding domain
  misc_feature (1)..(447): NCBI GI NO: 7230387 NR Description: elongation factor 1 alpha [Zea mays]
  misc_feature (1)..(447): NCBI GI NO: 7230385 NR Description: elongation factor 1 alpha [Zea mays]
  misc_feature (1)..(447): NCBI GI NO: 2282584 NR Description: elongation factor 1-alpha [Zea mays]
  misc_feature (1)..(447): NCBI GI NO: 2662341 NR Description: EF-1 alpha [Oryza sativa]
  misc_feature (1)..(447): NCBI GI NO: 3122071 NR Description: ELONGATION FACTOR 1-ALPHA (EF-1-ALPHA)
  misc_feature (1)..(447): NCBI GI NO: 7230397 NR Description: elongation factor 1 alpha [Zea mays]
  misc_feature (1)..(447): NCBI GI NO: 2662343 NR Description: EF-1 alpha [Oryza sativa]
  misc_feature (1)..(447): NCBI GI NO: 6015059 NR Description: ELONGATION FACTOR 1-ALPHA (EF-1-ALPHA)
  misc_feature (1)..(447): NCBI GI NO: 9802384 NR Description: elongation factor [Saccharum officinarum]
  misc_feature (1)..(447): NCBI GI NO: 18873725 NR Description: elongation factor 1 alpha
MGKEKSHINIVVIGHVDSGKSTTTGHLIYKLGGIDKRVIERFEKEAAEMNKRSFKYAWVLDKLKAERERGITIDIALWKFETTKYYCTVIDAPGHRDFIKNMITGTSQADCAVLIIDSTTGGFEAGISKDGQTREHALLAFTLGVKQMICCCNKMDATTPKYSKARYDEIVKEVSSYLKKVGYNPDKIAFVPISGFEGDNMIERSTNLDWYKGPTLLEALDQITEPKRPSDKPLRLPLQDVYKIGGIGTVPVGRVETGVIKPGMVVTFGPTGLTTEVKSVEMHHEALQEALPGDNVGFNVKNVAVKDIKRGYVASNSKDDPAKEAASFTSQVIIMNHPGQIGNGYAPVLDCHTSHIAVKFAELITKIDRRSGKELEKEPKFLKNGDAGMVKMIPTKPMVVETFSQYPPLGRFAVRDMRQTVAVGVIKSVEKKDPTGAKVTKAAAKKK

SEQ ID NO: 32730 - protein, 399 aa, Zea mays subsp. mays
  peptide (1)..(399): Ceres Seq. ID no. 12406707
  misc_feature (1)..(179): Pfam Name: Pfam Description:  Elongation factor Tu GTP binding domain
  misc_feature (1)..(399): NCBI GI NO: 7230387 NR Description: elongation factor 1 alpha [Zea mays]
  misc_feature (1)..(399): NCBI GI NO: 7230385 NR Description: elongation factor 1 alpha [Zea mays]
  misc_feature (1)..(399): NCBI GI NO: 2282584 NR Description: elongation factor 1-alpha [Zea mays]
  misc_feature (1)..(399): NCBI GI NO: 2662341 NR Description: EF-1 alpha [Oryza sativa]
  misc_feature (1)..(399): NCBI GI NO: 3122071 NR Description: ELONGATION FACTOR 1-ALPHA (EF-1-ALPHA)
  misc_feature (1)..(399): NCBI GI NO: 7230397 NR Description: elongation factor 1 alpha [Zea mays]
  misc_feature (1)..(399): NCBI GI NO: 2662343 NR Description: EF-1 alpha [Oryza sativa]
  misc_feature (1)..(399): NCBI GI NO: 6015059 NR Description: ELONGATION FACTOR 1-ALPHA (EF-1-ALPHA)
  misc_feature (1)..(399): NCBI GI NO: 9802384 NR Description: elongation factor [Saccharum officinarum]
  misc_feature (1)..(399): NCBI GI NO: 18873725 NR Description: elongation factor 1 alpha
MNKRSFKYAWVLDKLKAERERGITIDIALWKFETTKYYCTVIDAPGHRDFIKNMITGTSQADCAVLIIDSTTGGFEAGISKDGQTREHALLAFTLGVKQMICCCNKMDATTPKYSKARYDEIVKEVSSYLKKVGYNPDKIAFVPISGFEGDNMIERSTNLDWYKGPTLLEALDQITEPKRPSDKPLRLPLQDVYKIGGIGTVPVGRVETGVIKPGMVVTFGPTGLTTEVKSVEMHHEALQEALPGDNVGFNVKNVAVKDIKRGYVASNSKDDPAKEAASFTSQVIIMNHPGQIGNGYAPVLDCHTSHIAVKFAELITKIDRRSGKELEKEPKFLKNGDAGMVKMIPTKPMVVETFSQYPPLGRFAVRDMRQTVAVGVIKSVEKKDPTGAKVTKAAAKKK

SEQ ID NO: 32731 - protein, 346 aa, Zea mays subsp. mays
  peptide (1)..(346): Ceres Seq. ID no. 12406708
  misc_feature (1)..(126): Pfam Name: Pfam Description:  Elongation factor Tu GTP binding domain
  misc_feature (1)..(346): NCBI GI NO: 7230387 NR Description: elongation factor 1 alpha [Zea mays]
  misc_feature (1)..(346): NCBI GI NO: 7230385 NR Description: elongation factor 1 alpha [Zea mays]
  misc_feature (1)..(346): NCBI GI NO: 2282584 NR Description: elongation factor 1-alpha [Zea mays]
  misc_feature (1)..(346): NCBI GI NO: 2662341 NR Description: EF-1 alpha [Oryza sativa]
  misc_feature (1)..(346): NCBI GI NO: 3122071 NR Description: ELONGATION FACTOR 1-ALPHA (EF-1-ALPHA)
  misc_feature (1)..(346): NCBI GI NO: 7230397 NR Description: elongation factor 1 alpha [Zea mays]
  misc_feature (1)..(346): NCBI GI NO: 2662343 NR Description: EF-1 alpha [Oryza sativa]
  misc_feature (1)..(346): NCBI GI NO: 6015059 NR Description: ELONGATION FACTOR 1-ALPHA (EF-1-ALPHA)
  misc_feature (1)..(346): NCBI GI NO: 9802384 NR Description: elongation factor [Saccharum officinarum]
  misc_feature (1)..(346): NCBI GI NO: 18873725 NR Description: elongation factor 1 alpha
MITGTSQADCAVLIIDSTTGGFEAGISKDGQTREHALLAFTLGVKQMICCCNKMDATTPKYSKARYDEIVKEVSSYLKKVGYNPDKIAFVPISGFEGDNMIERSTNLDWYKGPTLLEALDQITEPKRPSDKPLRLPLQDVYKIGGIGTVPVGRVETGVIKPGMVVTFGPTGLTTEVKSVEMHHEALQEALPGDNVGFNVKNVAVKDIKRGYVASNSKDDPAKEAASFTSQVIIMNHPGQIGNGYAPVLDCHTSHIAVKFAELITKIDRRSGKELEKEPKFLKNGDAGMVKMIPTKPMVVETFSQYPPLGRFAVRDMRQTVAVGVIKSVEKKDPTGAKVTKAAAKKK

SEQ ID NO: 32732 - DNA, 1318 bp, Zea mays subsp. mays
  misc_feature (1)..(1318): Ceres Seq. ID no. 12406702
  misc_feature (1147)..(1147): n is a, c, t, g, unknown, or other
  misc_feature (1154)..(1154): n is a, c, t, g, unknown, or other
  misc_feature (1157)..(1157): n is a, c, t, g, unknown, or other
  misc_feature (1145)..(1145): n is a, c, t, g, unknown, or other
  misc_feature (1115)..(1115): n is a, c, t, g, unknown, or other
gcacgagaccattacctagaacatcctaatcgaaaagtacttggcaatcctctctagctagctcagcatccgacgacgggacttgcacgatggatgctgctctgctcgtcgtctccctcgtcctctgcctgctggcggctgcccctgcggcgtccgcggcgcgggccttcttcgtcttcggcgactccctcgtcgacaacggcaacaacaactacctgctgaccacggcgcgcgccgacgcgcccccctacggcatcgacttccccacgcaccaagccacgggccgcttctccaacgggcttaacatccccgacatcatcagcgagcacctcggggccgaacctgcgctgccgtacctgagccccgagctccgaggggagaagctgctcgtcggcgccaacttcgcgtcggccggcgtcgggatcctcaacgacacaggaatacagtttgtgaacatcatcaggatcggcgaccagctgcagtacttccgggagtaccagcggaagctgcgagccctcgtcggcgagccgcaggcgacgcagctcgtgaaccaggccctcgtgctcatcacgctcggcggcaacgacttcgtgaacaactactacctggtgcccatgtccgtgcggtcgcgccagtacgcactcccggactacgtccgcttcatcgtctccgagtacaggaagatcctctcgaggctgtacgagctgggcgcgcggcgcgtgatcgtgacggggacggggccgctggggtgcgtcccggccgagctggcgctacacagccagaacggcgagtgcgcggcggagctgacgcgcgccgtgaacctcttcaacccgcagatggtggacatggtgcgcggcatcaaccgcgccatcggcgccgacgtcttcgtcaccgccaacacctaccgcatgaacttcgactacctcgcaaacccgcaggacttcgggttcacgaacgtgcaggtggcgtgctgcggccagggcccgtacaacgggatcgggctgtgcacggcggcgtcgaacgtgtgcgacaaccgcgacgtgttcgcgttctgggacgcgttccaccccacggagagggcaaaccgcatcatcgtcgcccagttcatgcacggngacacggactacatgcaccccatgaacctnancaccatnctngccacggaccaggagggcctctagactatagcttgatcagccggacacgattatacgtacatgcgtgatgtgtctcacgtgcctagcacgttagccatgtgttggatgatggcagcccaatttgccaataatattcgtgcctcgatccaagtttcaccttc

SEQ ID NO: 32733 - protein, 363 aa, Zea mays subsp. mays
  peptide (1)..(363): Ceres Seq. ID no. 12406703
  misc_feature (27)..(338): Pfam Name: Pfam Description:  GDSL-like Lipase/Acylhydrolase
  misc_feature (1)..(359): NCBI GI NO: 37535146 NR Description: putative early nodulin gene (Enod) related protein
  misc_feature (7)..(359): NCBI GI NO: 15229265 NR Description: putative GDSL-motif lipase/acylhydrolase
  misc_feature (5)..(359): NCBI GI NO: 22758315 NR Description: putative early nodulin gene (Enod) related protein
  misc_feature (4)..(359): NCBI GI NO: 15242808 NR Description: putative protein; protein id: At5g33370
  misc_feature (3)..(359): NCBI GI NO: 28071322 NR Description: P0705A05.30
  misc_feature (5)..(359): NCBI GI NO: 15235421 NR Description: Proline-rich APG - like protein
  misc_feature (1)..(357): NCBI GI NO: 15238814 NR Description: putative protein; protein id: At5g18430.1
  misc_feature (11)..(186): NCBI GI NO: 37789825 NR Description: putative GDSL-motif lipase [Vitis vinifera]
  misc_feature (26)..(352): NCBI GI NO: 15227849 NR Description: putative GDSL-motif lipase/hydrolase
  misc_feature (15)..(352): NCBI GI NO: 15229742 NR Description: putative protein; protein id: At3g50400.1
  misc_feature (342)..(342): Xaa is any aa, unknown or other
  misc_feature (352)..(352): Xaa is any aa, unknown or other
  misc_feature (353)..(353): Xaa is any aa, unknown or other
  misc_feature (355)..(355): Xaa is any aa, unknown or other
  misc_feature (356)..(356): Xaa is any aa, unknown or other
MDAALLVVSLVLCLLAAAPAASAARAFFVFGDSLVDNGNNNYLLTTARADAPPYGIDFPTHQATGRFSNGLNIPDIISEHLGAEPALPYLSPELRGEKLLVGANFASAGVGILNDTGIQFVNIIRIGDQLQYFREYQRKLRALVGEPQATQLVNQALVLITLGGNDFVNNYYLVPMSVRSRQYALPDYVRFIVSEYRKILSRLYELGARRVIVTGTGPLGCVPAELALHSQNGECAAELTRAVNLFNPQMVDMVRGINRAIGADVFVTANTYRMNFDYLANPQDFGFTNVQVACCGQGPYNGIGLCTAASNVCDNRDVFAFWDAFHPTERANRIIVAQFMHXDTDYMHPMNXXTXXATDQEGL

SEQ ID NO: 32734 - protein, 188 aa, Zea mays subsp. mays
  peptide (1)..(188): Ceres Seq. ID no. 12406704
  misc_feature (1)..(163): Pfam Name: Pfam Description:  GDSL-like Lipase/Acylhydrolase
  misc_feature (1)..(184): NCBI GI NO: 37535146 NR Description: putative early nodulin gene (Enod) related protein
  misc_feature (1)..(184): NCBI GI NO: 15229265 NR Description: putative GDSL-motif lipase/acylhydrolase
  misc_feature (1)..(184): NCBI GI NO: 22758315 NR Description: putative early nodulin gene (Enod) related protein
  misc_feature (1)..(184): NCBI GI NO: 15242808 NR Description: putative protein; protein id: At5g33370
  misc_feature (1)..(184): NCBI GI NO: 28071322 NR Description: P0705A05.30
  misc_feature (1)..(184): NCBI GI NO: 15235421 NR Description: Proline-rich APG - like protein
  misc_feature (1)..(182): NCBI GI NO: 15238814 NR Description: putative protein; protein id: At5g18430.1
  misc_feature (1)..(11): NCBI GI NO: 37789825 NR Description: putative GDSL-motif lipase [Vitis vinifera]
  misc_feature (1)..(177): NCBI GI NO: 15227849 NR Description: putative GDSL-motif lipase/hydrolase
  misc_feature (1)..(177): NCBI GI NO: 15229742 NR Description: putative protein; protein id: At3g50400.1
  misc_feature (167)..(167): Xaa is any aa, unknown or other
  misc_feature (177)..(177): Xaa is any aa, unknown or other
  misc_feature (178)..(178): Xaa is any aa, unknown or other
  misc_feature (180)..(180): Xaa is any aa, unknown or other
  misc_feature (181)..(181): Xaa is any aa, unknown or other
MSVRSRQYALPDYVRFIVSEYRKILSRLYELGARRVIVTGTGPLGCVPAELALHSQNGECAAELTRAVNLFNPQMVDMVRGINRAIGADVFVTANTYRMNFDYLANPQDFGFTNVQVACCGQGPYNGIGLCTAASNVCDNRDVFAFWDAFHPTERANRIIVAQFMHXDTDYMHPMNXXTXXATDQEGL

SEQ ID NO: 32735 - DNA, 1807 bp, Zea mays subsp. mays
  misc_feature (1)..(1807): Ceres Seq. ID no. 12343300
agcgaattagtgaaaagaagacaataaataaatacaacgaatgcagcgagcgaggtggaggtggggggaaaagggcgaggtgacaccgtgacagagagaaggcgagggagggatcacgaggtgtgcttcctcctccgcccaatcctgcccaaccaaatccgccagcgccgcctcctttacactcccacctctgtcccggagcaaaaaagggagggagaggctcgcttcttggatcgcggggtcacgggacgcgcgccgcgggccggtacgctgctgctggcggactgctcgacccttgcctaccagctgctgcctgctgctgcttccttggctggcgccggcgagagacggaggcgaggcgacgacgatggaccgggcggcgctcaccgtgggcccggggatggacatgcccataatgcacgacggcgaccgctacgagctcgtccgcgacatcggctccggcaacttcggcgtcgcgcgcctcatgcgcaaccgcgccgacggccagctcgtcgccgtcaagtacatcgagcgaggcgagaagattgacgagaacgtgcagcgggagatcatcaaccaccgctccctgcggcaccccaacatcatccgcttcaaggaggtcatcctcaccccgacgcacctcgccatcgtcatggagtacgcctccggcggggagctcttcgagcgcatctgcaacgctggcaggttcagcgaggacgaggcgcgtttctttttccagcaactcatatcaggggtcagctactgccattccatgcaagtatgccatcgcgacttgaagctagagaacaccctgttggacgggagcaccgcgcctcgcctcaagatatgtgattttggctactcaaagtcatcagttctacactcgcagccgaaatctacagtgggaactcctgcatacattgctcctgaggttcttctgaagaaggaatacgatggaaaggtcgctgatgtgtggtcatgtggagtaacgctgtacgtgatgctggtcggtgcatatccgtttgaggacccagattagcctaagaatttcaggaagacaattcagagaatattgggtgtgcagtactcaattccagactatgtccacatatctccagagtgccaaaatcttgtctctaggattttcgtcgccgacccagccaccaggatcaccatccctgagataaggaaccatccatggttcttgaagaacctgccagctgacctaatggatgacagcacgatgagcaagcagtacgaggagcctgagcaaccgatgcagagcatggatgagatcatgcagatcctggccgaggcgaccattccagcagctggtccccgtggactcaatcagttcctgaacgacggccttgacctcgacgatgacatggacgacctggactcagataccgatcttgacctggaaagcagtggggaaatcgtgtatgctatttgacagcagcgaggcaatgtgtatcatcagtcgtgctcagatcgtttgttgcgccataggttaccgagataattagagagacaggggggaggtatctgctggagatgctgctcgtgtctgatgccgtgatgcccccttttttcatcctgttatgtttggctgttgtttggttgtggtgcacctccagtgttttacaacagtttggcccttcggaattggttgtgctagaacctcgtccatctaagaagaccctttgtttttgcatccccagctaagagacagtgaagtacttgtataattatactgtttgtgtcatatgtatttggtgtaggaaaataaagaaactccattgcc

SEQ ID NO: 32736 - protein, 223 aa, Zea mays subsp. mays
  peptide (1)..(223): Ceres Seq. ID no. 12343301
  misc_feature (23)..(223): Pfam Name: Pfam Description:  Protein kinase domain
  misc_feature (1)..(223): NCBI GI NO: 31415944 NR Description: putative serine-threonine protein kinase
  misc_feature (1)..(223): NCBI GI NO: 18418337 NR Description: protein kinase - like protein
  misc_feature (1)..(223): NCBI GI NO: 15240124 NR Description: protein kinase, 41K (EC 2
  misc_feature (1)..(223): NCBI GI NO: 7446439 NR Description: probable serine/threonine-specific protein kinase
  misc_feature (14)..(223): NCBI GI NO: 20260398 NR Description: putative protein [Arabidopsis thaliana]
  misc_feature (1)..(223): NCBI GI NO: 15229772 NR Description: protein kinase SPK-2; protein id: At3g50500
  misc_feature (1)..(223): NCBI GI NO: 21593534 NR Description: protein kinase SPK-2 [Arabidopsis thaliana]
  misc_feature (12)..(223): NCBI GI NO: 6739629 NR Description: abscisic acid-activated protein kinase
  misc_feature (21)..(223): NCBI GI NO: 29164823 NR Description: abcisic acid-inducible protein kinanase
  misc_feature (21)..(223): NCBI GI NO: 34906840 NR Description: putative protein kinase HvPKABA1
MDRAALTVGPGMDMPIMHDGDRYELVRDIGSGNFGVARLMRNRADGQLVAVKYIERGEKIDENVQREIINHRSLRHPNIIRFKEVILTPTHLAIVMEYASGGELFERICNAGRFSEDEARFFFQQLISGVSYCHSMQVCHRDLKLENTLLDGSTAPRLKICDFGYSKSSVLHSQPKSTVGTPAYIAPEVLLKKEYDGKVADVWSCGVTLYVMLVGAYPFEDPD

SEQ ID NO: 32737 - protein, 212 aa, Zea mays subsp. mays
  peptide (1)..(212): Ceres Seq. ID no. 12343302
  misc_feature (12)..(212): Pfam Name: Pfam Description:  Protein kinase domain
  misc_feature (1)..(212): NCBI GI NO: 31415944 NR Description: putative serine-threonine protein kinase
  misc_feature (1)..(212): NCBI GI NO: 18418337 NR Description: protein kinase - like protein
  misc_feature (1)..(212): NCBI GI NO: 15240124 NR Description: protein kinase, 41K (EC 2
  misc_feature (1)..(212): NCBI GI NO: 7446439 NR Description: probable serine/threonine-specific protein kinase
  misc_feature (3)..(212): NCBI GI NO: 20260398 NR Description: putative protein [Arabidopsis thaliana]
  misc_feature (1)..(212): NCBI GI NO: 15229772 NR Description: protein kinase SPK-2; protein id: At3g50500
  misc_feature (1)..(212): NCBI GI NO: 21593534 NR Description: protein kinase SPK-2 [Arabidopsis thaliana]
  misc_feature (1)..(212): NCBI GI NO: 6739629 NR Description: abscisic acid-activated protein kinase
  misc_feature (10)..(212): NCBI GI NO: 29164823 NR Description: abcisic acid-inducible protein kinanase
  misc_feature (10)..(212): NCBI GI NO: 34906840 NR Description: putative protein kinase HvPKABA1
MDMPIMHDGDRYELVRDIGSGNFGVARLMRNRADGQLVAVKYIERGEKIDENVQREIINHRSLRHPNIIRFKEVILTPTHLAIVMEYASGGELFERICNAGRFSEDEARFFFQQLISGVSYCHSMQVCHRDLKLENTLLDGSTAPRLKICDFGYSKSSVLHSQPKSTVGTPAYIAPEVLLKKEYDGKVADVWSCGVTLYVMLVGAYPFEDPD

SEQ ID NO: 32738 - protein, 210 aa, Zea mays subsp. mays
  peptide (1)..(210): Ceres Seq. ID no. 12343303
  misc_feature (10)..(210): Pfam Name: Pfam Description:  Protein kinase domain
  misc_feature (1)..(210): NCBI GI NO: 31415944 NR Description: putative serine-threonine protein kinase
  misc_feature (1)..(210): NCBI GI NO: 18418337 NR Description: protein kinase - like protein
  misc_feature (1)..(210): NCBI GI NO: 15240124 NR Description: protein kinase, 41K (EC 2
  misc_feature (1)..(210): NCBI GI NO: 7446439 NR Description: probable serine/threonine-specific protein kinase
  misc_feature (1)..(210): NCBI GI NO: 20260398 NR Description: putative protein [Arabidopsis thaliana]
  misc_feature (1)..(210): NCBI GI NO: 15229772 NR Description: protein kinase SPK-2; protein id: At3g50500
  misc_feature (1)..(210): NCBI GI NO: 21593534 NR Description: protein kinase SPK-2 [Arabidopsis thaliana]
  misc_feature (1)..(210): NCBI GI NO: 6739629 NR Description: abscisic acid-activated protein kinase
  misc_feature (8)..(210): NCBI GI NO: 29164823 NR Description: abcisic acid-inducible protein kinanase
  misc_feature (8)..(210): NCBI GI NO: 34906840 NR Description: putative protein kinase HvPKABA1
MPIMHDGDRYELVRDIGSGNFGVARLMRNRADGQLVAVKYIERGEKIDENVQREIINHRSLRHPNIIRFKEVILTPTHLAIVMEYASGGELFERICNAGRFSEDEARFFFQQLISGVSYCHSMQVCHRDLKLENTLLDGSTAPRLKICDFGYSKSSVLHSQPKSTVGTPAYIAPEVLLKKEYDGKVADVWSCGVTLYVMLVGAYPFEDPD

SEQ ID NO: 32739 - DNA, 1293 bp, Zea mays subsp. mays
  misc_feature (1)..(1293): Ceres Seq. ID no. 12353343
gtcccgctggtggcgtcctttttttccgccgggagataaaccgaccggacccctgactgcgacccgcagctgctcctgcttccgatccgaacttctctcgcccgccggttcttcgcgagcaattcttataaagcatcatcatcaccacttgtgatgggtggaagccagtacgatgatgaatgggtgttgcccagtgccgatatcactcttgttcttgttgggaaacttggctatggaaagagtgcaactggaaatagcatccttggacgggaagcatttgtatcagaatattcacattctggtgttactaatacttgtcagctgggaagcactaccctgatggacggccggaccatcaatgttattgatacaccagggttatttgatatgagcattgcatcagacgatgctggtaaagagattgttaaatgtatgaacatggctaaagatgggatacatgcagttctaatggtttttagtggcacatctcggttttctcgagaggatgcaagtacaattgagactattaaggtcttttttggagaaaagattgttgaccacatggttttagtttttacttatggtgatctagttggtgaatctaagttgaagaacatgctcaatgatgcgccagagtatttgcagaatgttgttgagctatgccaaaacagagttgtcgtcttcgataacaggaccaaggaccgaaggctccaagcgcagcaacttgacaaattgctctatgtagtggactcggtttgtgcaaacaatggaggaaaaccatttacagatcaaatgttcactcgcatcaaggaggtgcatgatagggaaaaagaggtgcataccttgggatattcagatgagcagatatctgagttgaaggaggagattcatagaactagggatgaacagcttgcacagataaccagcatggtcgaggaaaagctaaaccgcactgtggagaagctgcaacagcagctcatggaggaacagaacgcaaggctggaggccgagaaggtggcgcatgaagctatgcggaaatcagaagcgcagatccaggagctgaaggagagactcgagaaggctcgactggaaaacgaggagttccggaggatggcgcagagcagtaaatgtgctatcctatagtacttgctagaaaaactctgtgcggctatcgtgctgacgcgtctcttttttttttttgtctgtagcacctttttttaacagtttatttattacgcgacaactgttatgaagacactgctttgcttccgtatattatcttcttttttgcgc

SEQ ID NO: 32740 - protein, 329 aa, Zea mays subsp. mays
  peptide (1)..(329): Ceres Seq. ID no. 12353344
  misc_feature (18)..(220): Pfam Name: Pfam Description:  AIG1 family
  misc_feature (7)..(327): NCBI GI NO: 38346576 NR Description: OSJNBa0064D20.7
  misc_feature (1)..(329): NCBI GI NO: 4097585 NR Description: NTGP4 [Nicotiana tabacum]
  misc_feature (1)..(326): NCBI GI NO: 18399081 NR Description: expressed protein; protein id: At1g33970
  misc_feature (1)..(326): NCBI GI NO: 24417378 NR Description: unknown [Arabidopsis thaliana]
  misc_feature (1)..(326): NCBI GI NO: 25373414 NR Description: hypothetical protein F12G12
  misc_feature (41)..(326): NCBI GI NO: 12324509 NR Description: AIG1-like protein, 5' partial; 1-1205
  misc_feature (8)..(305): NCBI GI NO: 15217724 NR Description: AIG1-like protein; protein id: At1g33930.1
  misc_feature (19)..(329): NCBI GI NO: 15217731 NR Description: AIG1; protein id: At1g33960
  misc_feature (19)..(329): NCBI GI NO: 10092442 NR Description: disease resistance protein AIG1; 916-2572
  misc_feature (7)..(329): NCBI GI NO: 15234871 NR Description: AIG1-like protein; protein id: At4g09950.1
MGGSQYDDEWVLPSADITLVLVGKLGYGKSATGNSILGREAFVSEYSHSGVTNTCQLGSTTLMDGRTINVIDTPGLFDMSIASDDAGKEIVKCMNMAKDGIHAVLMVFSGTSRFSREDASTIETIKVFFGEKIVDHMVLVFTYGDLVGESKLKNMLNDAPEYLQNVVELCQNRVVVFDNRTKDRRLQAQQLDKLLYVVDSVCANNGGKPFTDQMFTRIKEVHDREKEVHTLGYSDEQISELKEEIHRTRDEQLAQITSMVEEKLNRTVEKLQQQLMEEQNARLEAEKVAHEAMRKSEAQIQELKERLEKARLENEEFRRMAQSSKCAIL

SEQ ID NO: 32741 - protein, 267 aa, Zea mays subsp. mays
  peptide (1)..(267): Ceres Seq. ID no. 12353345
  misc_feature (1)..(158): Pfam Name: Pfam Description:  AIG1 family
  misc_feature (1)..(265): NCBI GI NO: 38346576 NR Description: OSJNBa0064D20.7
  misc_feature (1)..(267): NCBI GI NO: 4097585 NR Description: NTGP4 [Nicotiana tabacum]
  misc_feature (1)..(264): NCBI GI NO: 18399081 NR Description: expressed protein; protein id: At1g33970
  misc_feature (1)..(264): NCBI GI NO: 24417378 NR Description: unknown [Arabidopsis thaliana]
  misc_feature (1)..(264): NCBI GI NO: 25373414 NR Description: hypothetical protein F12G12
  misc_feature (1)..(264): NCBI GI NO: 12324509 NR Description: AIG1-like protein, 5' partial; 1-1205
  misc_feature (1)..(243): NCBI GI NO: 15217724 NR Description: AIG1-like protein; protein id: At1g33930.1
  misc_feature (1)..(267): NCBI GI NO: 15217731 NR Description: AIG1; protein id: At1g33960
  misc_feature (1)..(267): NCBI GI NO: 10092442 NR Description: disease resistance protein AIG1; 916-2572
  misc_feature (1)..(267): NCBI GI NO: 15234871 NR Description: AIG1-like protein; protein id: At4g09950.1
MDGRTINVIDTPGLFDMSIASDDAGKEIVKCMNMAKDGIHAVLMVFSGTSRFSREDASTIETIKVFFGEKIVDHMVLVFTYGDLVGESKLKNMLNDAPEYLQNVVELCQNRVVVFDNRTKDRRLQAQQLDKLLYVVDSVCANNGGKPFTDQMFTRIKEVHDREKEVHTLGYSDEQISELKEEIHRTRDEQLAQITSMVEEKLNRTVEKLQQQLMEEQNARLEAEKVAHEAMRKSEAQIQELKERLEKARLENEEFRRMAQSSKCAIL

SEQ ID NO: 32742 - protein, 251 aa, Zea mays subsp. mays
  peptide (1)..(251): Ceres Seq. ID no. 12353346
  misc_feature (1)..(142): Pfam Name: Pfam Description:  AIG1 family
  misc_feature (1)..(249): NCBI GI NO: 38346576 NR Description: OSJNBa0064D20.7
  misc_feature (1)..(251): NCBI GI NO: 4097585 NR Description: NTGP4 [Nicotiana tabacum]
  misc_feature (1)..(248): NCBI GI NO: 18399081 NR Description: expressed protein; protein id: At1g33970
  misc_feature (1)..(248): NCBI GI NO: 24417378 NR Description: unknown [Arabidopsis thaliana]
  misc_feature (1)..(248): NCBI GI NO: 25373414 NR Description: hypothetical protein F12G12
  misc_feature (1)..(248): NCBI GI NO: 12324509 NR Description: AIG1-like protein, 5' partial; 1-1205
  misc_feature (1)..(227): NCBI GI NO: 15217724 NR Description: AIG1-like protein; protein id: At1g33930.1
  misc_feature (1)..(251): NCBI GI NO: 15217731 NR Description: AIG1; protein id: At1g33960
  misc_feature (1)..(251): NCBI GI NO: 10092442 NR Description: disease resistance protein AIG1; 916-2572
  misc_feature (1)..(251): NCBI GI NO: 15234871 NR Description: AIG1-like protein; protein id: At4g09950.1
MSIASDDAGKEIVKCMNMAKDGIHAVLMVFSGTSRFSREDASTIETIKVFFGEKIVDHMVLVFTYGDLVGESKLKNMLNDAPEYLQNVVELCQNRVVVFDNRTKDRRLQAQQLDKLLYVVDSVCANNGGKPFTDQMFTRIKEVHDREKEVHTLGYSDEQISELKEEIHRTRDEQLAQITSMVEEKLNRTVEKLQQQLMEEQNARLEAEKVAHEAMRKSEAQIQELKERLEKARLENEEFRRMAQSSKCAIL

SEQ ID NO: 32743 - DNA, 1612 bp, Zea mays subsp. mays
  misc_feature (1)..(1612): Ceres Seq. ID no. 12374154
gcactgttcaaacaaaccctccactgccctccccactctccccttcaccgcgccgcactcccaagtcccaacaggcctaaatggcggcggccggaacaattcccggcgccgccgcagccattggcgcttctgtgtcccaacgccaacgtcgcgtcggcgctccttctttcgtagctgcctacgtctccgagggcacccgcctcgtctgccggaggcagctccgtccggctccggtcctcgcttcttccttcatctccctttctcatccagcgaggcggcggttcctctgcgatgctgcggccggagcctcctcaggtcccgctggagaagccaagccccagggatttgcagagagatacccagctcttgtcacaggtttcttcttcttcttgtggtattttctgaatgtaatatttaacatcctcaacaagaagatcttcgactacttcccctatccatattttgtgtcagtgagccatctttttattggagtactatactgccttattggctggagcttcggcatcccaaagcgcgcgccaatcaactcaacacttctgaagcagcttgttccagttgcggtttgcccatgccattggccatgtaacaagcactgtgtcatttgctgctgtagctgtgtcatttgcccacactattaaagctctcgagccattcttcaatgcggctgcttcccagtttatccttggacaaccagttccattgacactctggctgtctcttgttccagtggtgattggtgtctcggtagcatccctcactgaactctcatttaattggactggcttcattaatgccatgatctcaaatatttctttcacctaccgaagcatctattctaagaaggctatgactgacatggatagtaccaacttgtatgcatacatatcaataattgctctctttgtctgcatcccccctgcaattattattgaaggacctcaattagtgcagcatggttttaaagatgcaattgccaaagttggattaacaaagttgatttctaatttttttgtggtgggcttattctatcacctttataaccaggttgctacaaacacattggagcgggtagcccctttaacacatgccatcggcaatgtgttgaaacgtgttttcgtcattggcttttccatcatcgcattcggcaacaagatcaccacacagactggaattggcacttccattgctgtttctggtgttgccctctactcatttataaaggctaagattgaggagaaaaagcaaataaagagtgcataaggtgttggctgatgtggatgcggttggtttgtcgctttgatggacctctattctctcggtgaacgaacaaacttgcaagatggataaaatcttgctatctcctagtacatttgattgttattcccagtctggtactgaggtgtgcggttgttgttggctaacttgtttatttgaagcaaatttgagcaatgctcagtggcatggaatttccatttctgttttccttcgctcatttattctgacttgacatggtgctattgtaatcttaagcagtagtgtctctagaatgttttccccaaggagatttcagtaccaaatttgaacaatcctc

SEQ ID NO: 32744 - protein, 192 aa, Zea mays subsp. mays
  peptide (1)..(192): Ceres Seq. ID no. 12374155
  misc_feature (1)..(169): NCBI GI NO: 1352200 NR Description: TRIOSE PHOSPHATE/PHOSPHATE TRANSLOCATOR
  misc_feature (32)..(169): NCBI GI NO: 34904488 NR Description: putative triose phosphate/phosphate translocator
  misc_feature (1)..(169): NCBI GI NO: 13195734 NR Description: triose phosphate translocator [Triticum aestivum]
  misc_feature (32)..(169): NCBI GI NO: 13518113 NR Description: triose phosphate/phosphate translocator
  misc_feature (7)..(169): NCBI GI NO: 9757731 NR Description: phosphate/triose-phosphate translocator precursor
  misc_feature (7)..(169): NCBI GI NO: 21593093 NR Description: phosphate/triose-phosphate translocator precursor
  misc_feature (35)..(169): NCBI GI NO: 117291 NR Description: TRIOSE PHOSPHATE/PHOSPHATE TRANSLOCATOR
  misc_feature (11)..(169): NCBI GI NO: 9295273 NR Description: triose phosphate/phosphate translocator precursor
  misc_feature (7)..(169): NCBI GI NO: 30694881 NR Description: phosphate/triose-phosphate translocator, putative
  misc_feature (35)..(169): NCBI GI NO: 117290 NR Description: TRIOSE PHOSPHATE/PHOSPHATE TRANSLOCATOR
MAAAGTIPGAAAAIGASVSQRQRRVGAPSFVAAYVSEGTRLVCRRQLRPAPVLASSFISLSHPARRRFLCDAAAGASSGPAGEAKPQGFAERYPALVTGFFFFLWYFLNVIFNILNKKIFDYFPYPYFVSVSHLFIGVLYCLIGWSFGIPKRAPINSTLLKQLVPVAVCPCHWPCNKHCVICCCSCVICPHY

SEQ ID NO: 32745 - protein, 154 aa, Zea mays subsp. mays
  peptide (1)..(154): Ceres Seq. ID no. 12374156
  misc_feature (1)..(154): NCBI GI NO: 1352200 NR Description: TRIOSE PHOSPHATE/PHOSPHATE TRANSLOCATOR
  misc_feature (1)..(154): NCBI GI NO: 34904488 NR Description: putative triose phosphate/phosphate translocator
  misc_feature (1)..(154): NCBI GI NO: 13195734 NR Description: triose phosphate translocator [Triticum aestivum]
  misc_feature (1)..(154): NCBI GI NO: 13518113 NR Description: triose phosphate/phosphate translocator
  misc_feature (1)..(153): NCBI GI NO: 9757731 NR Description: phosphate/triose-phosphate translocator precursor
  misc_feature (1)..(154): NCBI GI NO: 21593093 NR Description: phosphate/triose-phosphate translocator precursor
  misc_feature (1)..(153): NCBI GI NO: 117291 NR Description: TRIOSE PHOSPHATE/PHOSPHATE TRANSLOCATOR
  misc_feature (1)..(154): NCBI GI NO: 9295273 NR Description: triose phosphate/phosphate translocator precursor
  misc_feature (1)..(154): NCBI GI NO: 30694881 NR Description: phosphate/triose-phosphate translocator, putative
  misc_feature (1)..(154): NCBI GI NO: 117290 NR Description: TRIOSE PHOSPHATE/PHOSPHATE TRANSLOCATOR
MISNISFTYRSIYSKKAMTDMDSTNLYAYISIIALFVCIPPAIIIEGPQLVQHGFKDAIAKVGLTKLISNFFVVGLFYHLYNQVATNTLERVAPLTHAIGNVLKRVFVIGFSIIAFGNKITTQTGIGTSIAVSGVALYSFIKAKIEEKKQIKSA

SEQ ID NO: 32746 - protein, 138 aa, Zea mays subsp. mays
  peptide (1)..(138): Ceres Seq. ID no. 12374157
HCSNKPSTALPTLPFTAPHSQVPTGLNGGGRNNSRRRRSHWRFCVPTPTSRRRSFFRSCLRLRGHPPRLPEAAPSGSGPRFFLHLPFSSSEAAVPLRCCGRSLLRSRWRSQAPGICREIPSSCHRFLLLLVVFSECNI

SEQ ID NO: 32747 - DNA, 1081 bp, Zea mays subsp. mays
  misc_feature (1)..(1081): Ceres Seq. ID no. 12411966
agcagttgggctctctcggcccgcctccttcccgagcacgcacgccgcctcgcttccaattcttccccccctctcctcgtccgctccgctccgctcctgcgttgccgtggagtgccgcccggggctccattccattccacccgtagcccggtccccccgcgccgccggcgcgccggttccttcggttcccgggatcaagatgattggttcattcattaccggaatgctaacgcttgttctcggatacgcgtaccctgcatacgactgctacaagacagtggagctgaacaggcctgaggtcgagcagctgcggttctggtgtcagtactggattttactcgcgtttctcaccgtactggagagagttggggaaagtttcgtatcatggttgccaatgtatagtgaagcaaagctcgcatttatcgtgtacttgtggtatccaaagacacgggggactgcctatgtatacgagtcattcttcaagccatacattgcaaaacatgaaactgagattgatcgaaatctgcttgagttgaggacaagggccggtgacatggcagttctttatttccagagggttacaaactatgctcagacaaggtcttatgaaatcttgcagtatattgcctcacagtcaccgactcaaagacaggcacatcagcagcagcaacgcccaccaccgccacggactcggcaggtcaaccctgcacctccacctattcccgcttggctgggggatctggaccaccgcaaaattagcgtcgatcaagatttccatctcacgcgaattgcaccacactggtctggttcttggtgattgactgagaagagggggaatgctgagttggttgaacagagtttgggtttcctcgcatgcgttctccgttgtacgaactggaaccggtttggtctcgaattgtgaatagtatcccagaaacagaagtggatgatcatttcaattcacagtgtagcgctaggaaatatggttgggaaccatcttctgcaagacgcgaaggcgcgacatgtcatgagcatttagcaacgatgatactactggtcacagtagtgtagtctggaattc

SEQ ID NO: 32748 - protein, 271 aa, Zea mays subsp. mays
  peptide (1)..(271): Ceres Seq. ID no. 12411967
  misc_feature (69)..(164): Pfam Name: Pfam Description:  TB2/DP1, HVA22 family
  misc_feature (67)..(223): NCBI GI NO: 20502988 NR Description: Putative InsB from Escherichia coli
  misc_feature (67)..(238): NCBI GI NO: 18422223 NR Description: expressed protein; protein id: At5g42560
  misc_feature (67)..(238): NCBI GI NO: 21553813 NR Description: unknown [Arabidopsis thaliana]
  misc_feature (75)..(238): NCBI GI NO: 9759014 NR Description: gene_id:K16E1.3~unknown protein
  misc_feature (67)..(235): NCBI GI NO: 18394805 NR Description: expressed protein; protein id: At1g19950
  misc_feature (67)..(235): NCBI GI NO: 21553483 NR Description: pathogenicity protein PATH531-like protein
  misc_feature (78)..(227): NCBI GI NO: 15222332 NR Description: hypothetical protein; protein id: At1g75700.1
  misc_feature (78)..(235): NCBI GI NO: 25513732 NR Description: T20H2.26 protein - Arabidopsis thaliana
  misc_feature (67)..(231): NCBI GI NO: 37531658 NR Description: putative Magnaporthe grisea pathogenicity protein
  misc_feature (66)..(224): NCBI GI NO: 21671921 NR Description: Putative protein with HVA22 domain
AVGLSRPASFPSTHAASLPILPPLSSSAPLRSCVAVECRPGLHSIPPVARSPRAAGAPVPSVPGIKMIGSFITGMLTLVLGYAYPAYDCYKTVELNRPEVEQLRFWCQYWILLAFLTVLERVGESFVSWLPMYSEAKLAFIVYLWYPKTRGTAYVYESFFKPYIAKHETEIDRNLLELRTRAGDMAVLYFQRVTNYAQTRSYEILQYIASQSPTQRQAHQQQQRPPPPRTRQVNPAPPPIPAWLGDLDHRKISVDQDFHLTRIAPHWSGSW

SEQ ID NO: 32749 - protein, 205 aa, Zea mays subsp. mays
  peptide (1)..(205): Ceres Seq. ID no. 12411968
  misc_feature (3)..(98): Pfam Name: Pfam Description:  TB2/DP1, HVA22 family
  misc_feature (1)..(157): NCBI GI NO: 20502988 NR Description: Putative InsB from Escherichia coli
  misc_feature (1)..(172): NCBI GI NO: 18422223 NR Description: expressed protein; protein id: At5g42560
  misc_feature (1)..(172): NCBI GI NO: 21553813 NR Description: unknown [Arabidopsis thaliana]
  misc_feature (9)..(172): NCBI GI NO: 9759014 NR Description: gene_id:K16E1.3~unknown protein
  misc_feature (1)..(169): NCBI GI NO: 18394805 NR Description: expressed protein; protein id: At1g19950
  misc_feature (1)..(169): NCBI GI NO: 21553483 NR Description: pathogenicity protein PATH531-like protein
  misc_feature (12)..(161): NCBI GI NO: 15222332 NR Description: hypothetical protein; protein id: At1g75700.1
  misc_feature (12)..(169): NCBI GI NO: 25513732 NR Description: T20H2.26 protein - Arabidopsis thaliana
  misc_feature (1)..(165): NCBI GI NO: 37531658 NR Description: putative Magnaporthe grisea pathogenicity protein
  misc_feature (1)..(158): NCBI GI NO: 21671921 NR Description: Putative protein with HVA22 domain
MIGSFITGMLTLVLGYAYPAYDCYKTVELNRPEVEQLRFWCQYWILLAFLTVLERVGESFVSWLPMYSEAKLAFIVYLWYPKTRGTAYVYESFFKPYIAKHETEIDRNLLELRTRAGDMAVLYFQRVTNYAQTRSYEILQYIASQSPTQRQAHQQQQRPPPPRTRQVNPAPPPIPAWLGDLDHRKISVDQDFHLTRIAPHWSGSW

SEQ ID NO: 32750 - protein, 197 aa, Zea mays subsp. mays
  peptide (1)..(197): Ceres Seq. ID no. 12411969
  misc_feature (1)..(90): Pfam Name: Pfam Description:  TB2/DP1, HVA22 family
  misc_feature (1)..(149): NCBI GI NO: 20502988 NR Description: Putative InsB from Escherichia coli
  misc_feature (1)..(164): NCBI GI NO: 18422223 NR Description: expressed protein; protein id: At5g42560
  misc_feature (1)..(164): NCBI GI NO: 21553813 NR Description: unknown [Arabidopsis thaliana]
  misc_feature (1)..(164): NCBI GI NO: 9759014 NR Description: gene_id:K16E1.3~unknown protein
  misc_feature (1)..(161): NCBI GI NO: 18394805 NR Description: expressed protein; protein id: At1g19950
  misc_feature (1)..(161): NCBI GI NO: 21553483 NR Description: pathogenicity protein PATH531-like protein
  misc_feature (4)..(153): NCBI GI NO: 15222332 NR Description: hypothetical protein; protein id: At1g75700.1
  misc_feature (4)..(161): NCBI GI NO: 25513732 NR Description: T20H2.26 protein - Arabidopsis thaliana
  misc_feature (1)..(157): NCBI GI NO: 37531658 NR Description: putative Magnaporthe grisea pathogenicity protein
  misc_feature (1)..(150): NCBI GI NO: 21671921 NR Description: Putative protein with HVA22 domain
MLTLVLGYAYPAYDCYKTVELNRPEVEQLRFWCQYWILLAFLTVLERVGESFVSWLPMYSEAKLAFIVYLWYPKTRGTAYVYESFFKPYIAKHETEIDRNLLELRTRAGDMAVLYFQRVTNYAQTRSYEILQYIASQSPTQRQAHQQQQRPPPPRTRQVNPAPPPIPAWLGDLDHRKISVDQDFHLTRIAPHWSGSW

SEQ ID NO: 32751 - DNA, 1191 bp, Zea mays subsp. mays
  misc_feature (1)..(1191): Ceres Seq. ID no. 13634967
agctccctttaatacctcaccctcctctcctcccttctctggactggccggatctcttccctgcagatcgagaggcactgccacaccaccatcaccccatgctcaacatgatgactgatctgagctgcgggccgtcgtccaaggtcaaggagcaggtggcggcggcgcgacgggctccggcgacaggcaggggcaggggagaggcaagatcgagatcaagcgcatcgagaacacgacgagccggcaggtgaccttctgcaagcgccgcaacggcctgctcaagaaggcgtacgagctctcggtgctctgcgacgccgaggtcgcgctcgtcgtcttctccagccgcggccgcctctacgagtacgccaacaacagtgtgaagtccaccattgagaggtacaagaaggccaacagtgactcctccaactctgggcacagttgcagaagtcaatgcccagtactaccagcaggagtcctccaagctgcgacagatgatccacagcttgcaaaacgcaaacactaggaacatagtgggagattccatccacaccatgggcctcagggatcttaaacaaatggagggcaagctggagaaagccataatcaagattagagctagaaagaatgagctgctatacgctgaagttgactatatgcaaaaaagggagatggatctgcagactgacaacatgtacctgaggagcaagatcgctgagagtaatgaaacggggcagccggcgatgcacatgacgatgggagcgccgccgacgagcgagtacgaccacatggcccctttcgactcgagaaactttctgcaagtgagcatgcctcagcactactcccatcagctgcaacctacaaccctccagctcggatgatgaaatcagcgctatacctggcggcgcccggcccccaatcgagatagatcacgcatgcagttatatcatgtgccaaatcgagatctcaagtaactctacgtacgtttgcttaattattaataattgtgattagtgcaactgttagggtatatatatttgtgagtgccaccactgtgtgcgtgcatttgtacgtgtgaatttagctgttgcatctactactattgtaccctccggccaggccatatcatcagaaacgcgggtttatttacgcatacttatatatatatatgatttgtgtgctttatatagattg

SEQ ID NO: 32752 - protein, 128 aa, Zea mays subsp. mays
  peptide (1)..(128): Ceres Seq. ID no. 13634968
  misc_feature (1)..(75): Pfam Name: Pfam Description:  K-box region
  misc_feature (1)..(128): NCBI GI NO: 1006768 NR Description: ZMM2 [Zea mays]
  misc_feature (1)..(128): NCBI GI NO: 2130078 NR Description: MADS-box protein 3 - rice
  misc_feature (1)..(128): NCBI GI NO: 34903684 NR Description: putative MADS-box protein
  misc_feature (1)..(128): NCBI GI NO: 19698536 NR Description: AGAMOUS-like protein 1 HvAG1
  misc_feature (1)..(128): NCBI GI NO: 29372746 NR Description: putative MADS-domain transcription factor
  misc_feature (1)..(128): NCBI GI NO: 7446524 NR Description: hypothetical protein - maize
  misc_feature (1)..(128): NCBI GI NO: 18650789 NR Description: MADS-box transcription factor
  misc_feature (1)..(125): NCBI GI NO: 19698538 NR Description: AGAMOUS-like protein 2 HvAG2
  misc_feature (1)..(119): NCBI GI NO: 24636577 NR Description: MADS box transcription factor [Triticum aestivum]
  misc_feature (1)..(127): NCBI GI NO: 3913007 NR Description: AGAMOUS protein (NAG1)
MIHSLQNANTRNIVGDSIHTMGLRDLKQMEGKLEKAIIKIRARKNELLYAEVDYMQKREMDLQTDNMYLRSKIAESNETGQPAMHMTMGAPPTSEYDHMAPFDSRNFLQVSMPQHYSHQLQPTTLQLG

SEQ ID NO: 32753 - protein, 108 aa, Zea mays subsp. mays
  peptide (1)..(108): Ceres Seq. ID no. 13634969
  misc_feature (1)..(55): Pfam Name: Pfam Description:  K-box region
  misc_feature (1)..(108): NCBI GI NO: 1006768 NR Description: ZMM2 [Zea mays]
  misc_feature (1)..(108): NCBI GI NO: 2130078 NR Description: MADS-box protein 3 - rice
  misc_feature (1)..(108): NCBI GI NO: 34903684 NR Description: putative MADS-box protein
  misc_feature (1)..(108): NCBI GI NO: 19698536 NR Description: AGAMOUS-like protein 1 HvAG1
  misc_feature (1)..(108): NCBI GI NO: 29372746 NR Description: putative MADS-domain transcription factor
  misc_feature (1)..(108): NCBI GI NO: 7446524 NR Description: hypothetical protein - maize
  misc_feature (1)..(108): NCBI GI NO: 18650789 NR Description: MADS-box transcription factor
  misc_feature (1)..(105): NCBI GI NO: 19698538 NR Description: AGAMOUS-like protein 2 HvAG2
  misc_feature (1)..(99): NCBI GI NO: 24636577 NR Description: MADS box transcription factor [Triticum aestivum]
  misc_feature (1)..(107): NCBI GI NO: 3913007 NR Description: AGAMOUS protein (NAG1)
MGLRDLKQMEGKLEKAIIKIRARKNELLYAEVDYMQKREMDLQTDNMYLRSKIAESNETGQPAMHMTMGAPPTSEYDHMAPFDSRNFLQVSMPQHYSHQLQPTTLQLG

SEQ ID NO: 32754 - protein, 100 aa, Zea mays subsp. mays
  peptide (1)..(100): Ceres Seq. ID no. 13634970
  misc_feature (1)..(100): NCBI GI NO: 1006768 NR Description: ZMM2 [Zea mays]
  misc_feature (1)..(100): NCBI GI NO: 2130078 NR Description: MADS-box protein 3 - rice
  misc_feature (1)..(100): NCBI GI NO: 34903684 NR Description: putative MADS-box protein
  misc_feature (1)..(100): NCBI GI NO: 19698536 NR Description: AGAMOUS-like protein 1 HvAG1
  misc_feature (1)..(100): NCBI GI NO: 29372746 NR Description: putative MADS-domain transcription factor
  misc_feature (1)..(100): NCBI GI NO: 7446524 NR Description: hypothetical protein - maize
  misc_feature (1)..(100): NCBI GI NO: 18650789 NR Description: MADS-box transcription factor
  misc_feature (1)..(97): NCBI GI NO: 19698538 NR Description: AGAMOUS-like protein 2 HvAG2
  misc_feature (1)..(91): NCBI GI NO: 24636577 NR Description: MADS box transcription factor [Triticum aestivum]
  misc_feature (1)..(99): NCBI GI NO: 3913007 NR Description: AGAMOUS protein (NAG1)
MEGKLEKAIIKIRARKNELLYAEVDYMQKREMDLQTDNMYLRSKIAESNETGQPAMHMTMGAPPTSEYDHMAPFDSRNFLQVSMPQHYSHQLQPTTLQLG

SEQ ID NO: 32755 - DNA, 1623 bp, Zea mays subsp. mays
  misc_feature (1)..(1623): Ceres Seq. ID no. 12373419
aatcgcttccccagaccccagtccccagtccccttttcccaacggccacactttcatcagttcccctttccacggcgccgccggaatccccacaaagccccaaaaccctacggccacctcgccacccccaacgaaaacccagaccacgagatggcccccggtggagagggcaagccaagcacgggcggcggcggcggcggcgggaggaagcgcaagttccttccccacgggaagccggtgcggaagggggcctacccgctgcgccccggcgtgcagggcttcttcatcacctgcgacggcggccgcgagcaccaggccacccgcgaggcgctctccctcctcgactccttctatgaagacctggtggatgggaaaggatcggatgagaagcctaaaaacattccagagaagccactgaacaaaaagataaagtttgaggactctgattcctcagatgatgaggatgaagacaactctggtgaggaagccgacaatgggaatgtgaatgatgtggagaaaggtgaaaccgctccatctgagaagcaacaggaggtgcttgatacctctaataccgcaagcaaggacaatactgctctatctgagaagaaagaggaggtgcttgatacctctgataccgtgagtaaggacaatgaggaacaagcagtcactgctgatgaaccaagagaaaagaagcaacgagtggaagatcctccagtttttgagcaggccgtgcaaaaagagactgctgatgaaccaaaggagtccactgataaaccaaaggagtccagtgaaaaaaatattgacgatttaattgatgaggacctgaaagaaataggggacaggaaaaagaggctctttgcaagcctcgagacaggctgcaatggatgcatattcattcaaatgcataaaagagcaggagaccctggtccagttgagattgtacaaaacatgatgtcatctgctgcattgactcgtaaacatatgtcaagatttattctgcgagttttgcctgttgaggtggcatgctatgcatctgaagaggaaataacaaaggcaattagtccccttattgaaaagtacttcccaaaagaatgctcctcaggtcataagtttgcagtgttatatgaagcaaggtcaaacacaggaattgatagaatgaaaatcataaacgcagcagcgaaatctgtaccacaacctcataaagttgacctgaagaacccagacaagactattgttgtccagattgcaaagaccatatgcatgattggagttgtggaaaggtacaaagagctctcgaagttcaacctaaggcagctgacctcaccggagtcggagaagtaagcctatgagtgacaaaatcttccaggcaaaacgtggaccaacttaaatcagcagcagcgtcaggtggttaggcgctagcgaattaaattatggccggccgaacctcactgtcttgaaagattcagatgttctaatgtttaatgctttaccaccagtggttagtggttgctggttcatgcttcccaggttagattcacggtttttttttgaggctgtagaaagatctgacgatacttcatgtgtgctttctctctgacgatggttccatacaggggcttaccg

SEQ ID NO: 32756 - protein, 446 aa, Zea mays subsp. mays
  peptide (1)..(446): Ceres Seq. ID no. 12373420
  misc_feature (334)..(426): Pfam Name: Pfam Description:  THUMP domain
  misc_feature (69)..(441): NCBI GI NO: 18416857 NR Description: putative protein; protein id: At5g12410.1
  misc_feature (235)..(446): NCBI GI NO: 24657540 NR Description: CG15014-PA [Drosophila melanogaster]
  misc_feature (244)..(441): NCBI GI NO: 31198447 NR Description: ENSANGP00000021551 [Anopheles gambiae]
  misc_feature (252)..(443): NCBI GI NO: 12653357 NR Description: hypothetical protein FLJ20274 [Homo sapiens]
  misc_feature (241)..(446): NCBI GI NO: 38174056 NR Description: Unknown (protein for MGC:75804)
  misc_feature (252)..(439): NCBI GI NO: 21704176 NR Description: RIKEN cDNA 6330575P11
  misc_feature (252)..(439): NCBI GI NO: 34859071 NR Description: similar to RIKEN cDNA 6330575P11
  misc_feature (252)..(443): NCBI GI NO: 8923247 NR Description: hypothetical protein FLJ20274 [Homo sapiens]
  misc_feature (252)..(443): NCBI GI NO: 34365206 NR Description: hypothetical protein [Homo sapiens]
  misc_feature (284)..(443): NCBI GI NO: 2988398 NR Description: Unknown gene product [Homo sapiens]
NRFPRPQSPVPFSQRPHFHQFPFPRRRRNPHKAPKPYGHLATPNENPDHEMAPGGEGKPSTGGGGGGGRKRKFLPHGKPVRKGAYPLRPGVQGFFITCDGGREHQATREALSLLDSFYEDLVDGKGSDEKPKNIPEKPLNKKIKFEDSDSSDDEDEDNSGEEADNGNVNDVEKGETAPSEKQQEVLDTSNTASKDNTALSEKKEEVLDTSDTVSKDNEEQAVTADEPREKKQRVEDPPVFEQAVQKETADEPKESTDKPKESSEKNIDDLIDEDLKEIGDRKKRLFASLETGCNGCIFIQMHKRAGDPGPVEIVQNMMSSAALTRKHMSRFILRVLPVEVACYASEEEITKAISPLIEKYFPKECSSGHKFAVLYEARSNTGIDRMKIINAAAKSVPQPHKVDLKNPDKTIVVQIAKTICMIGVVERYKELSKFNLRQLTSPESEK

SEQ ID NO: 32757 - protein, 396 aa, Zea mays subsp. mays
  peptide (1)..(396): Ceres Seq. ID no. 12373421
  misc_feature (284)..(376): Pfam Name: Pfam Description:  THUMP domain
  misc_feature (19)..(391): NCBI GI NO: 18416857 NR Description: putative protein; protein id: At5g12410.1
  misc_feature (185)..(396): NCBI GI NO: 24657540 NR Description: CG15014-PA [Drosophila melanogaster]
  misc_feature (194)..(391): NCBI GI NO: 31198447 NR Description: ENSANGP00000021551 [Anopheles gambiae]
  misc_feature (202)..(393): NCBI GI NO: 12653357 NR Description: hypothetical protein FLJ20274 [Homo sapiens]
  misc_feature (191)..(396): NCBI GI NO: 38174056 NR Description: Unknown (protein for MGC:75804)
  misc_feature (202)..(389): NCBI GI NO: 21704176 NR Description: RIKEN cDNA 6330575P11
  misc_feature (202)..(389): NCBI GI NO: 34859071 NR Description: similar to RIKEN cDNA 6330575P11
  misc_feature (202)..(393): NCBI GI NO: 8923247 NR Description: hypothetical protein FLJ20274 [Homo sapiens]
  misc_feature (202)..(393): NCBI GI NO: 34365206 NR Description: hypothetical protein [Homo sapiens]
  misc_feature (234)..(393): NCBI GI NO: 2988398 NR Description: Unknown gene product [Homo sapiens]
MAPGGEGKPSTGGGGGGGRKRKFLPHGKPVRKGAYPLRPGVQGFFITCDGGREHQATREALSLLDSFYEDLVDGKGSDEKPKNIPEKPLNKKIKFEDSDSSDDEDEDNSGEEADNGNVNDVEKGETAPSEKQQEVLDTSNTASKDNTALSEKKEEVLDTSDTVSKDNEEQAVTADEPREKKQRVEDPPVFEQAVQKETADEPKESTDKPKESSEKNIDDLIDEDLKEIGDRKKRLFASLETGCNGCIFIQMHKRAGDPGPVEIVQNMMSSAALTRKHMSRFILRVLPVEVACYASEEEITKAISPLIEKYFPKECSSGHKFAVLYEARSNTGIDRMKIINAAAKSVPQPHKVDLKNPDKTIVVQIAKTICMIGVVERYKELSKFNLRQLTSPESEK

SEQ ID NO: 32758 - DNA, 1419 bp, Zea mays subsp. mays
  misc_feature (1)..(1419): Ceres Seq. ID no. 12566155
gcacgagaccattacctagaacatcctaatcgaaaaatcagccgcagtcgcgtcgcgtcgcgtcgcgtccagtccaatcctcggagcctcacacgggcggacgagcgggagcttctcccaatctcccctgcccagccctgccctgccgccgcgcttagcttcgcatcttcccctcctcctcctcctccttcctcggccaagcgaggagcgaggcgcgggcgcgagcgcgtcgttgagatggattcggaggcggtgcagcacggctgcgcgcattacagccgtgggtgcagcgtcgtggcgccctgctgcggccaggccttcggctgccgccattgccacaacgacgccaaggttcggtggtttccctcctcccgttttcgcttcggctccggttcagcagatgttctgaaacaaccctgtcccgtgccccggcagaactcgctggaggtcgacccgcgcgaccggcacgagatcccccgccacgaaataaagaaggtgatctgttctctctgctccaaggaacaggacgtgcaacagaactgctccagctgtggggcctgcatgggcaagtacttctgtaaagtatgcaagttcttcgatgatgatgtctcaaagggccagtaccactgtgacggatgtggaatatgtagaactggcggcgtggagaactttttccactgtgataaatgtgggtgttgttacagcaatgtcttgaaggattcccaccactgcgtggaaagagcaatgcatcacaactgccccgtctgcttcgagtatctgttcgactccacaaaggacatcagtgtgctgcaatgtgggcataccatccatttggagtgcatgaacgaaatgagagcacaccatcacttctcatgcccagtgtgctcgaggtccgcctgcgacatgtcggccacgtggcggaaactcgacgaggaggtcgcggccacgccgatgcctgacatctaccagaagcacatggtgtggatcctgtgcaacgactgcagcgcgacctcgagcgtgcggttccacgtgctggggcacaagtgccccgcgtgcagttcgtacaacacccgggagacgagggttgcgtgccccaggatctgaggcgaacgagaggccatgtcacaaaatgccagggagatgccgtccaacgactggtggagatcatctgtctgcaggacgttgctgcgcttaaggttaaaggctagcgcgagaccatgcctggtagtccagtcttgagtctggtgctgtccaggcacacctgtggatcggggccggctcaggattagtggggctgttcatgtttagggcgcgaatgcaacgatatttcacgtgggccgtgggctcggtatgtaactgaaccgattatttctattgcaataataacatgcagttctattgggccgagcctaatcagcc

SEQ ID NO: 32759 - protein, 367 aa, Zea mays subsp. mays
  peptide (1)..(367): Ceres Seq. ID no. 12566156
  misc_feature (140)..(200): Pfam Name: Pfam Description:  CHY zinc finger
  misc_feature (108)..(366): NCBI GI NO: 37535002 NR Description: putative PGPD14 protein
  misc_feature (107)..(361): NCBI GI NO: 4105798 NR Description: PGPD14 [Petunia x hybrida]
  misc_feature (107)..(361): NCBI GI NO: 21593716 NR Description: PGPD14 protein [Arabidopsis thaliana]
  misc_feature (107)..(361): NCBI GI NO: 15237169 NR Description: PGPD14 protein; protein id: At5g22920
  misc_feature (107)..(359): NCBI GI NO: 34910658 NR Description: putative PGPD14 protein
  misc_feature (154)..(358): NCBI GI NO: 15238890 NR Description: putative protein; protein id: At5g18650
  misc_feature (107)..(366): NCBI GI NO: 30102616 NR Description: At3g62970 [Arabidopsis thaliana]
  misc_feature (107)..(366): NCBI GI NO: 30695702 NR Description: expressed protein [Arabidopsis thaliana]
  misc_feature (217)..(336): NCBI GI NO: 15451615 NR Description: Hypothetical protein with similarity to PGPD14
  misc_feature (107)..(366): NCBI GI NO: 11358168 NR Description: hypothetical protein T20O10
ARDHYLEHPNRKISRSRVASRRVQSNPRSLTRADERELLPISPAQPCPAAALSFASSPPPPPPSSAKRGARRGRERVVEMDSEAVQHGCAHYSRGCSVVAPCCGQAFGCRHCHNDAKVRWFPSSRFRFGSGSADVLKQPCPVPRQNSLEVDPRDRHEIPRHEIKKVICSLCSKEQDVQQNCSSCGACMGKYFCKVCKFFDDDVSKGQYHCDGCGICRTGGVENFFHCDKCGCCYSNVLKDSHHCVERAMHHNCPVCFEYLFDSTKDISVLQCGHTIHLECMNEMRAHHHFSCPVCSRSACDMSATWRKLDEEVAATPMPDIYQKHMVWILCNDCSATSSVRFHVLGHKCPACSSYNTRETRVACPRI

SEQ ID NO: 32760 - protein, 288 aa, Zea mays subsp. mays
  peptide (1)..(288): Ceres Seq. ID no. 12566157
  misc_feature (61)..(121): Pfam Name: Pfam Description:  CHY zinc finger
  misc_feature (29)..(287): NCBI GI NO: 37535002 NR Description: putative PGPD14 protein
  misc_feature (28)..(282): NCBI GI NO: 4105798 NR Description: PGPD14 [Petunia x hybrida]
  misc_feature (28)..(282): NCBI GI NO: 21593716 NR Description: PGPD14 protein [Arabidopsis thaliana]
  misc_feature (28)..(282): NCBI GI NO: 15237169 NR Description: PGPD14 protein; protein id: At5g22920
  misc_feature (28)..(280): NCBI GI NO: 34910658 NR Description: putative PGPD14 protein
  misc_feature (75)..(279): NCBI GI NO: 15238890 NR Description: putative protein; protein id: At5g18650
  misc_feature (28)..(287): NCBI GI NO: 30102616 NR Description: At3g62970 [Arabidopsis thaliana]
  misc_feature (28)..(287): NCBI GI NO: 30695702 NR Description: expressed protein [Arabidopsis thaliana]
  misc_feature (138)..(257): NCBI GI NO: 15451615 NR Description: Hypothetical protein with similarity to PGPD14
  misc_feature (28)..(287): NCBI GI NO: 11358168 NR Description: hypothetical protein T20O10
MDSEAVQHGCAHYSRGCSVVAPCCGQAFGCRHCHNDAKVRWFPSSRFRFGSGSADVLKQPCPVPRQNSLEVDPRDRHEIPRHEIKKVICSLCSKEQDVQQNCSSCGACMGKYFCKVCKFFDDDVSKGQYHCDGCGICRTGGVENFFHCDKCGCCYSNVLKDSHHCVERAMHHNCPVCFEYLFDSTKDISVLQCGHTIHLECMNEMRAHHHFSCPVCSRSACDMSATWRKLDEEVAATPMPDIYQKHMVWILCNDCSATSSVRFHVLGHKCPACSSYNTRETRVACPRI

SEQ ID NO: 32761 - DNA, 1332 bp, Zea mays subsp. mays
  misc_feature (1)..(1332): Ceres Seq. ID no. 12387152
aatcccattccagtgcccgtaccgcgccgtccctatcgtgccggatcgccacccgctcgctgcgcccccacctcccccccctcgccggttcgccacttcgccccacctccgcgcctcagatccatccccaatccggcaaccctagcgccgggttcctcctcctcgtctccgcccgccgccgcctccattgccagaggtgatcgagggggagagacagagcttgggtggtcggattagggagagagggaggggaggatgtccagaaggtcggtgaacccgagccggcgggtggcggacgggggcttgccgtccttcggcggcccgttccaccctaagtcacgctcgcctcccgtgctcaccattgccctcgtcgtcctgggtgtcatttttctcattgcctacttcaacagcagcccaggtgtaactgttacgagcaaagagactgtgaccagatctgaaggttcttgcacatcagaagttatgcgggcgcttccatatcttaagaaggcatatggcaatgccatgcaaaaggttctccatgtaggccctgatagttgtacagtagtttctaacctgttgaaagaaggaaaggttgaagcatggggagtggagccttatgatttggaggatactgacagtacttgcaaaagactcgtgcgcaagggctttgtccgtatgtctgatattaagttcccccttccataccgtccagattcttttaatcttgttattgtgtcagatgctttagattatctgaccccaaggtatctgaacaaaacgcttcccggtttagcaagggtttccacagatggccttgtgatttttgctggcaatcctggtcaacagaaagctaaggtctcagaactaccaaaatttggaagaccggcaaaattgcggagttcatcgtggtggacaagatactttgtccagactggcttaacagagaacgaagggccactgaagaaatttgaagaggctacatcccagaacaaataccaaccagattgtcagatcttccacttaagttcgccaaggtgatgcgcatccagaacaccttgggttgttgtcacaccagttctgtaagcagcacctttgcttacccctgttgacttgcgcatctttcgtgcggaggaatggtcacacaaacagagccagccatcagcagtaggttagcttgtgtagagagggagagagagagagaggcctcgacacttgttcctagaaaatccttctggaaattaaattatgtgttaccaatgactgcaaactggagcccgctgggatatatatatgtaagaacttcacgctgttgtactactaagctatgagctg

SEQ ID NO: 32762 - protein, 260 aa, Zea mays subsp. mays
  peptide (1)..(260): Ceres Seq. ID no. 12387153
  misc_feature (1)..(258): NCBI GI NO: 34895744 NR Description: P0019D06.30
  misc_feature (1)..(256): NCBI GI NO: 18408931 NR Description: expressed protein; protein id: At3g49720
  misc_feature (1)..(256): NCBI GI NO: 21593192 NR Description: unknown [Arabidopsis thaliana]
  misc_feature (1)..(256): NCBI GI NO: 18424995 NR Description: putative protein; protein id: At5g65810
  misc_feature (1)..(210): NCBI GI NO: 9758568 NR Description: emb|CAB66910
  misc_feature (90)..(256): NCBI GI NO: 16649137 NR Description: Unknown protein [Arabidopsis thaliana]
MSRRSVNPSRRVADGGLPSFGGPFHPKSRSPPVLTIALVVLGVIFLIAYFNSSPGVTVTSKETVTRSEGSCTSEVMRALPYLKKAYGNAMQKVLHVGPDSCTVVSNLLKEGKVEAWGVEPYDLEDTDSTCKRLVRKGFVRMSDIKFPLPYRPDSFNLVIVSDALDYLTPRYLNKTLPGLARVSTDGLVIFAGNPGQQKAKVSELPKFGRPAKLRSSSWWTRYFVQTGLTENEGPLKKFEEATSQNKYQPDCQIFHLSSPR

SEQ ID NO: 32763 - protein, 185 aa, Zea mays subsp. mays
  peptide (1)..(185): Ceres Seq. ID no. 12387154
  misc_feature (1)..(183): NCBI GI NO: 34895744 NR Description: P0019D06.30
  misc_feature (1)..(181): NCBI GI NO: 18408931 NR Description: expressed protein; protein id: At3g49720
  misc_feature (1)..(181): NCBI GI NO: 21593192 NR Description: unknown [Arabidopsis thaliana]
  misc_feature (1)..(181): NCBI GI NO: 18424995 NR Description: putative protein; protein id: At5g65810
  misc_feature (1)..(135): NCBI GI NO: 9758568 NR Description: emb|CAB66910
  misc_feature (15)..(181): NCBI GI NO: 16649137 NR Description: Unknown protein [Arabidopsis thaliana]
MRALPYLKKAYGNAMQKVLHVGPDSCTVVSNLLKEGKVEAWGVEPYDLEDTDSTCKRLVRKGFVRMSDIKFPLPYRPDSFNLVIVSDALDYLTPRYLNKTLPGLARVSTDGLVIFAGNPGQQKAKVSELPKFGRPAKLRSSSWWTRYFVQTGLTENEGPLKKFEEATSQNKYQPDCQIFHLSSPR

SEQ ID NO: 32764 - protein, 171 aa, Zea mays subsp. mays
  peptide (1)..(171): Ceres Seq. ID no. 12387155
  misc_feature (1)..(169): NCBI GI NO: 34895744 NR Description: P0019D06.30
  misc_feature (1)..(167): NCBI GI NO: 18408931 NR Description: expressed protein; protein id: At3g49720
  misc_feature (1)..(167): NCBI GI NO: 21593192 NR Description: unknown [Arabidopsis thaliana]
  misc_feature (1)..(167): NCBI GI NO: 18424995 NR Description: putative protein; protein id: At5g65810
  misc_feature (1)..(121): NCBI GI NO: 9758568 NR Description: emb|CAB66910
  misc_feature (1)..(167): NCBI GI NO: 16649137 NR Description: Unknown protein [Arabidopsis thaliana]
MQKVLHVGPDSCTVVSNLLKEGKVEAWGVEPYDLEDTDSTCKRLVRKGFVRMSDIKFPLPYRPDSFNLVIVSDALDYLTPRYLNKTLPGLARVSTDGLVIFAGNPGQQKAKVSELPKFGRPAKLRSSSWWTRYFVQTGLTENEGPLKKFEEATSQNKYQPDCQIFHLSSPR

SEQ ID NO: 32765 - DNA, 981 bp, Zea mays subsp. mays
  misc_feature (1)..(981): Ceres Seq. ID no. 12414420
cttacactctccttttgtcaccttctcttcgttcccctcctcggctcctcgcgatccttctttactgcccgagagttctgactagccacatccagtcaagcagtaaaggcgcaccatggaggcggcggcggagaataaggaggccgagcaggaggagcagcagctaccgcacgcgcagaaggataacgcgcccgccgccgccgaggaagacgaagcggattcggaggagaccgagcgccgcaaccgcgacctcaagtccggccttcacccccttaggcacaaactcgtgctctggtacactcgccggacgcctggagcgaggtcgcagtcgtacgaggacaacatcaagaagatcatcgatttcagcacagtcgaatcgttctgggtttgctactgccaccttgcgcgcccttcttccctgccgagccccactgaccttcatctcttcaaggatggcatccgtcccctctgggaggatcctgcaaaccagaatggtggcaagtggataattagattcaaaaaggcagtttcaggtcgattttgggaggatttggtgctagtggtagtaggcgaccagcttgagtatagcgatgatgtctgtggtgttgtgcttagtgtccgtttcaatgaagacattctgagcgtctggaaccggaacgcatcagaccatcaggctgtgatggcattgagggattctatcaagaggcacctcaagctgccgcacagctatctgatggagtacaaaccccatgatgcttcgcggcgtgacaactcgtcctacaggaacacatggctgagaggatagataaacctcatgatactcggcagcttcactgcgacggttctgaagcaaagagactcttttatgtaccaagaacgcagactattatgcaatgtagtactactactactactactcaaaagcccctacaatgtgacgcgcaacaattttactatctaatgtgttttttttgcaaaagc

SEQ ID NO: 32766 - protein, 229 aa, Zea mays subsp. mays
  peptide (1)..(229): Ceres Seq. ID no. 12414421
  misc_feature (35)..(229): NCBI GI NO: 25453555 NR Description: eukaryotic cap-binding protein
  misc_feature (35)..(229): NCBI GI NO: 15238740 NR Description: eukaryotic cap-binding protein (gb|AAC17220
  misc_feature (2)..(225): NCBI GI NO: 13624327 NR Description: RIKEN cDNA 2700069E09; DNA segment, human D0S6743E
  misc_feature (12)..(225): NCBI GI NO: 37590370 NR Description: Unknown (protein for MGC:73242) [Danio rerio]
  misc_feature (2)..(215): NCBI GI NO: 4757702 NR Description: eukaryotic translation initiation factor 4E-like 3
  misc_feature (2)..(215): NCBI GI NO: 12653185 NR Description: EIF4EL3 protein [Homo sapiens]
  misc_feature (2)..(215): NCBI GI NO: 29144998 NR Description: Similar to RIKEN cDNA 2700069E09 gene
  misc_feature (2)..(215): NCBI GI NO: 29839292 NR Description: Eukaryotic translation initiation factor 4E type 3
  misc_feature (2)..(215): NCBI GI NO: 3201958 NR Description: eIF4E-like protein 4E-LP [Mus musculus]
  misc_feature (30)..(215): NCBI GI NO: 3329384 NR Description: translation initiation factor 4e [Homo sapiens]
MEAAAENKEAEQEEQQLPHAQKDNAPAAAEEDEADSEETERRNRDLKSGLHPLRHKLVLWYTRRTPGARSQSYEDNIKKIIDFSTVESFWVCYCHLARPSSLPSPTDLHLFKDGIRPLWEDPANQNGGKWIIRFKKAVSGRFWEDLVLVVVGDQLEYSDDVCGVVLSVRFNEDILSVWNRNASDHQAVMALRDSIKRHLKLPHSYLMEYKPHDASRRDNSSYRNTWLRG

SEQ ID NO: 32767 - protein, 168 aa, Zea mays subsp. mays
  peptide (1)..(168): Ceres Seq. ID no. 12414422
YTLLLSPSLRSPPRLLAILLYCPRVLTSHIQSSSKGAPWRRRRRIRRPSRRSSSYRTRRRITRPPPPRKTKRIRRRPSAATATSSPAFTPLGTNSCSGTLAGRLERGRSRTRTTSRRSSISAQSNRSGFATATLRALLPCRAPLTFISSRMASVPSGRILQTRMVASG

SEQ ID NO: 32768 - DNA, 1357 bp, Zea mays subsp. mays
  misc_feature (1)..(1357): Ceres Seq. ID no. 12345592
accatcaagctttcaggcagggcaagcaactcgagtagtagttgccagccacacctcctgtcttcctttttccttctcgcattgtggaggagaaggatcaagtgctcataagcaagctagcttgacgaagtataggaaattaggaatacaaataaactcatcctcctcatatataaacgctcgatctccagatatggccggcctgtccctgctgcatcccatggccttcgccttcggcctcctcggcaacatcatctccttcatgacctacctggccccactgccgacgttctaccggatctacaagaacaagtcgacggaggggttccagtcggtgccgtacgtggtggccctcttcagcgccatgctgtggatctactacgcgctgctcaagtccaacgagctcctgctcatcaccatcaactccgccggctgcgtcatcgagaccctctacatcgccatgtacctcctctacgcgcccaagaaggcaaagctgttcacggccaagatcctcctcctcctcaacgtgggcgtgttcgggctcatcctcctcctcacgctgctgctctccgccggacagcgccgcgtcgtcgtcctcggctgggtctgcgtcgccttctccgttagcgtcttcgtcgcgccgctcagcatcatccgccaggtggtgagaacaaggagcgtcgagttcatgcccttctcgctctccctctccctcaccgtcagcgccgtcgtctggttcctctacggcctcctcatcaaggacaaatacgtcgctctgccaaacgtcatcggcttcagcttcggcgtggtccagatgggtctctacgcgctctaccgcaacgcgacgcccagggtgcctgccaaggacgtggccgacgacgccagcaaggacaaggcgcccggcgaacatgtggtggtcaccattgccaagctgaccgcggcgacgacggcacctgcagctgccgtggcagaggatcttgtcaaggtccacgacggccacccggaggaagcagccaagggcgccgccaagccggcggagaacggcgcgggacgcagcgacgccgagcaagtctagattcctcgctcgatcagatcagaattcatgaagaagaacatgcgtatgtatgtgtatccggtaggtcgtaacataacataaattaagtgcgcatgcagtttggcaactcatgttgtttcatttcgttctcgcgcaatatgcgcatgtattaattttagattgtcattgttgtagttcttgcctccgattattattagtgtgtccgtcaccttccatgtaataacaaaaaaaatatatataaatggtcctattaaagcaaaagctaaagttcgtttttatgcc

SEQ ID NO: 32769 - protein, 357 aa, Zea mays subsp. mays
  peptide (1)..(357): Ceres Seq. ID no. 12345593
  misc_feature (76)..(163): Pfam Name: Pfam Description:  MtN3/saliva family
  misc_feature (75)..(321): NCBI GI NO: 14715258 NR Description: N3 like protein [Medicago truncatula]
  misc_feature (68)..(289): NCBI GI NO: 1619602 NR Description: MtN3 [Medicago truncatula]
  misc_feature (75)..(354): NCBI GI NO: 15229019 NR Description: MTN3-like protein; protein id: At3g48740
  misc_feature (75)..(322): NCBI GI NO: 15237803 NR Description: MtN3-like protein; protein id: At5g23660
  misc_feature (72)..(348): NCBI GI NO: 21593422 NR Description: senescence-associated protein (SAG29)
  misc_feature (74)..(308): NCBI GI NO: 11345413 NR Description: NEC1 [Petunia x hybrida]
  misc_feature (75)..(322): NCBI GI NO: 15241278 NR Description: MtN3-like protein; protein id: At5g50800
  misc_feature (75)..(322): NCBI GI NO: 21593109 NR Description: MtN3-like protein [Arabidopsis thaliana]
  misc_feature (72)..(348): NCBI GI NO: 15240040 NR Description: senescence-associated protein
  misc_feature (71)..(300): NCBI GI NO: 15225014 NR Description: similar to MtN3 protein; protein id: At2g39060
PSSFQAGQATRVVVASHTSCLPFSFSHCGGEGSSAHKQASLTKYRKLGIQINSSSSYINARSPDMAGLSLLHPMAFAFGLLGNIISFMTYLAPLPTFYRIYKNKSTEGFQSVPYVVALFSAMLWIYYALLKSNELLLITINSAGCVIETLYIAMYLLYAPKKAKLFTAKILLLLNVGVFGLILLLTLLLSAGQRRVVVLGWVCVAFSVSVFVAPLSIIRQVVRTRSVEFMPFSLSLSLTVSAVVWFLYGLLIKDKYVALPNVIGFSFGVVQMGLYALYRNATPRVPAKDVADDASKDKAPGEHVVVTIAKLTAATTAPAAAVAEDLVKVHDGHPEEAAKGAAKPAENGAGRSDAEQV

SEQ ID NO: 32770 - protein, 293 aa, Zea mays subsp. mays
  peptide (1)..(293): Ceres Seq. ID no. 12345594
  misc_feature (12)..(99): Pfam Name: Pfam Description:  MtN3/saliva family
  misc_feature (11)..(257): NCBI GI NO: 14715258 NR Description: N3 like protein [Medicago truncatula]
  misc_feature (4)..(225): NCBI GI NO: 1619602 NR Description: MtN3 [Medicago truncatula]
  misc_feature (11)..(290): NCBI GI NO: 15229019 NR Description: MTN3-like protein; protein id: At3g48740
  misc_feature (11)..(258): NCBI GI NO: 15237803 NR Description: MtN3-like protein; protein id: At5g23660
  misc_feature (8)..(284): NCBI GI NO: 21593422 NR Description: senescence-associated protein (SAG29)
  misc_feature (10)..(244): NCBI GI NO: 11345413 NR Description: NEC1 [Petunia x hybrida]
  misc_feature (11)..(258): NCBI GI NO: 15241278 NR Description: MtN3-like protein; protein id: At5g50800
  misc_feature (11)..(258): NCBI GI NO: 21593109 NR Description: MtN3-like protein [Arabidopsis thaliana]
  misc_feature (8)..(284): NCBI GI NO: 15240040 NR Description: senescence-associated protein
  misc_feature (7)..(236): NCBI GI NO: 15225014 NR Description: similar to MtN3 protein; protein id: At2g39060
MAGLSLLHPMAFAFGLLGNIISFMTYLAPLPTFYRIYKNKSTEGFQSVPYVVALFSAMLWIYYALLKSNELLLITINSAGCVIETLYIAMYLLYAPKKAKLFTAKILLLLNVGVFGLILLLTLLLSAGQRRVVVLGWVCVAFSVSVFVAPLSIIRQVVRTRSVEFMPFSLSLSLTVSAVVWFLYGLLIKDKYVALPNVIGFSFGVVQMGLYALYRNATPRVPAKDVADDASKDKAPGEHVVVTIAKLTAATTAPAAAVAEDLVKVHDGHPEEAAKGAAKPAENGAGRSDAEQV

SEQ ID NO: 32771 - protein, 284 aa, Zea mays subsp. mays
  peptide (1)..(284): Ceres Seq. ID no. 12345595
  misc_feature (3)..(90): Pfam Name: Pfam Description:  MtN3/saliva family
  misc_feature (2)..(248): NCBI GI NO: 14715258 NR Description: N3 like protein [Medicago truncatula]
  misc_feature (1)..(216): NCBI GI NO: 1619602 NR Description: MtN3 [Medicago truncatula]
  misc_feature (2)..(281): NCBI GI NO: 15229019 NR Description: MTN3-like protein; protein id: At3g48740
  misc_feature (2)..(249): NCBI GI NO: 15237803 NR Description: MtN3-like protein; protein id: At5g23660
  misc_feature (1)..(275): NCBI GI NO: 21593422 NR Description: senescence-associated protein (SAG29)
  misc_feature (1)..(235): NCBI GI NO: 11345413 NR Description: NEC1 [Petunia x hybrida]
  misc_feature (2)..(249): NCBI GI NO: 15241278 NR Description: MtN3-like protein; protein id: At5g50800
  misc_feature (2)..(249): NCBI GI NO: 21593109 NR Description: MtN3-like protein [Arabidopsis thaliana]
  misc_feature (1)..(275): NCBI GI NO: 15240040 NR Description: senescence-associated protein
  misc_feature (1)..(227): NCBI GI NO: 15225014 NR Description: similar to MtN3 protein; protein id: At2g39060
MAFAFGLLGNIISFMTYLAPLPTFYRIYKNKSTEGFQSVPYVVALFSAMLWIYYALLKSNELLLITINSAGCVIETLYIAMYLLYAPKKAKLFTAKILLLLNVGVFGLILLLTLLLSAGQRRVVVLGWVCVAFSVSVFVAPLSIIRQVVRTRSVEFMPFSLSLSLTVSAVVWFLYGLLIKDKYVALPNVIGFSFGVVQMGLYALYRNATPRVPAKDVADDASKDKAPGEHVVVTIAKLTAATTAPAAAVAEDLVKVHDGHPEEAAKGAAKPAENGAGRSDAEQV

SEQ ID NO: 32772 - DNA, 1177 bp, Zea mays subsp. mays
  misc_feature (1)..(1177): Ceres Seq. ID no. 12374151
atcagatctccagctagcttccttgctacttactcccctacccgctgcaccctcgccatggatccgccgagctccgatatcgtagtcgacactccatacttccgcatctacagtgaccggcgcatcgaccgcttggtcggcaccgataccgtgccggcgggctttgatcccaccaccggcgtcacctccaaagacgtcgttgtagacagcgacgccggcgtctacgttcgcctgtacctcccggacacggctacggggtccgatgattccaagaagctcccggtgctagtctacttccacggcggcggctttgtcacccactcggcagcgtctccgccctatcagtccttcctcaacaccctggccgcgaaggccggcctgctcatcgtctccgtgaactaccgcctcgcgccagagcacccgctgcctgcaggctacgaggactccttccgcgcgctcaggtggacggcctctggtagcggggacccctggctgtcacatcacggcgacctgggccgcatcttcctggccggcgacagcgccggtgggaacttcgtccacaacatcgctgtgatggcagccgcgtcggaggtgccagtgcgaatcaggggtgcggtcctcctgcacgcggggttcggtggcagggagcgcatcgacggagagacgccggagactgtggcgctgatggagaagctgtggggggtcgtgtgcctcgaggcgacggacggcctgaacgacccgcggataaatccgttggctgccgccgcggcgccgagcctgcggaacctgccgtgtgagagggtgctcgtctgcgcggcagagttggacttcctgcggccgaggaacagggcgtactacgaggccctcgcagcaagctggcggggcggcacggtggagtggttcgagtcgaagggcaaggagcacgtcttcttcctctacaaccccggctgcggcgaggccgtggagctcatggatcgtctggtcgcgttctttgctgggaactgaaattcgtcatgtgtggatgtgaccgcgaccacatccacatgcagtgagacggatggatcaaacgaagatgcagctcatcgccgaatcgaatggttgagctgtgtccaggaaaagaaaactaaaagtgactagaataattgagctcggagccttggattgatcagtttgtgct

SEQ ID NO: 32773 - protein, 334 aa, Zea mays subsp. mays
  peptide (1)..(334): Ceres Seq. ID no. 12374152
  misc_feature (26)..(332): NCBI GI NO: 38344841 NR Description: OSJNBa0064H22.22
  misc_feature (32)..(331): NCBI GI NO: 21536771 NR Description: unknown [Arabidopsis thaliana]
  misc_feature (32)..(331): NCBI GI NO: 18401743 NR Description: expressed protein; protein id: At1g47480
  misc_feature (25)..(333): NCBI GI NO: 18086341 NR Description: AT3g48690/T8P19_200 [Arabidopsis thaliana]
  misc_feature (25)..(333): NCBI GI NO: 15228425 NR Description: putative protein; protein id: At3g48690
  misc_feature (25)..(334): NCBI GI NO: 15228426 NR Description: putative protein; protein id: At3g48700.1
  misc_feature (8)..(333): NCBI GI NO: 21537287 NR Description: putative esterase [Arabidopsis thaliana]
  misc_feature (24)..(330): NCBI GI NO: 34393975 NR Description: putative PrMC3
  misc_feature (8)..(333): NCBI GI NO: 18402731 NR Description: expressed protein; protein id: At1g49650
  misc_feature (24)..(330): NCBI GI NO: 34393904 NR Description: putative cell death associated protein
IRSPASFLATYSPTRCTLAMDPPSSDIVVDTPYFRIYSDRRIDRLVGTDTVPAGFDPTTGVTSKDVVVDSDAGVYVRLYLPDTATGSDDSKKLPVLVYFHGGGFVTHSAASPPYQSFLNTLAAKAGLLIVSVNYRLAPEHPLPAGYEDSFRALRWTASGSGDPWLSHHGDLGRIFLAGDSAGGNFVHNIAVMAAASEVPVRIRGAVLLHAGFGGRERIDGETPETVALMEKLWGVVCLEATDGLNDPRINPLAAAAAPSLRNLPCERVLVCAAELDFLRPRNRAYYEALAASWRGGTVEWFESKGKEHVFFLYNPGCGEAVELMDRLVAFFAGN

SEQ ID NO: 32774 - protein, 315 aa, Zea mays subsp. mays
  peptide (1)..(315): Ceres Seq. ID no. 12374153
  misc_feature (7)..(313): NCBI GI NO: 38344841 NR Description: OSJNBa0064H22.22
  misc_feature (13)..(312): NCBI GI NO: 21536771 NR Description: unknown [Arabidopsis thaliana]
  misc_feature (13)..(312): NCBI GI NO: 18401743 NR Description: expressed protein; protein id: At1g47480
  misc_feature (6)..(314): NCBI GI NO: 18086341 NR Description: AT3g48690/T8P19_200 [Arabidopsis thaliana]
  misc_feature (6)..(314): NCBI GI NO: 15228425 NR Description: putative protein; protein id: At3g48690
  misc_feature (6)..(315): NCBI GI NO: 15228426 NR Description: putative protein; protein id: At3g48700.1
  misc_feature (1)..(314): NCBI GI NO: 21537287 NR Description: putative esterase [Arabidopsis thaliana]
  misc_feature (5)..(311): NCBI GI NO: 34393975 NR Description: putative PrMC3
  misc_feature (1)..(314): NCBI GI NO: 18402731 NR Description: expressed protein; protein id: At1g49650
  misc_feature (5)..(311): NCBI GI NO: 34393904 NR Description: putative cell death associated protein
MDPPSSDIVVDTPYFRIYSDRRIDRLVGTDTVPAGFDPTTGVTSKDVVVDSDAGVYVRLYLPDTATGSDDSKKLPVLVYFHGGGFVTHSAASPPYQSFLNTLAAKAGLLIVSVNYRLAPEHPLPAGYEDSFRALRWTASGSGDPWLSHHGDLGRIFLAGDSAGGNFVHNIAVMAAASEVPVRIRGAVLLHAGFGGRERIDGETPETVALMEKLWGVVCLEATDGLNDPRINPLAAAAAPSLRNLPCERVLVCAAELDFLRPRNRAYYEALAASWRGGTVEWFESKGKEHVFFLYNPGCGEAVELMDRLVAFFAGN

SEQ ID NO: 32775 - DNA, 1749 bp, Zea mays subsp. mays
  misc_feature (1)..(1749): Ceres Seq. ID no. 12390530
agttcccatccattggtgtggacgtgtggtggttgcgttgcgttgcttcgagttggaggttggttggagttggagtgggccgcgtgccgcgtgcgagatgatctgagtggagaggccatggagtggtgtgattagcggttgctgggtcaggagaaggcggcgtgtgttttgatcctactcgcgtttgaggggccccgatttcgagcgggtgttcaattttggtgccggatttttaaggaggatccaatttaggaagaattttggttttggggacaatggttttggactgcctgatattcgattcataggttggtcaaacgcttaggagtagagaatttttttttcccggaaaacaagagccatttttctaattgtgctactcgtcaatcaatccatggaagctgaactctggaagaagaaactttcctaattagacccggtatttcgtggttggccgttggcgtctaaagcgcgttttagtttaaatatgaacacattttcctgtttactccgcccaaaatctttccgctggatctacttgtgaatcgggtttgtttgttttttacctgagctattcttgtcgatttaggatttcaagtcggcagatccaagggaacgccgaattttgcctgatttcttcgcaatttttggtccgaccaagaggttcctagcctatttttttcctcgcgagaagcaagggctctcccttttcttctttcgccatgtccatggcgttgagccgcttcacgcaatggctgtggccggggggcgccgcggcgcgggtggacacccacgagcaccccagcggggggctaacgagctcctccttccctgacttcccctccgggttccgggagcccgacaccgtcacgttctacaccggccgccagcgcgcgcgcccgaggagggtcaggaatcgtcgccgcagccgcggggaggcccgtgtcgaccgggagtacgacatggtcatcgtcccgtccgacggcggtggctgcctgtctggctccgactccgacgactccgactggtccatcggctggctcgagccacaggcgccggagcttcagacggacggcgaccccgagaactgcttcgccgtcctcgtgccgtgttaccgccacggccgccaagagcagcagccccggaggcaggagggcaggtttcttggcgccggcgccctcaccgatggtggtccctctgatggaaagaattttgtagagcagtggctttcttctttccagaactaatatcgtcagacctcgcctaagctaccctgtaaatagtatcactctgttttagttctactacgtttgtcctagtcgcacaacgtatcgatgaaggaagacatgaaaaagccctaaaaaaagaaggaaatctaaaaagaaaaatgaggagcagtgggattctgaagcggcaccaaatgggtatgtccttcctgaggtgttcccaggccattctactcttgcaaagcaatgcgaaagctgaactacacaaactgcacgccatcaaaaatgattttgccgtcctgatatgtgcggagtgctaacctgatgattgataacacgtagagatgaactgctattccattgttaatttgtcccacttgctcgtggacctcgaattctactgcatgtacattatgttcttgcagtgtatatatatagtcttgcccagagctgcagtggcgtgattgttcagtctgcctgtatatagtgttcttgcagtgtatataagccttgcgcagagctg

SEQ ID NO: 32776 - protein, 174 aa, Zea mays subsp. mays
  peptide (1)..(174): Ceres Seq. ID no. 12390531
  misc_feature (1)..(173): NCBI GI NO: 15144509 NR Description: unknown [Lycopersicon esculentum]
  misc_feature (73)..(173): NCBI GI NO: 15809848 NR Description: AT4g38060/F20D10_180 [Arabidopsis thaliana]
  misc_feature (1)..(171): NCBI GI NO: 15238477 NR Description: putative protein; protein id: At5g65480
MSMALSRFTQWLWPGGAAARVDTHEHPSGGLTSSSFPDFPSGFREPDTVTFYTGRQRARPRRVRNRRRSRGEARVDREYDMVIVPSDGGGCLSGSDSDDSDWSIGWLEPQAPELQTDGDPENCFAVLVPCYRHGRQEQQPRRQEGRFLGAGALTDGGPSDGKNFVEQWLSSFQN

SEQ ID NO: 32777 - protein, 172 aa, Zea mays subsp. mays
  peptide (1)..(172): Ceres Seq. ID no. 12390532
  misc_feature (1)..(171): NCBI GI NO: 15144509 NR Description: unknown [Lycopersicon esculentum]
  misc_feature (71)..(171): NCBI GI NO: 15809848 NR Description: AT4g38060/F20D10_180 [Arabidopsis thaliana]
  misc_feature (1)..(169): NCBI GI NO: 15238477 NR Description: putative protein; protein id: At5g65480
MALSRFTQWLWPGGAAARVDTHEHPSGGLTSSSFPDFPSGFREPDTVTFYTGRQRARPRRVRNRRRSRGEARVDREYDMVIVPSDGGGCLSGSDSDDSDWSIGWLEPQAPELQTDGDPENCFAVLVPCYRHGRQEQQPRRQEGRFLGAGALTDGGPSDGKNFVEQWLSSFQN

SEQ ID NO: 32778 - protein, 94 aa, Zea mays subsp. mays
  peptide (1)..(94): Ceres Seq. ID no. 12390533
  misc_feature (1)..(93): NCBI GI NO: 15144509 NR Description: unknown [Lycopersicon esculentum]
  misc_feature (1)..(93): NCBI GI NO: 15809848 NR Description: AT4g38060/F20D10_180 [Arabidopsis thaliana]
  misc_feature (1)..(91): NCBI GI NO: 15238477 NR Description: putative protein; protein id: At5g65480
MVIVPSDGGGCLSGSDSDDSDWSIGWLEPQAPELQTDGDPENCFAVLVPCYRHGRQEQQPRRQEGRFLGAGALTDGGPSDGKNFVEQWLSSFQN

SEQ ID NO: 32779 - DNA, 1652 bp, Zea mays subsp. mays
  misc_feature (1)..(1652): Ceres Seq. ID no. 12411954
aggtttgtgtgaccgttgcaacgaaacaaaaaaagccaaagggatcccaaacgaaaacgagccagctgagcaaacacaacactcgcatcggcacccacactgccactcatcacattggcacccctccgacacgggccgggacttctcggactgcaggcagccaggcacgcaccagcaacaccccccacccgccggctcggagcggggccccacccgaatcacacagatcgggacgccggaggaggagcaacgccgtcccgcatcaccggagcaacgcgggcgcggagaggccagccagcgcaggcgcagttcaagctttggattcccggatcccacaccaccggtctctctcggggagtgtaatccagcgagcgttgagttgaaagccgcgcaagtggagatgagtactctgaagaaatccgacaagaaggctgccctcgacttcgcagcatggagtttcaatgtcaccacatcggttggactcatcatggtcaacaaggccttgatggctacgtatgggttcagtttcgccacaacattaaccgggcttcattttgtgactactaccttgatgactatcttatttcgttggttaggcctgagtcagccatcccacttacccctagcagatctagttaaatttgtgatattttcgaacttgtcaattgttgggatgaatgtgagcttgatgtggaactctgttggcttttatcagatagcaaagctgtgcatgatacctgcatcatgtcttctggaggttgtttttgatcatgtacattattcccgggacacaaagctgagcataatggtcgtgcttataggagttgcagtctgcacggttactgatgtcagtgtgaatgcaagaggtctaattgctgctgttatagctgtctggagcacagctttgcaacaatactatgtccattttctccaacgcaagtactccctgaactcattcaacctcctgggccacacagctccagcccaagctgggtcactgctgctagtgggaccatttgcggattacttgttgacaggcaaaagggtggatcagttcagtttgtcatcgcttgctctgtttttcctggcactctcatgcttcatcgccattggtgttaatctgagccaattcatctgcatcgggcggttctccgccgtatccttccaagtcctaggccatatgaagaccgtacttgttctgtcccttgggttccttttctttggcaaggagggcctgaaccttcaggtagtccttgggatggtcctggccgttctcggaatgatatggtacgggaacgcgtctgctaaaccaggtggcaaagagcggcgcagcatcctgccggtgaggtctgcgagtctcaagggaagttccgaagaaaaggccggtgccgagaaatagtcttgctatatctgactgcaaacattttattagatggggaatttttcgttccgaaggttaaatctctggtgaggtgacgcgagtatcacagattggaagctctgcattatgtctgacgcgcacaaaacaaacgcgtcccttgtagagactctggattgttatagttacaggtatactgtaaagcttcattttttttggcgctctgaatcgtttgcagtgagggggaaagacggacatggtttacggagggttc

SEQ ID NO: 32780 - protein, 465 aa, Zea mays subsp. mays
  peptide (1)..(465): Ceres Seq. ID no. 12411955
  misc_feature (135)..(458): NCBI GI NO: 18420440 NR Description: putative protein; protein id: At4g39390
  misc_feature (135)..(458): NCBI GI NO: 21593003 NR Description: unknown [Arabidopsis thaliana]
  misc_feature (134)..(460): NCBI GI NO: 30313364 NR Description: putative transmembrane protein [Oryza sativa]
  misc_feature (134)..(465): NCBI GI NO: 15234794 NR Description: hypothetical protein; protein id: At4g09810.1
  misc_feature (134)..(465): NCBI GI NO: 18399097 NR Description: expressed protein; protein id: At1g34020
  misc_feature (134)..(465): NCBI GI NO: 21595054 NR Description: unknown [Arabidopsis thaliana]
  misc_feature (135)..(458): NCBI GI NO: 7486049 NR Description: hypothetical protein F23K16
  misc_feature (139)..(447): NCBI GI NO: 18394949 NR Description: expressed protein; protein id: At1g21070
  misc_feature (134)..(447): NCBI GI NO: 21536703 NR Description: unknown [Arabidopsis thaliana]
  misc_feature (139)..(440): NCBI GI NO: 18411172 NR Description: expressed protein; protein id: At1g76670
GLCDRCNETKKAKGIPNENEPAEQTQHSHRHPHCHSSHWHPSDTGRDFSDCRQPGTHQQHPPPAGSERGPTRITQIGTPEEEQRRPASPEQRGRGEASQRRRSSSFGFPDPTPPVSLGECNPASVELKAAQVEMSTLKKSDKKAALDFAAWSFNVTTSVGLIMVNKALMATYGFSFATTLTGLHFVTTTLMTILFRWLGLSQPSHLPLADLVKFVIFSNLSIVGMNVSLMWNSVGFYQIAKLCMIPASCLLEVVFDHVHYSRDTKLSIMVVLIGVAVCTVTDVSVNARGLIAAVIAVWSTALQQYYVHFLQRKYSLNSFNLLGHTAPAQAGSLLLVGPFADYLLTGKRVDQFSLSSLALFFLALSCFIAIGVNLSQFICIGRFSAVSFQVLGHMKTVLVLSLGFLFFGKEGLNLQVVLGMVLAVLGMIWYGNASAKPGGKERRSILPVRSASLKGSSEEKAGAEK

SEQ ID NO: 32781 - protein, 332 aa, Zea mays subsp. mays
  peptide (1)..(332): Ceres Seq. ID no. 12411956
  misc_feature (2)..(325): NCBI GI NO: 18420440 NR Description: putative protein; protein id: At4g39390
  misc_feature (2)..(325): NCBI GI NO: 21593003 NR Description: unknown [Arabidopsis thaliana]
  misc_feature (1)..(327): NCBI GI NO: 30313364 NR Description: putative transmembrane protein [Oryza sativa]
  misc_feature (1)..(332): NCBI GI NO: 15234794 NR Description: hypothetical protein; protein id: At4g09810.1
  misc_feature (1)..(332): NCBI GI NO: 18399097 NR Description: expressed protein; protein id: At1g34020
  misc_feature (1)..(332): NCBI GI NO: 21595054 NR Description: unknown [Arabidopsis thaliana]
  misc_feature (2)..(325): NCBI GI NO: 7486049 NR Description: hypothetical protein F23K16
  misc_feature (6)..(314): NCBI GI NO: 18394949 NR Description: expressed protein; protein id: At1g21070
  misc_feature (1)..(314): NCBI GI NO: 21536703 NR Description: unknown [Arabidopsis thaliana]
  misc_feature (6)..(307): NCBI GI NO: 18411172 NR Description: expressed protein; protein id: At1g76670
MSTLKKSDKKAALDFAAWSFNVTTSVGLIMVNKALMATYGFSFATTLTGLHFVTTTLMTILFRWLGLSQPSHLPLADLVKFVIFSNLSIVGMNVSLMWNSVGFYQIAKLCMIPASCLLEVVFDHVHYSRDTKLSIMVVLIGVAVCTVTDVSVNARGLIAAVIAVWSTALQQYYVHFLQRKYSLNSFNLLGHTAPAQAGSLLLVGPFADYLLTGKRVDQFSLSSLALFFLALSCFIAIGVNLSQFICIGRFSAVSFQVLGHMKTVLVLSLGFLFFGKEGLNLQVVLGMVLAVLGMIWYGNASAKPGGKERRSILPVRSASLKGSSEEKAGAEK

SEQ ID NO: 32782 - protein, 303 aa, Zea mays subsp. mays
  peptide (1)..(303): Ceres Seq. ID no. 12411957
  misc_feature (1)..(296): NCBI GI NO: 18420440 NR Description: putative protein; protein id: At4g39390
  misc_feature (1)..(296): NCBI GI NO: 21593003 NR Description: unknown [Arabidopsis thaliana]
  misc_feature (1)..(298): NCBI GI NO: 30313364 NR Description: putative transmembrane protein [Oryza sativa]
  misc_feature (1)..(303): NCBI GI NO: 15234794 NR Description: hypothetical protein; protein id: At4g09810.1
  misc_feature (1)..(303): NCBI GI NO: 18399097 NR Description: expressed protein; protein id: At1g34020
  misc_feature (1)..(303): NCBI GI NO: 21595054 NR Description: unknown [Arabidopsis thaliana]
  misc_feature (1)..(296): NCBI GI NO: 7486049 NR Description: hypothetical protein F23K16
  misc_feature (1)..(285): NCBI GI NO: 18394949 NR Description: expressed protein; protein id: At1g21070
  misc_feature (1)..(285): NCBI GI NO: 21536703 NR Description: unknown [Arabidopsis thaliana]
  misc_feature (1)..(278): NCBI GI NO: 18411172 NR Description: expressed protein; protein id: At1g76670
MVNKALMATYGFSFATTLTGLHFVTTTLMTILFRWLGLSQPSHLPLADLVKFVIFSNLSIVGMNVSLMWNSVGFYQIAKLCMIPASCLLEVVFDHVHYSRDTKLSIMVVLIGVAVCTVTDVSVNARGLIAAVIAVWSTALQQYYVHFLQRKYSLNSFNLLGHTAPAQAGSLLLVGPFADYLLTGKRVDQFSLSSLALFFLALSCFIAIGVNLSQFICIGRFSAVSFQVLGHMKTVLVLSLGFLFFGKEGLNLQVVLGMVLAVLGMIWYGNASAKPGGKERRSILPVRSASLKGSSEEKAGAEK

SEQ ID NO: 32783 - DNA, 1032 bp, Zea mays subsp. mays
  misc_feature (1)..(1032): Ceres Seq. ID no. 12413807
attctcacgggcagcagttctgccactctgcaagttcaacttgatccgcgcttctcgtgtcccctgccccttctgtcctcgccaccgcccagcttctcctcagtcctcaccctcgtgtgccttcggatccgcggttctcggagtcggagagagttgcaggtggtggctggtcgcttgcggtagccggtaggcgggttcgctgcgggtggtcggcggcgcgatggtttccttcgagatgaacgacctcaagaagattgggctgggcttgactggatttggagttctattcacattgctcgggatcattatgttgtttgacaagggattcctggcgatggggaatattctcttcgtttctggtgtcttactgaccattgggttgaagccaactgtgcagttcttcaccaagcctaagaatcacaagggttcaatatttttcgggtttggctttttcctggttctcattggatggcctgtctcaggaatgctggtggagtcgtatggcttcatcacgctcttcagcggcttctggccaacagctgctgtttacctgcaaaagagcccttccttcggttggatattccaccaccctcttgtgacttcgctgatcactcggttcagaggaagacgggtcccggtgtgagtggataggatcaccccgagggcatgcgaaatcgcctctactgtacagaagtaggccaattgacatatgcactttattcgtttatgttcgtcgattctacctggtttaaagagagacaaggtggccgctgttgctggtattggatcttcctacgctgctaccagtagtctgtccatagcgtaactacattgattgcaagtgagcatctgtcggttgttaataaataggcagatgtatcgatggtgataacatggtggtttctctgaatgacgatggctgagggagctgtgaactggtttggaaaccagccagcttgtgagagacagttgtgttacactgctactgctatattgttaactagttaaaaaaaaaaaaaaaaaaaaaaagaa

SEQ ID NO: 32784 - protein, 140 aa, Zea mays subsp. mays
  peptide (1)..(140): Ceres Seq. ID no. 12413808
  misc_feature (31)..(129): Pfam Name: Pfam Description:  Got1-like family
  misc_feature (11)..(129): NCBI GI NO: 33146513 NR Description: NFkB activating protein-like
  misc_feature (1)..(140): NCBI GI NO: 30678779 NR Description: expressed protein [Arabidopsis thaliana]
  misc_feature (1)..(140): NCBI GI NO: 15229139 NR Description: putative protein; protein id: At3g49420
  misc_feature (1)..(134): NCBI GI NO: 12324443 NR Description: unknown protein; 50647-51606
  misc_feature (1)..(100): NCBI GI NO: 6714435 NR Description: unknown protein [Arabidopsis thaliana]
  misc_feature (5)..(126): NCBI GI NO: 24642432 NR Description: CG32576-PA [Drosophila melanogaster]
  misc_feature (4)..(137): NCBI GI NO: 22329359 NR Description: unknown protein; protein id: At1g05785.1
  misc_feature (5)..(126): NCBI GI NO: 17945675 NR Description: RE29988p [Drosophila melanogaster]
  misc_feature (1)..(132): NCBI GI NO: 7634779 NR Description: HDCMA39P [Homo sapiens]
  misc_feature (1)..(132): NCBI GI NO: 26384022 NR Description: unnamed protein product [Mus musculus]
MVSFEMNDLKKIGLGLTGFGVLFTLLGIIMLFDKGFLAMGNILFVSGVLLTIGLKPTVQFFTKPKNHKGSIFFGFGFFLVLIGWPVSGMLVESYGFITLFSGFWPTAAVYLQKSPSFGWIFHHPLVTSLITRFRGRRVPV

SEQ ID NO: 32785 - protein, 135 aa, Zea mays subsp. mays
  peptide (1)..(135): Ceres Seq. ID no. 12413809
  misc_feature (26)..(124): Pfam Name: Pfam Description:  Got1-like family
  misc_feature (6)..(124): NCBI GI NO: 33146513 NR Description: NFkB activating protein-like
  misc_feature (1)..(135): NCBI GI NO: 30678779 NR Description: expressed protein [Arabidopsis thaliana]
  misc_feature (1)..(135): NCBI GI NO: 15229139 NR Description: putative protein; protein id: At3g49420
  misc_feature (1)..(129): NCBI GI NO: 12324443 NR Description: unknown protein; 50647-51606
  misc_feature (1)..(95): NCBI GI NO: 6714435 NR Description: unknown protein [Arabidopsis thaliana]
  misc_feature (1)..(121): NCBI GI NO: 24642432 NR Description: CG32576-PA [Drosophila melanogaster]
  misc_feature (1)..(132): NCBI GI NO: 22329359 NR Description: unknown protein; protein id: At1g05785.1
  misc_feature (1)..(121): NCBI GI NO: 17945675 NR Description: RE29988p [Drosophila melanogaster]
  misc_feature (1)..(127): NCBI GI NO: 7634779 NR Description: HDCMA39P [Homo sapiens]
  misc_feature (1)..(127): NCBI GI NO: 26384022 NR Description: unnamed protein product [Mus musculus]
MNDLKKIGLGLTGFGVLFTLLGIIMLFDKGFLAMGNILFVSGVLLTIGLKPTVQFFTKPKNHKGSIFFGFGFFLVLIGWPVSGMLVESYGFITLFSGFWPTAAVYLQKSPSFGWIFHHPLVTSLITRFRGRRVPV

SEQ ID NO: 32786 - protein, 111 aa, Zea mays subsp. mays
  peptide (1)..(111): Ceres Seq. ID no. 12413810
  misc_feature (2)..(100): Pfam Name: Pfam Description:  Got1-like family
  misc_feature (1)..(100): NCBI GI NO: 33146513 NR Description: NFkB activating protein-like
  misc_feature (1)..(111): NCBI GI NO: 30678779 NR Description: expressed protein [Arabidopsis thaliana]
  misc_feature (1)..(111): NCBI GI NO: 15229139 NR Description: putative protein; protein id: At3g49420
  misc_feature (1)..(105): NCBI GI NO: 12324443 NR Description: unknown protein; 50647-51606
  misc_feature (1)..(71): NCBI GI NO: 6714435 NR Description: unknown protein [Arabidopsis thaliana]
  misc_feature (1)..(97): NCBI GI NO: 24642432 NR Description: CG32576-PA [Drosophila melanogaster]
  misc_feature (1)..(108): NCBI GI NO: 22329359 NR Description: unknown protein; protein id: At1g05785.1
  misc_feature (1)..(97): NCBI GI NO: 17945675 NR Description: RE29988p [Drosophila melanogaster]
  misc_feature (1)..(103): NCBI GI NO: 7634779 NR Description: HDCMA39P [Homo sapiens]
  misc_feature (1)..(103): NCBI GI NO: 26384022 NR Description: unnamed protein product [Mus musculus]
MLFDKGFLAMGNILFVSGVLLTIGLKPTVQFFTKPKNHKGSIFFGFGFFLVLIGWPVSGMLVESYGFITLFSGFWPTAAVYLQKSPSFGWIFHHPLVTSLITRFRGRRVPV

SEQ ID NO: 32787 - DNA, 1300 bp, Zea mays subsp. mays
  misc_feature (1)..(1300): Ceres Seq. ID no. 12342524
aaataagcacttgttcatcatcatcagagtaaacacagcagaaccctagcgcgccgttcctccgacgactcacatcccacccactcacccaccccatggcggccaagctctccaccagcgccgacgccccggcctcggtgcggctctccgcagcagcgcaggcggctgcgatccagccctcctctccgcgcttcttcttctcctcgctggccgggaccaacccggcctccccgcatcgccgcatcgccattgccgtcgatctctccgacgagtccgccttcgccgtcaagtgggccgtgcagaactacctccgccccggggacgccgtcgtgctgctccacgtgcgccccacctccgttctctacggcgccgactggggttccatcccggtctccgtcgctgacgaggccgacgctgccgaggacgccgccgccgccgccgagggcggcccctccgaggaggagctgcagaagaagcgggaggaggaatacgacgccttcacctctaccaaggcgcaggacctcgcgcagccgcttgtcgatgcccagatccccttcaagatccatgtcgtcaaggaccacgacatgaaggagcgcctctgcctcgaggctgagcgccttggcctgtccgctatgatcatggggagccgcggttttggggcctctcggaaaggcggcaaggggaggcttgggagtgttagtgattactgtgtacaccactgtgtatgccccgttgtggttgttcgctaccctgatgatgctgcagatgccagtggagatgcatcaggggcgacagatgagttgcacactgtaccagaggacgaacctgtttatcacgatgcgcctgaggtgcagaaagaaaactgaggcaatggccgcaagcagctgaagaacgaaggaaaacatggggcctgtagtgactagtgaggcgattctgtgtatctgaaagatgggactggctgtttatcttcgcttctgtatatcaactgcgtgtcatgatcagtggctgcttcgcgtttgagtttcatatcggagtcctagatcatcgaagtctttgttggtttgcttgtgagatgtttatgttgtgaacaccatgtagagtactcttctcgtaggtagaagctgccttgaagatgcttatgcagttatgctggggtctgggctctcttgtcttgttttgcggagccggtgatgagctttatgttctcaaatggtagttatctacacggtattatgtgctctgttcagcctgtttactgtattgcatattcgtcaatggagaatcactacttattattctc

SEQ ID NO: 32788 - protein, 256 aa, Zea mays subsp. mays; identical to SEQ ID NO: 23233
  peptide (1)..(256): Ceres Seq. ID no. 12342525
  misc_feature (46)..(217): Pfam Name: Pfam Description:  Universal stress protein family
  misc_feature (8)..(254): NCBI GI NO: 34910112 NR Description: B1100D10.31
  misc_feature (1)..(256): NCBI GI NO: 28971968 NR Description: OSJNBb0041B22.10
  misc_feature (1)..(255): NCBI GI NO: 33146953 NR Description: CHP-rich zinc finger protein-like
  misc_feature (41)..(253): NCBI GI NO: 25402657 NR Description: protein T23J18.3 [imported] - Arabidopsis thaliana
  misc_feature (41)..(253): NCBI GI NO: 30682187 NR Description: expressed protein [Arabidopsis thaliana]
  misc_feature (28)..(235): NCBI GI NO: 7486798 NR Description: hypothetical protein M4I22
  misc_feature (28)..(235): NCBI GI NO: 18416966 NR Description: putative protein; protein id: At4g27320
  misc_feature (36)..(221): NCBI GI NO: 8885586 NR Description: gene_id:F24B18
  misc_feature (36)..(221): NCBI GI NO: 18423628 NR Description: putative protein; protein id: At5g54430
  misc_feature (138)..(227): NCBI GI NO: 15232490 NR Description: CHP-rich zinc finger protein, putative

SEQ ID NO: 32789 - DNA, 1361 bp, Zea mays subsp. mays
  misc_feature (1)..(1361): Ceres Seq. ID no. 12379398
accggtcccgagggctatcgaacgtaactaccgtcctctgtctcggcgtcggcgagcaacagaacagacagaggaggggaggcgaggcgaggcggaaatggggctccgcgtccgcgcttcctcgcttctgctatccctcgccatcgagctcgcggccgtgctcgtctcagtgtcggcgcagcagaagttcgggatcaactacgggcagatcgcgaacaatctcccggacccgacgcaggtggcgaccctcctccgatcgatgaacgtgaacaaggtgaagctctacgacgcggacccccgggtgctgacggcgttcgcgaacacgggcgtggagttcatcatcgccgtgggcaacgagaacctgcagaccatggccggcagccccgccgcggcgcggcagtgggtggcggcgaacgtgcggccctacatcccggccacgcgcatcacctgcgtcaccgtgggcaacgaggtcttctccggcaacgacacggccacgatggccagcctcctccccgctatgaaggccgtccacgcggcgctcgcggacctgggcctcggcggccaggccaccgtctcgtcggcgcactccgtgaacgtgctcgccgccagcttcccgccgtcgtcgggcgcgttccgggaggacctggcggagtacatgaagcccatcctggacttccacgcccagacggggtcgccgttcctcatcaacgcctacccgttcttcgcgtacaaggcgagcccgggcagcgtgtcgctgccgtacgtgctgttcgagcccaacccgggggtgcgcgaccccagcaccggcctcagctacgacaacatgctgtacgcccagatcgacgccgtgtacgccgccatgaaggccatggggcacacggacgtgggcgtccggatctcggagaccgggtggccgtccaggggcgacgaggacgagaccggggccacggtgcagaacgccgccgcgtacaacggcaacctcatgcagagggtcgccatgagccaggggacgccgctcaagcccaacgtgcccgtcgacgtctacgtgttcgcgctcttcaacgagaacatgaagccagggcccacgtcggagcgcaactacgggctgttctaccccaacggctcgccggtgtacgcgctcagcgccggctccggcggcggttcaggtccgggcgggtcgctcaacccgtactacacatccatgttctcctcctcgtccagatccgcggtgagcgcgaccttcttgacagagagagtgatgctgttactgctgctgcaagcaactgtaatactccgacactactgctagtcagtgaataccttgtaatcttgtatacgaaaaaaaaaatgcatctcaattc

SEQ ID NO: 32790 - protein, 435 aa, Zea mays subsp. mays
  peptide (1)..(435): Ceres Seq. ID no. 12379399
  misc_feature (63)..(381): Pfam Name: Pfam Description:  Glycosyl hydrolases family 17
  misc_feature (33)..(414): NCBI GI NO: 34908492 NR Description: putative beta-1,3-glucanase
  misc_feature (43)..(378): NCBI GI NO: 38346337 NR Description: OSJNBa0073L04.8
  misc_feature (61)..(378): NCBI GI NO: 18401444 NR Description: glycosyl hydrolase family 17; protein id:At2g27500
  misc_feature (61)..(378): NCBI GI NO: 25316425 NR Description: probable beta-1,3-glucanase
  misc_feature (39)..(422): NCBI GI NO: 419789 NR Description: hypothetical protein - potato
  misc_feature (40)..(393): NCBI GI NO: 25316443 NR Description: CDS protein F9L11.6
  misc_feature (40)..(393): NCBI GI NO: 30692765 NR Description: glycosyl hydrolase family 17
  misc_feature (33)..(391): NCBI GI NO: 6006371 NR Description: Similar to hypothetical protein - potato (S31196)
  misc_feature (42)..(393): NCBI GI NO: 37531294 NR Description: putative beta-1,3-glucanase
  misc_feature (39)..(393): NCBI GI NO: 15238298 NR Description: glycosyl hydrolase family 17; protein id:At5g42100
PVPRAIERNYRPLSRRRRATEQTEEGRRGEAEMGLRVRASSLLLSLAIELAAVLVSVSAQQKFGINYGQIANNLPDPTQVATLLRSMNVNKVKLYDADPRVLTAFANTGVEFIIAVGNENLQTMAGSPAAARQWVAANVRPYIPATRITCVTVGNEVFSGNDTATMASLLPAMKAVHAALADLGLGGQATVSSAHSVNVLAASFPPSSGAFREDLAEYMKPILDFHAQTGSPFLINAYPFFAYKASPGSVSLPYVLFEPNPGVRDPSTGLSYDNMLYAQIDAVYAAMKAMGHTDVGVRISETGWPSRGDEDETGATVQNAAAYNGNLMQRVAMSQGTPLKPNVPVDVYVFALFNENMKPGPTSERNYGLFYPNGSPVYALSAGSGGGSGPGGSLNPYYTSMFSSSSRSAVSATFLTERVMLLLLLQATVILRHYC

SEQ ID NO: 32791 - protein, 403 aa, Zea mays subsp. mays
  peptide (1)..(403): Ceres Seq. ID no. 12379400
  misc_feature (31)..(349): Pfam Name: Pfam Description:  Glycosyl hydrolases family 17
  misc_feature (1)..(382): NCBI GI NO: 34908492 NR Description: putative beta-1,3-glucanase
  misc_feature (11)..(346): NCBI GI NO: 38346337 NR Description: OSJNBa0073L04.8
  misc_feature (29)..(346): NCBI GI NO: 18401444 NR Description: glycosyl hydrolase family 17; protein id:At2g27500
  misc_feature (29)..(346): NCBI GI NO: 25316425 NR Description: probable beta-1,3-glucanase
  misc_feature (7)..(390): NCBI GI NO: 419789 NR Description: hypothetical protein - potato
  misc_feature (8)..(361): NCBI GI NO: 25316443 NR Description: CDS protein F9L11.6
  misc_feature (8)..(361): NCBI GI NO: 30692765 NR Description: glycosyl hydrolase family 17
  misc_feature (1)..(359): NCBI GI NO: 6006371 NR Description: Similar to hypothetical protein - potato (S31196)
  misc_feature (10)..(361): NCBI GI NO: 37531294 NR Description: putative beta-1,3-glucanase
  misc_feature (7)..(361): NCBI GI NO: 15238298 NR Description: glycosyl hydrolase family 17; protein id:At5g42100
MGLRVRASSLLLSLAIELAAVLVSVSAQQKFGINYGQIANNLPDPTQVATLLRSMNVNKVKLYDADPRVLTAFANTGVEFIIAVGNENLQTMAGSPAAARQWVAANVRPYIPATRITCVTVGNEVFSGNDTATMASLLPAMKAVHAALADLGLGGQATVSSAHSVNVLAASFPPSSGAFREDLAEYMKPILDFHAQTGSPFLINAYPFFAYKASPGSVSLPYVLFEPNPGVRDPSTGLSYDNMLYAQIDAVYAAMKAMGHTDVGVRISETGWPSRGDEDETGATVQNAAAYNGNLMQRVAMSQGTPLKPNVPVDVYVFALFNENMKPGPTSERNYGLFYPNGSPVYALSAGSGGGSGPGGSLNPYYTSMFSSSSRSAVSATFLTERVMLLLLLQATVILRHYC

SEQ ID NO: 32792 - protein, 349 aa, Zea mays subsp. mays
  peptide (1)..(349): Ceres Seq. ID no. 12379401
  misc_feature (1)..(295): Pfam Name: Pfam Description:  Glycosyl hydrolases family 17
  misc_feature (1)..(328): NCBI GI NO: 34908492 NR Description: putative beta-1,3-glucanase
  misc_feature (1)..(292): NCBI GI NO: 38346337 NR Description: OSJNBa0073L04.8
  misc_feature (1)..(292): NCBI GI NO: 18401444 NR Description: glycosyl hydrolase family 17; protein id:At2g27500
  misc_feature (1)..(292): NCBI GI NO: 25316425 NR Description: probable beta-1,3-glucanase
  misc_feature (1)..(336): NCBI GI NO: 419789 NR Description: hypothetical protein - potato
  misc_feature (1)..(307): NCBI GI NO: 25316443 NR Description: CDS protein F9L11.6
  misc_feature (1)..(307): NCBI GI NO: 30692765 NR Description: glycosyl hydrolase family 17
  misc_feature (1)..(305): NCBI GI NO: 6006371 NR Description: Similar to hypothetical protein - potato (S31196)
  misc_feature (1)..(307): NCBI GI NO: 37531294 NR Description: putative beta-1,3-glucanase
  misc_feature (1)..(307): NCBI GI NO: 15238298 NR Description: glycosyl hydrolase family 17; protein id:At5g42100
MNVNKVKLYDADPRVLTAFANTGVEFIIAVGNENLQTMAGSPAAARQWVAANVRPYIPATRITCVTVGNEVFSGNDTATMASLLPAMKAVHAALADLGLGGQATVSSAHSVNVLAASFPPSSGAFREDLAEYMKPILDFHAQTGSPFLINAYPFFAYKASPGSVSLPYVLFEPNPGVRDPSTGLSYDNMLYAQIDAVYAAMKAMGHTDVGVRISETGWPSRGDEDETGATVQNAAAYNGNLMQRVAMSQGTPLKPNVPVDVYVFALFNENMKPGPTSERNYGLFYPNGSPVYALSAGSGGGSGPGGSLNPYYTSMFSSSSRSAVSATFLTERVMLLLLLQATVILRHYC

SEQ ID NO: 32793 - DNA, 1546 bp, Zea mays subsp. mays
  misc_feature (1)..(1546): Ceres Seq. ID no. 12342194
agggaagcttcttccactacagtccttgaggccgcccatcaacgactagacgctggtcaagctgcaccaaccctagccccataaccctaggtccctcctccacgcccccttccagagaggcgaggaaggaggcgaaaggaaccatggattcctccggcggcggcggtggagcgcagatcaagggtatggcgacgcacgggggccgctacgtgctgtacaacgtgtacggaaacctcttcgaggtctcctccaagtacgccccacccatccgccccatcggtcgcggcgcctacggcattgtctgcgcggctgtcaactcgcagtcaggggaggaggttgcgatcaagaaggttggcaatgcgttcgacaaccacatcgacgccaagcggacgctcagggaaatcaagctgctgcgccacatggaccatgagaacatccttgccttaaaggatgtaattcggcccccaactagagagaactttaatgacgtgtacattgttactgagttaatggatacagatctccatcagatcgtacgctcaaatcagccattgactgatgatcattgccagtacttcttgtatcagttgttacgagggctaaaatatgtgcactcagcaaatatattgcaccgcgatctgaagccgagcaatttgttcctaaatgcaaattgtgacctcaagattgcagactttgggcttgcaaggaccacttcagagacagatctcatgacagagtatgtggtcactcgttggtaccgggcaccagagctgctgttgaactgttcacagtatactgctgccattgatgtctggtcagttggatgcatactaggtgaaatcgttactcgtcaacccctgtttcctggacgggattacatccagcaattaaaattgatcactgagctcataggctctccagatgatgcaagcctgggatttcttcgaagtgataatgcaaaaagatacatgaaacaactaccacagtttccaagacaggacttccgcctgcgtttccgcaacatgtctcctggcgcagtcgatttgttggaaaggatgcttgtgtttgatccaagcagacggattacagttgatgaggctctgcatcatccatacttggcttcacttcatgagatcaatgatgaacctacctgccctgcacctttcagctttgattttgagcaaccatcctttacagaagcgcatataaaagaactcatctggagggaatctttagcatttaacccagagcctccctactaatatcaaaaggatgatgagttatctgctagaggcatatgaagatctctaggtccagcggacgcaagaacttatgtctgtgtcagtgtgcgttgattatttacgtgctgtttgttgggcatacgggcatgggttggtgctgcaattgcaactctattatggcttgtgagagcaaacaaacgtctgtattcattttcagatgcctgaacccaggcttgtattataccgcttgactccataaattattcttgtgtatctatgcttgtaattttgcagacaattactcg

SEQ ID NO: 32794 - protein, 372 aa, Zea mays subsp. mays
  peptide (1)..(372): Ceres Seq. ID no. 12342195
  misc_feature (40)..(325): Pfam Name: Pfam Description:  Protein kinase domain
  misc_feature (1)..(370): NCBI GI NO: 25052804 NR Description: mitogen-activated protein kinase 4
  misc_feature (12)..(371): NCBI GI NO: 2129855 NR Description: mitogen-activated protein kinase MMK2 (EC 2
  misc_feature (12)..(371): NCBI GI NO: 2499613 NR Description: MITOGEN-ACTIVATED PROTEIN KINASE HOMOLOG MMK2
  misc_feature (1)..(369): NCBI GI NO: 27312014 NR Description: mitogen-activated protein kinase
  misc_feature (2)..(369): NCBI GI NO: 15234152 NR Description: MAP kinase 4 (MPK4); protein id: At4g01370
  misc_feature (2)..(369): NCBI GI NO: 2129645 NR Description: mitogen-activated protein kinase 4 (EC 2
  misc_feature (2)..(369): NCBI GI NO: 21165527 NR Description: mitogen-activated protein kinase
  misc_feature (13)..(368): NCBI GI NO: 18378855 NR Description: MAP kinase, putative; protein id: At1g01560.1
  misc_feature (1)..(370): NCBI GI NO: 21431796 NR Description: Mitogen-activated protein kinase homolog 5
  misc_feature (1)..(369): NCBI GI NO: 29500879 NR Description: mitogen-activated protein kinase
MDSSGGGGGAQIKGMATHGGRYVLYNVYGNLFEVSSKYAPPIRPIGRGAYGIVCAAVNSQSGEEVAIKKVGNAFDNHIDAKRTLREIKLLRHMDHENILALKDVIRPPTRENFNDVYIVTELMDTDLHQIVRSNQPLTDDHCQYFLYQLLRGLKYVHSANILHRDLKPSNLFLNANCDLKIADFGLARTTSETDLMTEYVVTRWYRAPELLLNCSQYTAAIDVWSVGCILGEIVTRQPLFPGRDYIQQLKLITELIGSPDDASLGFLRSDNAKRYMKQLPQFPRQDFRLRFRNMSPGAVDLLERMLVFDPSRRITVDEALHHPYLASLHEINDEPTCPAPFSFDFEQPSFTEAHIKELIWRESLAFNPEPPY

SEQ ID NO: 32795 - protein, 358 aa, Zea mays subsp. mays
  peptide (1)..(358): Ceres Seq. ID no. 12342196
  misc_feature (26)..(311): Pfam Name: Pfam Description:  Protein kinase domain
  misc_feature (1)..(356): NCBI GI NO: 25052804 NR Description: mitogen-activated protein kinase 4
  misc_feature (1)..(357): NCBI GI NO: 2129855 NR Description: mitogen-activated protein kinase MMK2 (EC 2
  misc_feature (1)..(357): NCBI GI NO: 2499613 NR Description: MITOGEN-ACTIVATED PROTEIN KINASE HOMOLOG MMK2
  misc_feature (1)..(355): NCBI GI NO: 27312014 NR Description: mitogen-activated protein kinase
  misc_feature (1)..(355): NCBI GI NO: 15234152 NR Description: MAP kinase 4 (MPK4); protein id: At4g01370
  misc_feature (1)..(355): NCBI GI NO: 2129645 NR Description: mitogen-activated protein kinase 4 (EC 2
  misc_feature (1)..(355): NCBI GI NO: 21165527 NR Description: mitogen-activated protein kinase
  misc_feature (1)..(354): NCBI GI NO: 18378855 NR Description: MAP kinase, putative; protein id: At1g01560.1
  misc_feature (1)..(356): NCBI GI NO: 21431796 NR Description: Mitogen-activated protein kinase homolog 5
  misc_feature (1)..(355): NCBI GI NO: 29500879 NR Description: mitogen-activated protein kinase
MATHGGRYVLYNVYGNLFEVSSKYAPPIRPIGRGAYGIVCAAVNSQSGEEVAIKKVGNAFDNHIDAKRTLREIKLLRHMDHENILALKDVIRPPTRENFNDVYIVTELMDTDLHQIVRSNQPLTDDHCQYFLYQLLRGLKYVHSANILHRDLKPSNLFLNANCDLKIADFGLARTTSETDLMTEYVVTRWYRAPELLLNCSQYTAAIDVWSVGCILGEIVTRQPLFPGRDYIQQLKLITELIGSPDDASLGFLRSDNAKRYMKQLPQFPRQDFRLRFRNMSPGAVDLLERMLVFDPSRRITVDEALHHPYLASLHEINDEPTCPAPFSFDFEQPSFTEAHIKELIWRESLAFNPEPPY

SEQ ID NO: 32796 - protein, 280 aa, Zea mays subsp. mays
  peptide (1)..(280): Ceres Seq. ID no. 12342197
  misc_feature (1)..(233): Pfam Name: Pfam Description:  Protein kinase domain
  misc_feature (1)..(278): NCBI GI NO: 25052804 NR Description: mitogen-activated protein kinase 4
  misc_feature (1)..(279): NCBI GI NO: 2129855 NR Description: mitogen-activated protein kinase MMK2 (EC 2
  misc_feature (1)..(279): NCBI GI NO: 2499613 NR Description: MITOGEN-ACTIVATED PROTEIN KINASE HOMOLOG MMK2
  misc_feature (1)..(277): NCBI GI NO: 27312014 NR Description: mitogen-activated protein kinase
  misc_feature (1)..(277): NCBI GI NO: 15234152 NR Description: MAP kinase 4 (MPK4); protein id: At4g01370
  misc_feature (1)..(277): NCBI GI NO: 2129645 NR Description: mitogen-activated protein kinase 4 (EC 2
  misc_feature (1)..(277): NCBI GI NO: 21165527 NR Description: mitogen-activated protein kinase
  misc_feature (1)..(276): NCBI GI NO: 18378855 NR Description: MAP kinase, putative; protein id: At1g01560.1
  misc_feature (1)..(278): NCBI GI NO: 21431796 NR Description: Mitogen-activated protein kinase homolog 5
  misc_feature (1)..(277): NCBI GI NO: 29500879 NR Description: mitogen-activated protein kinase
MDHENILALKDVIRPPTRENFNDVYIVTELMDTDLHQIVRSNQPLTDDHCQYFLYQLLRGLKYVHSANILHRDLKPSNLFLNANCDLKIADFGLARTTSETDLMTEYVVTRWYRAPELLLNCSQYTAAIDVWSVGCILGEIVTRQPLFPGRDYIQQLKLITELIGSPDDASLGFLRSDNAKRYMKQLPQFPRQDFRLRFRNMSPGAVDLLERMLVFDPSRRITVDEALHHPYLASLHEINDEPTCPAPFSFDFEQPSFTEAHIKELIWRESLAFNPEPPY

SEQ ID NO: 32797 - DNA, 1621 bp, Zea mays subsp. mays
  misc_feature (1)..(1621): Ceres Seq. ID no. 12357943
atactcgatttctatttctctcaatcggttctctcgttctcctacctcccttgcgctctgcgactctcttcttgtctctggtggcgacgagctgacgattgggcggccgccgccgccgacctacgccaggtgcccgagtctccacctttggaccttcaccggcgacgaacacccaccagttgacttggacagccagaactttggaaatggcaagatcaccaaaaggtaggaacctccaagctcgtcaacgtaggtcagcttcttcagatgtgcccttgaggtcctgtgagacgaaaggaacaagcaaaggaaatgatgtgtcagtgacatctgagaagaatgaatggaaaggagcaacttgcccagtttgcttggagcatccacatgatgctgttctcctcctgtgtacctctcaccacaagggctgccggccatatatgtgtggtaccaactaccgtcattccaactgccttgaacactttaaaggagcttatgcaaaggaaaaaatggctcttggtgtttcagctgagtctgcatctggccttccattatcctcaaacacactgccatcaagcaaccagccatgtgtaatggaacttgcctgccctctgtgccgtggagaggttaaaggatggactgtggttgagcctgctcgtcagtatctgaaccggaaaaggagaaattgcatgcatgatgggtgctcattccatggctcgtataaggagctttgcaagcatgtgaaatcgaagcaccctacagcaaaacctcgtgaagttgatcctgctactgcagatgagtggaaaaggtttgaatgtgagagagagcggcaggatgccatcagcactatcaggtccatgaacccaggatctgtgatcatgggggattatgtccttgagttgaatggtggtggcaacaaccatttgctctcagatggagataactttgacttaggggaaaggctcaacttcttcacatccttagatcgtactttgaatgagagaattgacctgtacgactcgtcagatggtttggatgaggggtttgacttcttggcatccctgtttacccatggcaggagaatctctactggaggctcattgagcagggcttatagaagacacagggacaggcctagacgttcaacgaattctgctgatgcttctgacattcagcatgagtcagctagcactcaaaggggacagcgtgctgttcgggctacaggcaggacttcacggcgccaccaccacctacgcgaggcagctgagagatgaaatcatttttagaggcggggtgctttttcatgctatccatgtgcaggggacgcaaaataacacaccatggtatgttgctgctctagtggtcggaggtccgtcagattcttccttttttttgtcccattgttgagacagcaaccgaggatataagattggatggagatgaggtctctgtttggcttgtgctgatgcctgcatgatgtgctctgcgatgtgcatccagttttgggatcaagcagctccacttttccggtgctgcctttgcatggattttgtgaatgcccttgccttgagtttcctttccctttctgttgatcaaaggaaacttcaaacagattgttttggcc

SEQ ID NO: 32798 - protein, 354 aa, Zea mays subsp. mays
  peptide (1)..(354): Ceres Seq. ID no. 12357944
  misc_feature (1)..(260): NCBI GI NO: 38344827 NR Description: OSJNBa0064H22.8
  misc_feature (130)..(246): NCBI GI NO: 15236507 NR Description: hypothetical protein; protein id: At4g08460
  misc_feature (43)..(100): NCBI GI NO: 15236507 NR Description: hypothetical protein; protein id: At4g08460
  misc_feature (122)..(235): NCBI GI NO: 25365932 NR Description: unknown protein T32E8.10
  misc_feature (122)..(235): NCBI GI NO: 30699285 NR Description: expressed protein [Arabidopsis thaliana]
  misc_feature (44)..(99): NCBI GI NO: 25365932 NR Description: unknown protein T32E8.10
  misc_feature (44)..(99): NCBI GI NO: 30699285 NR Description: expressed protein [Arabidopsis thaliana]
  misc_feature (1)..(258): NCBI GI NO: 15221290 NR Description: unknown protein; protein id: At1g68140
  misc_feature (116)..(234): NCBI GI NO: 38346521 NR Description: OSJNBa0027H09.16
  misc_feature (37)..(121): NCBI GI NO: 38346521 NR Description: OSJNBa0027H09.16
MARSPKGRNLQARQRRSASSDVPLRSCETKGTSKGNDVSVTSEKNEWKGATCPVCLEHPHDAVLLLCTSHHKGCRPYMCGTNYRHSNCLEHFKGAYAKEKMALGVSAESASGLPLSSNTLPSSNQPCVMELACPLCRGEVKGWTVVEPARQYLNRKRRNCMHDGCSFHGSYKELCKHVKSKHPTAKPREVDPATADEWKRFECERERQDAISTIRSMNPGSVIMGDYVLELNGGGNNHLLSDGDNFDLGERLNFFTSLDRTLNERIDLYDSSDGLDEGFDFLASLFTHGRRISTGGSLSRAYRRHRDRPRRSTNSADASDIQHESASTQRGQRAVRATGRTSRRHHHLREAAER

SEQ ID NO: 32799 - protein, 277 aa, Zea mays subsp. mays
  peptide (1)..(277): Ceres Seq. ID no. 12357945
  misc_feature (1)..(183): NCBI GI NO: 38344827 NR Description: OSJNBa0064H22.8
  misc_feature (53)..(169): NCBI GI NO: 15236507 NR Description: hypothetical protein; protein id: At4g08460
  misc_feature (1)..(23): NCBI GI NO: 15236507 NR Description: hypothetical protein; protein id: At4g08460
  misc_feature (45)..(158): NCBI GI NO: 25365932 NR Description: unknown protein T32E8.10
  misc_feature (45)..(158): NCBI GI NO: 30699285 NR Description: expressed protein [Arabidopsis thaliana]
  misc_feature (1)..(22): NCBI GI NO: 25365932 NR Description: unknown protein T32E8.10
  misc_feature (1)..(22): NCBI GI NO: 30699285 NR Description: expressed protein [Arabidopsis thaliana]
  misc_feature (1)..(181): NCBI GI NO: 15221290 NR Description: unknown protein; protein id: At1g68140
  misc_feature (39)..(157): NCBI GI NO: 38346521 NR Description: OSJNBa0027H09.16
  misc_feature (1)..(44): NCBI GI NO: 38346521 NR Description: OSJNBa0027H09.16
MCGTNYRHSNCLEHFKGAYAKEKMALGVSAESASGLPLSSNTLPSSNQPCVMELACPLCRGEVKGWTVVEPARQYLNRKRRNCMHDGCSFHGSYKELCKHVKSKHPTAKPREVDPATADEWKRFECERERQDAISTIRSMNPGSVIMGDYVLELNGGGNNHLLSDGDNFDLGERLNFFTSLDRTLNERIDLYDSSDGLDEGFDFLASLFTHGRRISTGGSLSRAYRRHRDRPRRSTNSADASDIQHESASTQRGQRAVRATGRTSRRHHHLREAAER

SEQ ID NO: 32800 - protein, 254 aa, Zea mays subsp. mays
  peptide (1)..(254): Ceres Seq. ID no. 12357946
  misc_feature (1)..(160): NCBI GI NO: 38344827 NR Description: OSJNBa0064H22.8
  misc_feature (30)..(146): NCBI GI NO: 15236507 NR Description: hypothetical protein; protein id: At4g08460
  misc_feature (22)..(135): NCBI GI NO: 25365932 NR Description: unknown protein T32E8.10
  misc_feature (22)..(135): NCBI GI NO: 30699285 NR Description: expressed protein [Arabidopsis thaliana]
  misc_feature (1)..(158): NCBI GI NO: 15221290 NR Description: unknown protein; protein id: At1g68140
  misc_feature (16)..(134): NCBI GI NO: 38346521 NR Description: OSJNBa0027H09.16
  misc_feature (1)..(21): NCBI GI NO: 38346521 NR Description: OSJNBa0027H09.16
  misc_feature (30)..(146): NCBI GI NO: 7487028 NR Description: hypothetical protein T15F16
  misc_feature (28)..(133): NCBI GI NO: 15230170 NR Description: unknown protein; protein id: At3g24740
  misc_feature (1)..(116): NCBI GI NO: 34912600 NR Description: P0046B10.17
MALGVSAESASGLPLSSNTLPSSNQPCVMELACPLCRGEVKGWTVVEPARQYLNRKRRNCMHDGCSFHGSYKELCKHVKSKHPTAKPREVDPATADEWKRFECERERQDAISTIRSMNPGSVIMGDYVLELNGGGNNHLLSDGDNFDLGERLNFFTSLDRTLNERIDLYDSSDGLDEGFDFLASLFTHGRRISTGGSLSRAYRRHRDRPRRSTNSADASDIQHESASTQRGQRAVRATGRTSRRHHHLREAAER

SEQ ID NO: 32801 - DNA, 672 bp, Zea mays subsp. mays
  misc_feature (1)..(672): Ceres Seq. ID no. 12386635
gagcctcgaaccctaacccccaccacgtaactccttggaattaccgaaatgccactcttcttctccaaattcgcaccattggtcccccgcgtccgccgcctttccatcgccgcggcgacagccgccggcgaggaccctaagctgtctcgaatcgcggatgagctcctcgccctatcccccgccgagctggacgactatgcggcgctcctgcgcctcaagctccgcctgtcgctcacctccagcgcagctgctggagcctcctccggccggggccggggacgccgcggctgcagccgtggaggccgccgcggcggtgaagacggcgttcgacttgaagatcgagaagtacgaggccgcggcgaagattaagatcatcaaggaggtgcgcgcgatgacggacctgggtctgaaggaggcaaaggagctcgtggagaaggcgcccatagtggtgcgcgcggggttgcctaaagaggaggccgaggcgctcgccgctaagctcaaggccgccggtgccgctgttgcactcgagtgatcccacgaaggtgtcgcctcttttttttttgttcctagtgttcttagacgatgcaacgtatctttgcgccttaatttgtttgtaatggaattcaatagattggatatgggtataaagaggatgcaacgtctaagaacact

SEQ ID NO: 32802 - protein, 124 aa, Zea mays subsp. mays
  peptide (1)..(124): Ceres Seq. ID no. 12386636
  misc_feature (57)..(124): Pfam Name: Pfam Description:  Ribosomal protein L7/L12 C-terminal domain
  misc_feature (39)..(124): NCBI GI NO: 34913132 NR Description: contains EST AU058363
  misc_feature (40)..(124): NCBI GI NO: 15235649 NR Description: ribosomal - like protein; protein id: At4g37660
  misc_feature (38)..(124): NCBI GI NO: 18409467 NR Description: expressed protein; protein id: At1g70190
  misc_feature (1)..(124): NCBI GI NO: 15230614 NR Description: hypothetical protein; protein id: At3g06040
  misc_feature (35)..(124): NCBI GI NO: 15234393 NR Description: ribosomal protein; protein id: At4g36420
  misc_feature (37)..(124): NCBI GI NO: 15209174 NR Description: hypothetical protein [Solanum demissum]
  misc_feature (36)..(124): NCBI GI NO: 31201963 NR Description: ENSANGP00000015113 [Anopheles gambiae]
  misc_feature (40)..(124): NCBI GI NO: 15227539 NR Description: 50S ribosomal protein L7/L12; protein id:At2g03130
  misc_feature (43)..(123): NCBI GI NO: 730573 NR Description: 50S ribosomal protein L7/L12
  misc_feature (35)..(124): NCBI GI NO: 22970438 NR Description: hypothetical protein [Chloroflexus aurantiacus]
MSSSPYPPPSWTTMRRSCASSSACRSPPAQLLEPPPAGAGDAAAAAVEAAAAVKTAFDLKIEKYEAAAKIKIIKEVRAMTDLGLKEAKELVEKAPIVVRAGLPKEEAEALAAKLKAAGAAVALE

SEQ ID NO: 32803 - protein, 111 aa, Zea mays subsp. mays
  peptide (1)..(111): Ceres Seq. ID no. 12386637
  misc_feature (44)..(111): Pfam Name: Pfam Description:  Ribosomal protein L7/L12 C-terminal domain
  misc_feature (26)..(111): NCBI GI NO: 34913132 NR Description: contains EST AU058363
  misc_feature (27)..(111): NCBI GI NO: 15235649 NR Description: ribosomal - like protein; protein id: At4g37660
  misc_feature (25)..(111): NCBI GI NO: 18409467 NR Description: expressed protein; protein id: At1g70190
  misc_feature (1)..(111): NCBI GI NO: 15230614 NR Description: hypothetical protein; protein id: At3g06040
  misc_feature (22)..(111): NCBI GI NO: 15234393 NR Description: ribosomal protein; protein id: At4g36420
  misc_feature (24)..(111): NCBI GI NO: 15209174 NR Description: hypothetical protein [Solanum demissum]
  misc_feature (23)..(111): NCBI GI NO: 31201963 NR Description: ENSANGP00000015113 [Anopheles gambiae]
  misc_feature (27)..(111): NCBI GI NO: 15227539 NR Description: 50S ribosomal protein L7/L12; protein id:At2g03130
  misc_feature (30)..(110): NCBI GI NO: 730573 NR Description: 50S ribosomal protein L7/L12
  misc_feature (22)..(111): NCBI GI NO: 22970438 NR Description: hypothetical protein [Chloroflexus aurantiacus]
MRRSCASSSACRSPPAQLLEPPPAGAGDAAAAAVEAAAAVKTAFDLKIEKYEAAAKIKIIKEVRAMTDLGLKEAKELVEKAPIVVRAGLPKEEAEALAAKLKAAGAAVALE

SEQ ID NO: 32804 - protein, 106 aa, Zea mays subsp. mays
  peptide (1)..(106): Ceres Seq. ID no. 12386638
  misc_feature (1)..(72): NCBI GI NO: 15235649 NR Description: ribosomal - like protein; protein id: At4g37660
  misc_feature (1)..(96): NCBI GI NO: 34913132 NR Description: contains EST AU058363
  misc_feature (18)..(75): NCBI GI NO: 31201963 NR Description: ENSANGP00000015113 [Anopheles gambiae]
MPLFFSKFAPLVPRVRRLSIAAATAAGEDPKLSRIADELLALSPAELDDYAALLRLKLRLSLTSSAAAGASSGRGRGRRGCSRGGRRGGEDGVRLEDREVRGRGED

SEQ ID NO: 32805 - DNA, 1244 bp, Zea mays subsp. mays
  misc_feature (1)..(1244): Ceres Seq. ID no. 12342112
gttcgccgctcttcgctcctcggtcctcagccctcacacgccgcccgcccgcgacgaagcccgcatagccgccgccaagcgccggagttgccacctaccgcgcgcccatctgccgccgatgctgcgcactcatctgctacccgaggcttggcggcggccactgccccaggaggcaggagcgcgacaccaaagtccgcgcatttccttccaccgagccgcaccaagatccgggatccaaggtggccaagttcgttgcggcggccctgaacttcgatggctgtcctcgtcacggaattcgtcctcagattcacagccatggactacaatgtgcgtgaatgcagactataccactcctgctgattctgtcgccacctcggagcaagcaggtggtgaagctgaggccaccttagaaacaggtggtgaagctgcggccaccttggagcaaacaggtggcgaaaccgaagagccgaccattgtagcacctgctaatgaatatacagtgcaggaggctgctcctcagcagaagtgtgcaaagatacacgacttttgcctagggataccttttggtggacttttactctccatgggccttattggatttctcttctggaggagccctgcgagtcttacctttggtgttgcacctggccttgccatattggccctggctgtacttagcctcaatgtctggaggagcgggaagtccagcttaccgttcatactggcgcaagcaggcattgccgctgcggtagcatggaagcacggccaggcgtacaccactacgaggaagctgcttccgtggggcttctacgtcgcgctaagtgccgcaatgatctgcttctactcctacgttcttcttgccggagggaatccgcctcctaagaaggcgaaggcgaaggctgctgcttgatttgatgttgaaggcattcaccggagcgtctcataattgcactacctttctctggtaaatagggttgtggtatggcctctgtttacttagtaaaagactgaggagataagactgtcccccctatgctgcataactgttgttgtttcctttatatatacatgatcaataagggctgggttggttccattccatcccactacccatctcatttatggtggtaaatagggttggcctttcttttttggctttggtttgaagtgtttgacgagattttgtacatttcctttttagagagaagcacattctatcacaagaggctcgacatgctattgcc

SEQ ID NO: 32806 - protein, 302 aa, Zea mays subsp. mays
  peptide (1)..(302): Ceres Seq. ID no. 12342113
  misc_feature (182)..(285): Pfam Name: UPF0136 Pfam Description: Uncharacterised protein family
  misc_feature (139)..(298): NCBI GI NO: 38344745 NR Description: OSJNBa0089K21.3
  misc_feature (117)..(302): NCBI GI NO: 18410685 NR Description: expressed protein; protein id: At3g57280
  misc_feature (117)..(302): NCBI GI NO: 11290570 NR Description: hypothetical protein F28O9
  misc_feature (179)..(297): NCBI GI NO: 18403201 NR Description: expressed protein; protein id: At1g50740
  misc_feature (179)..(297): NCBI GI NO: 15232290 NR Description: unknown protein; protein id: At3g20510.1
  misc_feature (179)..(295): NCBI GI NO: 34896628 NR Description: hypothetical protein [Oryza sativa]
  misc_feature (124)..(295): NCBI GI NO: 7488560 NR Description: inner envelope membrane protein precursor
  misc_feature (124)..(286): NCBI GI NO: 25365973 NR Description: hypothetical protein At2g38550
  misc_feature (124)..(286): NCBI GI NO: 21554522 NR Description: putative non-green plastid inner envelope membraneprotein
  misc_feature (124)..(286): NCBI GI NO: 18404784 NR Description: putative non-green plastid inner envelope membraneprotein
FAALRSSVLSPHTPPARDEARIAAAKRRSCHLPRAHLPPMLRTHLLPEAWRRPLPQEAGARHQSPRISFHRAAPRSGIQGGQVRCGGPELRWLSSSRNSSSDSQPWTTMCVNADYTTPADSVATSEQAGGEAEATLETGGEAAATLEQTGGETEEPTIVAPANEYTVQEAAPQQKCAKIHDFCLGIPFGGLLLSMGLIGFLFWRSPASLTFGVAPGLAILALAVLSLNVWRSGKSSLPFILAQAGIAAAVAWKHGQAYTTTRKLLPWGFYVALSAAMICFYSYVLLAGGNPPPKKAKAKAAA

SEQ ID NO: 32807 - protein, 263 aa, Zea mays subsp. mays
  peptide (1)..(263): Ceres Seq. ID no. 12342114
  misc_feature (143)..(246): Pfam Name: UPF0136 Pfam Description: Uncharacterised protein family
  misc_feature (100)..(259): NCBI GI NO: 38344745 NR Description: OSJNBa0089K21.3
  misc_feature (78)..(263): NCBI GI NO: 18410685 NR Description: expressed protein; protein id: At3g57280
  misc_feature (78)..(263): NCBI GI NO: 11290570 NR Description: hypothetical protein F28O9
  misc_feature (140)..(258): NCBI GI NO: 18403201 NR Description: expressed protein; protein id: At1g50740
  misc_feature (140)..(258): NCBI GI NO: 15232290 NR Description: unknown protein; protein id: At3g20510.1
  misc_feature (140)..(256): NCBI GI NO: 34896628 NR Description: hypothetical protein [Oryza sativa]
  misc_feature (85)..(256): NCBI GI NO: 7488560 NR Description: inner envelope membrane protein precursor
  misc_feature (85)..(247): NCBI GI NO: 25365973 NR Description: hypothetical protein At2g38550
  misc_feature (85)..(247): NCBI GI NO: 21554522 NR Description: putative non-green plastid inner envelope membraneprotein
  misc_feature (85)..(247): NCBI GI NO: 18404784 NR Description: putative non-green plastid inner envelope membraneprotein
MLRTHLLPEAWRRPLPQEAGARHQSPRISFHRAAPRSGIQGGQVRCGGPELRWLSSSRNSSSDSQPWTTMCVNADYTTPADSVATSEQAGGEAEATLETGGEAAATLEQTGGETEEPTIVAPANEYTVQEAAPQQKCAKIHDFCLGIPFGGLLLSMGLIGFLFWRSPASLTFGVAPGLAILALAVLSLNVWRSGKSSLPFILAQAGIAAAVAWKHGQAYTTTRKLLPWGFYVALSAAMICFYSYVLLAGGNPPPKKAKAKAAA

SEQ ID NO: 32808 - protein, 194 aa, Zea mays subsp. mays
  peptide (1)..(194): Ceres Seq. ID no. 12342115
  misc_feature (74)..(177): Pfam Name: UPF0136 Pfam Description: Uncharacterised protein family
  misc_feature (31)..(190): NCBI GI NO: 38344745 NR Description: OSJNBa0089K21.3
  misc_feature (9)..(194): NCBI GI NO: 18410685 NR Description: expressed protein; protein id: At3g57280
  misc_feature (9)..(194): NCBI GI NO: 11290570 NR Description: hypothetical protein F28O9
  misc_feature (71)..(189): NCBI GI NO: 18403201 NR Description: expressed protein; protein id: At1g50740
  misc_feature (71)..(189): NCBI GI NO: 15232290 NR Description: unknown protein; protein id: At3g20510.1
  misc_feature (71)..(187): NCBI GI NO: 34896628 NR Description: hypothetical protein [Oryza sativa]
  misc_feature (16)..(187): NCBI GI NO: 7488560 NR Description: inner envelope membrane protein precursor
  misc_feature (16)..(178): NCBI GI NO: 25365973 NR Description: hypothetical protein At2g38550
  misc_feature (16)..(178): NCBI GI NO: 21554522 NR Description: putative non-green plastid inner envelope membraneprotein
  misc_feature (16)..(178): NCBI GI NO: 18404784 NR Description: putative non-green plastid inner envelope membraneprotein
MCVNADYTTPADSVATSEQAGGEAEATLETGGEAAATLEQTGGETEEPTIVAPANEYTVQEAAPQQKCAKIHDFCLGIPFGGLLLSMGLIGFLFWRSPASLTFGVAPGLAILALAVLSLNVWRSGKSSLPFILAQAGIAAAVAWKHGQAYTTTRKLLPWGFYVALSAAMICFYSYVLLAGGNPPPKKAKAKAAA

SEQ ID NO: 32809 - DNA, 757 bp, Zea mays subsp. mays
  misc_feature (1)..(757): Ceres Seq. ID no. 12355612
aagccaaacactccggcagctgtggtggagacgcctccgcctcccaaacacccgaatcaaactaacagccaccgatggcgtcgccatcgcggttgctcccgcccacgcctccttcggccgcccagccccgcggcccgcgggatcgcctcgccttgccgcgcctccggtgcctcgccgccgccgcagcctccgcctcgcccactgatggcgctgtgctgctggagcgtggcgggttccgcggcggtggccgtgcgggagttcgtcacgcttgacgagctccgcgctgccgtgcgcctccgcgtccgcaccttccacgagtacgcagacgactccgtcggaaccgaggatcacagaaaggctcttgcagatagggagtttgaagcattacaggataggatttctgggaagatgataaattttcgaagagtttcttgcataaacgggactgttccactgtccccatcattaatgtcagctgaggaactttgttctatgtgcaagtttgtggaggatggaaaagagagattagtagttggtagtttagaccttaatcagtgtctttggctaccagatgaattgactggaaagaggcctggggtacgaccgttgtttcctctttctacgctattgcagaatacttatgatcaaaacatatttttgatagttgttattggtatttttgaacttgctttggtcatcgctttgttgttgttttggcaataaagatagactcactacatctaacttctttcttgtc

SEQ ID NO: 32810 - protein, 240 aa, Zea mays subsp. mays
  peptide (1)..(240): Ceres Seq. ID no. 12355613
  misc_feature (12)..(200): NCBI GI NO: 28812153 NR Description: B1015H11.33
  misc_feature (66)..(198): NCBI GI NO: 21536955 NR Description: unknown [Arabidopsis thaliana]
  misc_feature (66)..(198): NCBI GI NO: 18417112 NR Description: putative protein; protein id: At4g28030
KPNTPAAVVETPPPPKHPNQTNSHRWRRHRGCSRPRLLRPPSPAARGIASPCRASGASPPPQPPPRPLMALCCWSVAGSAAVAVREFVTLDELRAAVRLRVRTFHEYADDSVGTEDHRKALADREFEALQDRISGKMINFRRVSCINGTVPLSPSLMSAEELCSMCKFVEDGKERLVVGSLDLNQCLWLPDELTGKRPGVRPLFPLSTLLQNTYDQNIFLIVVIGIFELALVIALLLFWQ

SEQ ID NO: 32811 - protein, 172 aa, Zea mays subsp. mays
  peptide (1)..(172): Ceres Seq. ID no. 12355614
  misc_feature (1)..(132): NCBI GI NO: 28812153 NR Description: B1015H11.33
  misc_feature (1)..(130): NCBI GI NO: 21536955 NR Description: unknown [Arabidopsis thaliana]
  misc_feature (1)..(130): NCBI GI NO: 18417112 NR Description: putative protein; protein id: At4g28030
MALCCWSVAGSAAVAVREFVTLDELRAAVRLRVRTFHEYADDSVGTEDHRKALADREFEALQDRISGKMINFRRVSCINGTVPLSPSLMSAEELCSMCKFVEDGKERLVVGSLDLNQCLWLPDELTGKRPGVRPLFPLSTLLQNTYDQNIFLIVVIGIFELALVIALLLFWQ

SEQ ID NO: 32812 - DNA, 1426 bp, Zea mays subsp. mays
  misc_feature (1)..(1426): Ceres Seq. ID no. 12441479
gcacgagaccattacctagaacatcctaatcgaaaacacaccttccctcggtcccttccatctcctagccgccgccgccgccgccgctgcccaaaaccctacctaccctcttcttcccctcactctcctttcatctccattctaatggcggcccaacccgtccggcggcggctgctgctcagaaagccgagacgaagaagtccgccgtggcgcctgctgggaaggctgcccagcctgcggcgaccaccaagttcccgaccaagcccgctcctccctcgcagacggttcgggatgcacgcggcggtggctcatcagctcgtggaggctttggccgtggtgaacgtggccgtggcagaggtggacggggatatggccagaaccgtggcttcagtggtgacaatggcaatgacttccagggaggttatggtggcggaggctatggggatggtgctgtaactggtggatctgaaggagaaagggagagagacactcgtcccccgtaccgtggcggaggcagacgtggtggttacaggaatgttgagtttgctgatgactctgagaggccaccacggagaaactatgagcgccacagcgggactggccatggctatgagatgaagcgtgatggcgcagggcgagggaactggggcactgccactgatgaacttattgcccaggatgcagaggactctccgaagatggaggaggctgctcctgttgctgagaaacaaggtgagcagaatgatgccccagcagcagatgagaacaaaggtaacaaggatgctactgcaaatgaggaggaagaaaaggaagaggacaaggagatgactctggaggaatttgagaaaataagagaggagaagaggaaagcactacttgcattgaaggctgaggagaggaaagttgaagttgacaaggatttgcagtctctgcagccactttcaaacaagaaagaaaatgatgaagttttcattaagctgggttctgacaaggataagaagaaggaaaatgctgagcgtgatgagcgtgccaagaagtcggtgagcatcaacgagttcctgaaacctgctgaaggagaaaggtactatggcggccgtggccgtggaaggggccgtggggagcgtggtggttttagaggcggatacggagggggatacagtcgtggcccagctgctgctgctccatccattgaagatcaagctcagttcccaagccttggtgggaagtgaagggcgcccagctgctgctgtcaccgagcgttgtgttgtctgctgttgtcatatttaaattttgtccgacgttaaatttctgtgccacggtttaaacggaacaaataatgatgttgcatgtggctatctttagttatgtggtacttgacgttgaataccggagttgttgtttatcagaattaacctccaatttttgt

SEQ ID NO: 32813 - protein, 204 aa, Zea mays subsp. mays
  peptide (1)..(204): Ceres Seq. ID no. 12441480
  misc_feature (1)..(146): Pfam Name: Pfam Description:  Hyaluronan / mRNA binding family
  misc_feature (1)..(204): NCBI GI NO: 34910712 NR Description: putative nuclear RNA binding protein A
  misc_feature (1)..(204): NCBI GI NO: 7488863 NR Description: probable transcription factor - fava bean
  misc_feature (1)..(204): NCBI GI NO: 39725276 NR Description: salt tolerance protein 1 [Beta vulgaris]
  misc_feature (1)..(202): NCBI GI NO: 39725278 NR Description: salt tolerance protein 2 [Beta vulgaris]
  misc_feature (1)..(204): NCBI GI NO: 6492266 NR Description: nuclear RNA binding protein A [Spinacia oleracea]
  misc_feature (1)..(202): NCBI GI NO: 15238039 NR Description: putative protein; protein id: At5g47210
  misc_feature (1)..(202): NCBI GI NO: 21553991 NR Description: nuclear RNA binding protein A-like protein
  misc_feature (1)..(204): NCBI GI NO: 34912396 NR Description: putative putative nuclear RNA binding protein A
  misc_feature (1)..(204): NCBI GI NO: 15235894 NR Description: nuclear antigen homolog; protein id: At4g16830
  misc_feature (1)..(204): NCBI GI NO: 21537052 NR Description: nuclear antigen homolog [Arabidopsis thaliana]
MKRDGAGRGNWGTATDELIAQDAEDSPKMEEAAPVAEKQGEQNDAPAADENKGNKDATANEEEEKEEDKEMTLEEFEKIREEKRKALLALKAEERKVEVDKDLQSLQPLSNKKENDEVFIKLGSDKDKKKENAERDERAKKSVSINEFLKPAEGERYYGGRGRGRGRGERGGFRGGYGGGYSRGPAAAAPSIEDQAQFPSLGGK

SEQ ID NO: 32814 - protein, 176 aa, Zea mays subsp. mays
  peptide (1)..(176): Ceres Seq. ID no. 12441481
  misc_feature (1)..(118): Pfam Name: Pfam Description:  Hyaluronan / mRNA binding family
  misc_feature (1)..(176): NCBI GI NO: 34910712 NR Description: putative nuclear RNA binding protein A
  misc_feature (1)..(176): NCBI GI NO: 7488863 NR Description: probable transcription factor - fava bean
  misc_feature (1)..(176): NCBI GI NO: 39725276 NR Description: salt tolerance protein 1 [Beta vulgaris]
  misc_feature (1)..(174): NCBI GI NO: 39725278 NR Description: salt tolerance protein 2 [Beta vulgaris]
  misc_feature (1)..(176): NCBI GI NO: 6492266 NR Description: nuclear RNA binding protein A [Spinacia oleracea]
  misc_feature (1)..(174): NCBI GI NO: 15238039 NR Description: putative protein; protein id: At5g47210
  misc_feature (1)..(174): NCBI GI NO: 21553991 NR Description: nuclear RNA binding protein A-like protein
  misc_feature (1)..(176): NCBI GI NO: 34912396 NR Description: putative putative nuclear RNA binding protein A
  misc_feature (1)..(176): NCBI GI NO: 15235894 NR Description: nuclear antigen homolog; protein id: At4g16830
  misc_feature (1)..(176): NCBI GI NO: 21537052 NR Description: nuclear antigen homolog [Arabidopsis thaliana]
MEEAAPVAEKQGEQNDAPAADENKGNKDATANEEEEKEEDKEMTLEEFEKIREEKRKALLALKAEERKVEVDKDLQSLQPLSNKKENDEVFIKLGSDKDKKKENAERDERAKKSVSINEFLKPAEGERYYGGRGRGRGRGERGGFRGGYGGGYSRGPAAAAPSIEDQAQFPSLGGK

SEQ ID NO: 32815 - protein, 151 aa, Zea mays subsp. mays
  peptide (1)..(151): Ceres Seq. ID no. 12441482
ARDHYLEHPNRKHTFPRSLPSPSRRRRRRCPKPYLPSSSPHSPFISILMAAQPVRRRLLLRKPRRRSPPWRLLGRLPSLRRPPSSRPSPLLPRRRFGMHAAVAHQLVEALAVVNVAVAEVDGDMARTVASVVTMAMTSREVMVAEAMGMVL

SEQ ID NO: 32816 - DNA, 1511 bp, Zea mays subsp. mays
  misc_feature (1)..(1511): Ceres Seq. ID no. 12351690
agcccggcacaccgagccgcggcgtcaaggacgacatatccgagctcaccgaaacgctcactcgccgcctctggggcgtcgcatccttcctcgcaccgcccccgaccccgccggaggcctccaccccgcgcgccgcgactccggcacaaggggaagatgaggggattgaggatggggaggaggccgcggtgctgtccccccggactgcggggatccgcagcgatctagccgagataggcggaaggatgtggagcggtttctcgatgctgcagaacaacttggccgtggccgagatctccaagatcgcctcgtcgctcctgccgttcgggcaaggggaggcggacgagggggagtccgtgcccggcatcaccgaagaggtggtggtgttcgtcaggcacatctccacgcggcccgagacatggctcgattttcccctcttcatcagcgagcgctacgcggatgatttcgaactgtcagatgctcagtacgtgcatgctctgtctgtagagcaccttgtgccaggattatcagatttaaaggctcagatttgctctactgacatgactgaagcatgtttctggaagatctactttgtgcttttgcactcgaaactcaataagcaagatgctgaggttctttcgacgccacagatcctagaagcaagggagcagttgttgcaaagtttagggtctgagaaaaagcggggatccaagtttcccgacgagtcatccgccgagagctcgaacgcatcctccgctcctgctgaagagaaggtgattcaacctccagtcatccaagacaaagcagacgcttgggagaaatcatcgtccgaagaaccttctgaaaccgtgtccgagaaattcccagtctcaaccaccgaagtggaaatggtggacaaatcagtggttgaggaagagctgactgtggcaaatgagagcaagacctcaccggtgaagtccaagcttccctacgaggctgatgaagaggaggaagtcgacgagtggcccgatgacgatgacgaccccaccgatgaggctggccaggcggcgggtgacaggactttgctagggcgggaggaggaggacgtatcgttcagtgatctggaggacgacgaggacgatgataggaggtagaaggggatgatgggcagtagccaagttggctaggggaagctcgtactatggtcccggcgcaaccacatgctggcttcattggagtagggccgagaacgcactcacacccaaggatcaatgtttcgttagttattattattattagagtccggaagtaatgagtcccaagcagtagcaataagcatgtatgtatctgccgcgcgtgttagtgctaatggcaagtcctgctgcttctgtattattggccccgtcctgtagcttgtacatagagcgctcacggctgggttgggcctttgtgtaataaacctaccgtccgggaacttgagcttgtgtttaaaaggacctgttcattagggagggacctggggttccagttcc

SEQ ID NO: 32817 - protein, 376 aa, Zea mays subsp. mays
  peptide (1)..(376): Ceres Seq. ID no. 12351691
  misc_feature (154)..(200): Pfam Name: Pfam Description:  BSD domain
  misc_feature (1)..(373): NCBI GI NO: 34909848 NR Description: OSJNBb0053G03.5
  misc_feature (6)..(374): NCBI GI NO: 18425006 NR Description: expressed protein; protein id: At5g65910
  misc_feature (145)..(374): NCBI GI NO: 7486518 NR Description: hypothetical protein F6H11
  misc_feature (6)..(145): NCBI GI NO: 7486518 NR Description: hypothetical protein F6H11
  misc_feature (6)..(373): NCBI GI NO: 15229611 NR Description: putative protein; protein id: At3g49800
  misc_feature (112)..(351): NCBI GI NO: 28273391 NR Description: putative BSD domain containing protein
  misc_feature (5)..(122): NCBI GI NO: 28273391 NR Description: putative BSD domain containing protein
  misc_feature (5)..(372): NCBI GI NO: 21555533 NR Description: unknown [Arabidopsis thaliana]
  misc_feature (5)..(372): NCBI GI NO: 18391195 NR Description: expressed protein; protein id: At1g10720
  misc_feature (138)..(372): NCBI GI NO: 6573740 NR Description: F20B24.15 [Arabidopsis thaliana]
PGTPSRGVKDDISELTETLTRRLWGVASFLAPPPTPPEASTPRAATPAQGEDEGIEDGEEAAVLSPRTAGIRSDLAEIGGRMWSGFSMLQNNLAVAEISKIASSLLPFGQGEADEGESVPGITEEVVVFVRHISTRPETWLDFPLFISERYADDFELSDAQYVHALSVEHLVPGLSDLKAQICSTDMTEACFWKIYFVLLHSKLNKQDAEVLSTPQILEAREQLLQSLGSEKKRGSKFPDESSAESSNASSAPAEEKVIQPPVIQDKADAWEKSSSEEPSETVSEKFPVSTTEVEMVDKSVVEEELTVANESKTSPVKSKLPYEADEEEEVDEWPDDDDDPTDEAGQAAGDRTLLGREEEDVSFSDLEDDEDDDRR

SEQ ID NO: 32818 - protein, 295 aa, Zea mays subsp. mays
  peptide (1)..(295): Ceres Seq. ID no. 12351692
  misc_feature (73)..(119): Pfam Name: Pfam Description:  BSD domain
  misc_feature (1)..(292): NCBI GI NO: 34909848 NR Description: OSJNBb0053G03.5
  misc_feature (1)..(293): NCBI GI NO: 18425006 NR Description: expressed protein; protein id: At5g65910
  misc_feature (64)..(293): NCBI GI NO: 7486518 NR Description: hypothetical protein F6H11
  misc_feature (1)..(64): NCBI GI NO: 7486518 NR Description: hypothetical protein F6H11
  misc_feature (1)..(292): NCBI GI NO: 15229611 NR Description: putative protein; protein id: At3g49800
  misc_feature (31)..(270): NCBI GI NO: 28273391 NR Description: putative BSD domain containing protein
  misc_feature (1)..(41): NCBI GI NO: 28273391 NR Description: putative BSD domain containing protein
  misc_feature (1)..(291): NCBI GI NO: 21555533 NR Description: unknown [Arabidopsis thaliana]
  misc_feature (1)..(291): NCBI GI NO: 18391195 NR Description: expressed protein; protein id: At1g10720
  misc_feature (57)..(291): NCBI GI NO: 6573740 NR Description: F20B24.15 [Arabidopsis thaliana]
MWSGFSMLQNNLAVAEISKIASSLLPFGQGEADEGESVPGITEEVVVFVRHISTRPETWLDFPLFISERYADDFELSDAQYVHALSVEHLVPGLSDLKAQICSTDMTEACFWKIYFVLLHSKLNKQDAEVLSTPQILEAREQLLQSLGSEKKRGSKFPDESSAESSNASSAPAEEKVIQPPVIQDKADAWEKSSSEEPSETVSEKFPVSTTEVEMVDKSVVEEELTVANESKTSPVKSKLPYEADEEEEVDEWPDDDDDPTDEAGQAAGDRTLLGREEEDVSFSDLEDDEDDDRR

SEQ ID NO: 32819 - protein, 289 aa, Zea mays subsp. mays
  peptide (1)..(289): Ceres Seq. ID no. 12351693
  misc_feature (67)..(113): Pfam Name: Pfam Description:  BSD domain
  misc_feature (1)..(286): NCBI GI NO: 34909848 NR Description: OSJNBb0053G03.5
  misc_feature (1)..(287): NCBI GI NO: 18425006 NR Description: expressed protein; protein id: At5g65910
  misc_feature (58)..(287): NCBI GI NO: 7486518 NR Description: hypothetical protein F6H11
  misc_feature (1)..(58): NCBI GI NO: 7486518 NR Description: hypothetical protein F6H11
  misc_feature (1)..(286): NCBI GI NO: 15229611 NR Description: putative protein; protein id: At3g49800
  misc_feature (25)..(264): NCBI GI NO: 28273391 NR Description: putative BSD domain containing protein
  misc_feature (1)..(35): NCBI GI NO: 28273391 NR Description: putative BSD domain containing protein
  misc_feature (1)..(285): NCBI GI NO: 21555533 NR Description: unknown [Arabidopsis thaliana]
  misc_feature (1)..(285): NCBI GI NO: 18391195 NR Description: expressed protein; protein id: At1g10720
  misc_feature (51)..(285): NCBI GI NO: 6573740 NR Description: F20B24.15 [Arabidopsis thaliana]
MLQNNLAVAEISKIASSLLPFGQGEADEGESVPGITEEVVVFVRHISTRPETWLDFPLFISERYADDFELSDAQYVHALSVEHLVPGLSDLKAQICSTDMTEACFWKIYFVLLHSKLNKQDAEVLSTPQILEAREQLLQSLGSEKKRGSKFPDESSAESSNASSAPAEEKVIQPPVIQDKADAWEKSSSEEPSETVSEKFPVSTTEVEMVDKSVVEEELTVANESKTSPVKSKLPYEADEEEEVDEWPDDDDDPTDEAGQAAGDRTLLGREEEDVSFSDLEDDEDDDRR

SEQ ID NO: 32820 - DNA, 1018 bp, Zea mays subsp. mays
  misc_feature (1)..(1018): Ceres Seq. ID no. 12342116
accagaacacttgagcagactagcaaggccttcagaccgggagggctccctgtcctgtcccccgcgccgccgcggatggccggagccaccacgccggcatcaggcgccctcgtcaggctctgcctgccttcgctcctcctctttctgtaccggtgctgcagatgtgaggctgttgagatggagagaacccttgcgatgatcaagcccgatggtttgtcaggtaagtacacagaagcaatcaaggaggtcatcttggattctggatttcatatcgtcaaagaaaccgaggtccagcttgatgctgagagggcatctgtcttctatgcggagcattcccagagaagcttctttgacagcctagtcaagtacataacaagtggtccagttcttgctatggttctggaaagacctgacgccgttgcgcaatggcgcactttgattggaccaactgatgcaaaaaaggccaaaacctctcatccaaacagcattagagcaatgtgtgggctggactctgagaaaaattgcgtgcatggttcggattcaccagaatctgcagacagagagatctcatttttcttcggagaagctgaatccgtaactgtggaacatgatgagctatagacgccacactggtatcagtggcaatattggccggctcattggacaacgtgggagagtatcgactctgctgcttctagtgttcgtcatgcttcttttatgaactaaacccgaagacgctgcaatttgaggaggggatgtcagttgtcacagaggagagagtcatttttagggctagtttggaaatctcatttttttcaagagatttttattttcctaaaggaaattagtttatttttctttgagaaaatagaattcccttgggaaattagagtttctaaacgagcccttaatttcgtaaaattatgtccggagtccatatttcctatcggagcaccatggtccttgaacttgcaaaactatatggtgcaaaccaaatattgttttttcatccgtgttg

SEQ ID NO: 32821 - protein, 206 aa, Zea mays subsp. mays
  peptide (1)..(206): Ceres Seq. ID no. 12342117
  misc_feature (61)..(134): Pfam Name: Pfam Description:  Nucleoside diphosphate kinase
  misc_feature (39)..(134): NCBI GI NO: 8778480 NR Description: F1L3.7 [Arabidopsis thaliana]
  misc_feature (162)..(199): NCBI GI NO: 8778480 NR Description: F1L3.7 [Arabidopsis thaliana]
  misc_feature (125)..(161): NCBI GI NO: 8778480 NR Description: F1L3.7 [Arabidopsis thaliana]
  misc_feature (66)..(198): NCBI GI NO: 15220107 NR Description: unknown protein; protein id: At1g17410.1
  misc_feature (66)..(161): NCBI GI NO: 9665132 NR Description: Unknown protein [Arabidopsis thaliana]
  misc_feature (61)..(193): NCBI GI NO: 38181932 NR Description: Unknown (protein for MGC:75677)
  misc_feature (60)..(206): NCBI GI NO: 9055290 NR Description: expressed in non-metastatic cells 6, protein
  misc_feature (60)..(206): NCBI GI NO: 12805101 NR Description: expressed in non-metastatic cells 6, protein
  misc_feature (60)..(199): NCBI GI NO: 15606713 NR Description: nucleoside diphosphate kinase [Aquifex aeolicus]
  misc_feature (58)..(195): NCBI GI NO: 4505413 NR Description: non-metastatic cells 5, protein expressed in
TRTLEQTSKAFRPGGLPVLSPAPPRMAGATTPASGALVRLCLPSLLLFLYRCCRCEAVEMERTLAMIKPDGLSGKYTEAIKEVILDSGFHIVKETEVQLDAERASVFYAEHSQRSFFDSLVKYITSGPVLAMVLERPDAVAQWRTLIGPTDAKKAKTSHPNSIRAMCGLDSEKNCVHGSDSPESADREISFFFGEAESVTVEHDEL

SEQ ID NO: 32822 - protein, 181 aa, Zea mays subsp. mays
  peptide (1)..(181): Ceres Seq. ID no. 12342118
  misc_feature (36)..(109): Pfam Name: Pfam Description:  Nucleoside diphosphate kinase
  misc_feature (14)..(109): NCBI GI NO: 8778480 NR Description: F1L3.7 [Arabidopsis thaliana]
  misc_feature (137)..(174): NCBI GI NO: 8778480 NR Description: F1L3.7 [Arabidopsis thaliana]
  misc_feature (100)..(136): NCBI GI NO: 8778480 NR Description: F1L3.7 [Arabidopsis thaliana]
  misc_feature (41)..(173): NCBI GI NO: 15220107 NR Description: unknown protein; protein id: At1g17410.1
  misc_feature (41)..(136): NCBI GI NO: 9665132 NR Description: Unknown protein [Arabidopsis thaliana]
  misc_feature (36)..(168): NCBI GI NO: 38181932 NR Description: Unknown (protein for MGC:75677)
  misc_feature (35)..(181): NCBI GI NO: 9055290 NR Description: expressed in non-metastatic cells 6, protein
  misc_feature (35)..(181): NCBI GI NO: 12805101 NR Description: expressed in non-metastatic cells 6, protein
  misc_feature (35)..(174): NCBI GI NO: 15606713 NR Description: nucleoside diphosphate kinase [Aquifex aeolicus]
  misc_feature (33)..(170): NCBI GI NO: 4505413 NR Description: non-metastatic cells 5, protein expressed in
MAGATTPASGALVRLCLPSLLLFLYRCCRCEAVEMERTLAMIKPDGLSGKYTEAIKEVILDSGFHIVKETEVQLDAERASVFYAEHSQRSFFDSLVKYITSGPVLAMVLERPDAVAQWRTLIGPTDAKKAKTSHPNSIRAMCGLDSEKNCVHGSDSPESADREISFFFGEAESVTVEHDEL

SEQ ID NO: 32823 - protein, 147 aa, Zea mays subsp. mays
  peptide (1)..(147): Ceres Seq. ID no. 12342119
  misc_feature (2)..(75): Pfam Name: Pfam Description:  Nucleoside diphosphate kinase
  misc_feature (1)..(75): NCBI GI NO: 8778480 NR Description: F1L3.7 [Arabidopsis thaliana]
  misc_feature (103)..(140): NCBI GI NO: 8778480 NR Description: F1L3.7 [Arabidopsis thaliana]
  misc_feature (66)..(102): NCBI GI NO: 8778480 NR Description: F1L3.7 [Arabidopsis thaliana]
  misc_feature (7)..(139): NCBI GI NO: 15220107 NR Description: unknown protein; protein id: At1g17410.1
  misc_feature (7)..(102): NCBI GI NO: 9665132 NR Description: Unknown protein [Arabidopsis thaliana]
  misc_feature (2)..(134): NCBI GI NO: 38181932 NR Description: Unknown (protein for MGC:75677)
  misc_feature (1)..(147): NCBI GI NO: 9055290 NR Description: expressed in non-metastatic cells 6, protein
  misc_feature (1)..(147): NCBI GI NO: 12805101 NR Description: expressed in non-metastatic cells 6, protein
  misc_feature (1)..(140): NCBI GI NO: 15606713 NR Description: nucleoside diphosphate kinase [Aquifex aeolicus]
  misc_feature (1)..(136): NCBI GI NO: 4505413 NR Description: non-metastatic cells 5, protein expressed in
MERTLAMIKPDGLSGKYTEAIKEVILDSGFHIVKETEVQLDAERASVFYAEHSQRSFFDSLVKYITSGPVLAMVLERPDAVAQWRTLIGPTDAKKAKTSHPNSIRAMCGLDSEKNCVHGSDSPESADREISFFFGEAESVTVEHDEL

SEQ ID NO: 32824 - DNA, 1584 bp, Zea mays subsp. mays
  misc_feature (1)..(1584): Ceres Seq. ID no. 13494719
  misc_feature (1308)..(1308): n is a, c, t, g, unknown, or other
  misc_feature (1239)..(1239): n is a, c, t, g, unknown, or other
  misc_feature (1452)..(1452): n is a, c, t, g, unknown, or other
  misc_feature (1228)..(1228): n is a, c, t, g, unknown, or other
gaaaccccagagctttaaagcttttccgattccgcaatgctcaccgttcggttccttctcgtaccgagccgcgggtagccagccaaccgccgacgcagtccacaagcgatgaagcgcttcttccagccagtgcccaaggacggctccccgtccaagaagcggctagcgggtgctgctgaaccgggcgacggccccacatcagccggtgccgccaccggcgctggcggggatgtagaggggaggcccaccgaggagccgttcaagttcctgacgtggaacgccaacagcctgctcctccggatgaagagcgactggcctgctttctcgcagctcgtcgcccgccttgaccccgacgtcatttgtgtccaggaagtgcggatgccggcagctggttccaaaggggcacctaaaaaccccagtgaactaaaagatgacacaagcttgtcacgggatgaaaagcaggtagttctacgtgctttgtcagcttcacctttcaaagactaccgtgtctggtggtctctttcagattcaaaatatgctgggacagctatgtttataaagaaaaagtttgagcctaagaaggtgtctttcaacttggatagaacatcttctaagcatgaagccgatgggcgtgttataattgcggaatttgaatcattcctttttactgaacacttattctccaaacaatggatggaaggaggaggaaaatgcatttcaaagaagacgtaagtgggacaagaggatgctagaatttgttcaacacgtggataaacccttaatctggtgtggggacttgaatgtcagtcatgaagaaatcgacgtcagccatcctgatttctttagcagcgctaagctgaatggatacaccccacccaataaagaggactgtggacagccaggattcaccccagcagagagacggcgttttggcaacatattattccaaggaaagctggtagatgcttacaggcacctgcacaaagaaaaggacatagacggtggcttctcttggtccggtcatccaattggcaagtaccgaggaaagagaatgaggatcgactacttccttgtttcggaacagttaaaggacagaatagtttcatgtgaaatgcatggccgtggcattgaattggatggattttatggaagtgaccactgccctgtttcgcttgagctttccgaagctgtagcagaagaagcaccaggacagcccaagccatccatntaaatataccnccatggtggtcattgttgagacatttccggtccttcattaaacctgactgttccatgcattgcctactntaggtagctgaggtttgattgtaggtattattatgatcccagtaggttaccagttcctgtggtcagggctggtatagtttagggatcattgccatttaagcagtgcaatttggacatctcattctgcttgaaatgttgtttgtntaagagcagccatggactacctaatacctcatggggatcgaagagattaatcccttcgtatccaattttaactagcaagggatttaatccacccctaacaagcacaataaaatcttgttcgttttttctacc

SEQ ID NO: 32825 - protein, 207 aa, Zea mays subsp. mays
  peptide (1)..(207): Ceres Seq. ID no. 13494720
  misc_feature (118)..(197): Pfam Name: Pfam Description:  Endonuclease/Exonuclease/phosphatase family
  misc_feature (1)..(89): NCBI GI NO: 18481705 NR Description: putative T29H11.60 protein [Sorghum bicolor]
  misc_feature (118)..(197): NCBI GI NO: 18481705 NR Description: putative T29H11.60 protein [Sorghum bicolor]
  misc_feature (1)..(197): NCBI GI NO: 7487536 NR Description: hypothetical protein T29H11
  misc_feature (1)..(118): NCBI GI NO: 18408629 NR Description: endonuclease/exonuclease/phosphatase family
  misc_feature (107)..(197): NCBI GI NO: 18408629 NR Description: endonuclease/exonuclease/phosphatase family
  misc_feature (1)..(184): NCBI GI NO: 14578320 NR Description: PV1H14200_P [Plasmodium vivax]
  misc_feature (54)..(102): NCBI GI NO: 23490314 NR Description: putative AP endonuclease-related
  misc_feature (54)..(184): NCBI GI NO: 23957727 NR Description: AP endonuclease
  misc_feature (95)..(184): NCBI GI NO: 23490314 NR Description: putative AP endonuclease-related
MKRFFQPVPKDGSPSKKRLAGAAEPGDGPTSAGAATGAGGDVEGRPTEEPFKFLTWNANSLLLRMKSDWPAFSQLVARLDPDVICVQEVRMPAAGSKGAPKNPSELKDDTSLSRDEKQVVLRALSASPFKDYRVWWSLSDSKYAGTAMFIKKKFEPKKVSFNLDRTSSKHEADGRVIIAEFESFLFTEHLFSKQWMEGGGKCISKKT

SEQ ID NO: 32826 - protein, 161 aa, Zea mays subsp. mays
  peptide (1)..(161): Ceres Seq. ID no. 13494721
  misc_feature (1)..(145): Pfam Name: Pfam Description:  Endonuclease/Exonuclease/phosphatase family
  misc_feature (1)..(159): NCBI GI NO: 18481705 NR Description: putative T29H11.60 protein [Sorghum bicolor]
  misc_feature (1)..(156): NCBI GI NO: 7487536 NR Description: hypothetical protein T29H11
  misc_feature (1)..(156): NCBI GI NO: 18408629 NR Description: endonuclease/exonuclease/phosphatase family
  misc_feature (1)..(78): NCBI GI NO: 14578320 NR Description: PV1H14200_P [Plasmodium vivax]
  misc_feature (83)..(156): NCBI GI NO: 14578320 NR Description: PV1H14200_P [Plasmodium vivax]
  misc_feature (1)..(147): NCBI GI NO: 23490314 NR Description: putative AP endonuclease-related
  misc_feature (1)..(145): NCBI GI NO: 23957727 NR Description: AP endonuclease
  misc_feature (1)..(131): NCBI GI NO: 4106095 NR Description: apurinic/apyrimidinic endonuclease
  misc_feature (1)..(131): NCBI GI NO: 6980804 NR Description: Chain B, Human ApurinicAPYRIMIDINIC ENDONUCLEASE-1
  misc_feature (1)..(131): NCBI GI NO: 6980832 NR Description: Chain A
  misc_feature (161)..(161): Xaa is any aa, unknown or other
MLEFVQHVDKPLIWCGDLNVSHEEIDVSHPDFFSSAKLNGYTPPNKEDCGQPGFTPAERRRFGNILFQGKLVDAYRHLHKEKDIDGGFSWSGHPIGKYRGKRMRIDYFLVSEQLKDRIVSCEMHGRGIELDGFYGSDHCPVSLELSEAVAEEAPGQPKPSX

SEQ ID NO: 32827 - protein, 143 aa, Zea mays subsp. mays
  peptide (1)..(143): Ceres Seq. ID no. 13494722
  misc_feature (54)..(133): Pfam Name: Pfam Description:  Endonuclease/Exonuclease/phosphatase family
  misc_feature (1)..(25): NCBI GI NO: 18481705 NR Description: putative T29H11.60 protein [Sorghum bicolor]
  misc_feature (54)..(133): NCBI GI NO: 18481705 NR Description: putative T29H11.60 protein [Sorghum bicolor]
  misc_feature (1)..(133): NCBI GI NO: 7487536 NR Description: hypothetical protein T29H11
  misc_feature (1)..(54): NCBI GI NO: 18408629 NR Description: endonuclease/exonuclease/phosphatase family
  misc_feature (43)..(133): NCBI GI NO: 18408629 NR Description: endonuclease/exonuclease/phosphatase family
  misc_feature (1)..(120): NCBI GI NO: 14578320 NR Description: PV1H14200_P [Plasmodium vivax]
  misc_feature (1)..(38): NCBI GI NO: 23490314 NR Description: putative AP endonuclease-related
  misc_feature (1)..(120): NCBI GI NO: 23957727 NR Description: AP endonuclease
  misc_feature (31)..(120): NCBI GI NO: 23490314 NR Description: putative AP endonuclease-related
MKSDWPAFSQLVARLDPDVICVQEVRMPAAGSKGAPKNPSELKDDTSLSRDEKQVVLRALSASPFKDYRVWWSLSDSKYAGTAMFIKKKFEPKKVSFNLDRTSSKHEADGRVIIAEFESFLFTEHLFSKQWMEGGGKCISKKT

SEQ ID NO: 32828 - DNA, 1090 bp, Zea mays subsp. mays
  misc_feature (1)..(1090): Ceres Seq. ID no. 12413685
aattttacctccaaggtttgggtcttcttcctcccgcattagccgcaggtttggttgcttagcatcagggggaaacatcgcaggttgttgttttgtttgaacactatcgagaggaagaggaagaagaggaggaggcggagttttgggttgagagcggcagaatagataatcggacttccggctggataagtgatccttttttttgaatcgccagacgcggagagcaggagggattatagctagcaacaggtgaaatggcaattggacagggcgacgagaagaagggctcccttgccaggagcttgagctgctcaaactgcgggagcggcgcaataatttttgggcggaagagagtcgccgtctcgccgactccgggctcccggagcccgcactcgccgacgcgcaccctgcgcaagcagcgcagcgtccggttccacatggaggacgacggcgtcaacctcttcaaccagctgtcgctagatgtactggttatgatcttttacaaggtgaaccacagtgatctgaggaacctcctcctgatatcgaaatcggtcaaagatgcgaccatccttgctagggagcagcatttcaagttctcgacgccgccggcgaagtccggttttagagacgaggaaaccgccggcggcgacgacgacgacgagggccccggcgcgcccaagcaacacagggttgcgaggtcgcacctgggggacacgaacctgtcgagcatcgccgtcaacctgtcggcgtcgttcgatcagatgtaaagtatatatatatatggcgccacaggttttcagttcgcgcttctgttggcgcgcgtgtatctagtagcttcaggttagaaggttttaagtgcctctcgtagcgcacgccatagagattaggtagtgagaaacagtatactcgtatgcgtcattactagtcctaagttaagtataatgtataaagtttttcaatgctgtggttgaagaacacacgccatgtcgtcttctccgatctgtaagttatttggcatagaagagatgtcttctctcttatgtgtatgctctaagtctatgatgctggatgcttcttctgttttgaagtc

SEQ ID NO: 32829 - protein, 170 aa, Zea mays subsp. mays
  peptide (1)..(170): Ceres Seq. ID no. 12413686
  misc_feature (1)..(168): NCBI GI NO: 34393368 NR Description: unknown protein
  misc_feature (1)..(163): NCBI GI NO: 7485710 NR Description: hypothetical protein F18E5
  misc_feature (29)..(163): NCBI GI NO: 15219910 NR Description: late embryogenesis abundant protein, putative
  misc_feature (29)..(163): NCBI GI NO: 28372904 NR Description: At1g61340 [Arabidopsis thaliana]
  misc_feature (1)..(163): NCBI GI NO: 18415709 NR Description: expressed protein; protein id: At4g21510
  misc_feature (30)..(163): NCBI GI NO: 18412772 NR Description: hypothetical protein; protein id: At4g05010.1
MAIGQGDEKKGSLARSLSCSNCGSGAIIFGRKRVAVSPTPGSRSPHSPTRTLRKQRSVRFHMEDDGVNLFNQLSLDVLVMIFYKVNHSDLRNLLLISKSVKDATILAREQHFKFSTPPAKSGFRDEETAGGDDDDEGPGAPKQHRVARSHLGDTNLSSIAVNLSASFDQM

SEQ ID NO: 32830 - protein, 109 aa, Zea mays subsp. mays
  peptide (1)..(109): Ceres Seq. ID no. 12413687
  misc_feature (1)..(107): NCBI GI NO: 34393368 NR Description: unknown protein
  misc_feature (1)..(102): NCBI GI NO: 7485710 NR Description: hypothetical protein F18E5
  misc_feature (1)..(102): NCBI GI NO: 15219910 NR Description: late embryogenesis abundant protein, putative
  misc_feature (1)..(102): NCBI GI NO: 28372904 NR Description: At1g61340 [Arabidopsis thaliana]
  misc_feature (1)..(102): NCBI GI NO: 18415709 NR Description: expressed protein; protein id: At4g21510
  misc_feature (1)..(102): NCBI GI NO: 18412772 NR Description: hypothetical protein; protein id: At4g05010.1
MEDDGVNLFNQLSLDVLVMIFYKVNHSDLRNLLLISKSVKDATILAREQHFKFSTPPAKSGFRDEETAGGDDDDEGPGAPKQHRVARSHLGDTNLSSIAVNLSASFDQM

SEQ ID NO: 32831 - protein, 91 aa, Zea mays subsp. mays
  peptide (1)..(91): Ceres Seq. ID no. 12413688
  misc_feature (1)..(89): NCBI GI NO: 34393368 NR Description: unknown protein
  misc_feature (1)..(84): NCBI GI NO: 7485710 NR Description: hypothetical protein F18E5
  misc_feature (1)..(84): NCBI GI NO: 15219910 NR Description: late embryogenesis abundant protein, putative
  misc_feature (1)..(84): NCBI GI NO: 28372904 NR Description: At1g61340 [Arabidopsis thaliana]
  misc_feature (1)..(84): NCBI GI NO: 18415709 NR Description: expressed protein; protein id: At4g21510
  misc_feature (1)..(84): NCBI GI NO: 18412772 NR Description: hypothetical protein; protein id: At4g05010.1
MIFYKVNHSDLRNLLLISKSVKDATILAREQHFKFSTPPAKSGFRDEETAGGDDDDEGPGAPKQHRVARSHLGDTNLSSIAVNLSASFDQM

SEQ ID NO: 32832 - DNA, 1674 bp, Zea mays subsp. mays
  misc_feature (1)..(1674): Ceres Seq. ID no. 13573191
aaatcgcggtcactgctccgaagtccgaaccttcatacacatcgtctcgtttccgatttccccaaattcaggccacaggcgctacaggacccaggcaccactcggtcggcggccaccgcgtcgccccgcctgctcgattggggtcgcgtgtgcgataggaagtattgtgttgtgtttgcaacgtgatagcttgtactgggaacaaaggtcaagatgggcgccttggacctacaccttgactttgcttctgctcaacatggacaagccaagttaaaggaatatgccaagagctctctgttgtctgatggaaactacaatacagacaagatcaatggttcaaaccctgatgactatgagaaatttgagaaagggataatgcactatgggtgtccacattatagaaggagatgccgcataagagctccttgctgcaatgaaatttttgattgccgacactgccacaatgaaactaagaattccattaaaattgataaaatgaagaggcatgaacttccacgccatgaagtgcagcaggttgtatgctcattgtgtggcactgaacaggaggtgcgacaagtatgtatcaattgcggtgtttgcatggggaagtacttctgtggtttgtgcaaactcttcgacgatgatgtctctaaacagcagtatcactgcaacggatgtggaatatgtagaatcggagggagggagaatttcttccactgttcaaaatgtggatgttgctattcaattgcgctgaagaatagtcatgcatgtgttgaaggggcgatgcatcatgactgtccaatctgcttcgagtacttgttcgattcgacaaatgatgtttccgtcctgccttgtggtcataccattcatgtaaagtgcctgaaagaaatggaagagcactgccagtttgcatgccccctttgctccaagtcggtttgtgacatgtcgaaggcatgggaaaggctcgacatggagctggcaactctgtctgactcctgtgatcacaaaatggtccgcatattatgcaacgactgcggggcaatatcagatgtgcagttccatttgattgcgcacaagtgccagaattgcaagtcatacaacacccgccagatttgaagtaagaatcgcaagtcacacaacaccgtcagatctgaaatagcaaatcctgtgggggtttctgcatttcttcaagaagcgtgatggactgatggccccttcccgtgagctgctgagcaccgggatgtctggcaagacactcatcactgtatccactccactgggtcctgcggaggcaaacagctcgagattgtatatctgctgctagctgccgcccttcgttatgcataagcctactcttgccgttttactcctgtcgctccgtgattctagtgtaataatgttatatttagtgctgcttcaagcgtacggctgcggttgaacggcggcggcggctgctgagccacagtaccttgctgttgctgagactgcacccagccacagtgcgccgccgccgcagcagcttgtagctggactttatgaaggtgcctttgttccgcaaggaagagttcttggttgcgggtagctattaaggccatctccaatagatgtcctattatatcccttatttcatcctctatttcaaactttatataaatagtattaaatatctcatct

SEQ ID NO: 32833 - protein, 300 aa, Zea mays subsp. mays
  peptide (1)..(300): Ceres Seq. ID no. 13573192
  misc_feature (59)..(142): Pfam Name: Pfam Description:  CHY zinc finger
  misc_feature (4)..(300): NCBI GI NO: 34910658 NR Description: putative PGPD14 protein
  misc_feature (37)..(299): NCBI GI NO: 4105798 NR Description: PGPD14 [Petunia x hybrida]
  misc_feature (40)..(300): NCBI GI NO: 15237169 NR Description: PGPD14 protein [Arabidopsis thaliana]
  misc_feature (51)..(300): NCBI GI NO: 21593716 NR Description: PGPD14 protein [Arabidopsis thaliana]
  misc_feature (57)..(299): NCBI GI NO: 37535002 NR Description: putative PGPD14 protein
  misc_feature (42)..(300): NCBI GI NO: 15238890 NR Description: expressed protein [Arabidopsis thaliana]
  misc_feature (26)..(300): NCBI GI NO: 30695702 NR Description: expressed protein [Arabidopsis thaliana]
  misc_feature (53)..(300): NCBI GI NO: 30102616 NR Description: At3g62970 [Arabidopsis thaliana]
  misc_feature (26)..(300): NCBI GI NO: 11358168 NR Description: hypothetical protein T20O10
  misc_feature (6)..(299): NCBI GI NO: 24582224 NR Description: CG16947-PA [Drosophila melanogaster]
MGALDLHLDFASAQHGQAKLKEYAKSSLLSDGNYNTDKINGSNPDDYEKFEKGIMHYGCPHYRRRCRIRAPCCNEIFDCRHCHNETKNSIKIDKMKRHELPRHEVQQVVCSLCGTEQEVRQVCINCGVCMGKYFCGLCKLFDDDVSKQQYHCNGCGICRIGGRENFFHCSKCGCCYSIALKNSHACVEGAMHHDCPICFEYLFDSTNDVSVLPCGHTIHVKCLKEMEEHCQFACPLCSKSVCDMSKAWERLDMELATLSDSCDHKMVRILCNDCGAISDVQFHLIAHKCQNCKSYNTRQI

SEQ ID NO: 32834 - protein, 246 aa, Zea mays subsp. mays
  peptide (1)..(246): Ceres Seq. ID no. 13573193
  misc_feature (5)..(88): Pfam Name: Pfam Description:  CHY zinc finger
  misc_feature (1)..(246): NCBI GI NO: 34910658 NR Description: putative PGPD14 protein
  misc_feature (1)..(245): NCBI GI NO: 4105798 NR Description: PGPD14 [Petunia x hybrida]
  misc_feature (1)..(246): NCBI GI NO: 15237169 NR Description: PGPD14 protein [Arabidopsis thaliana]
  misc_feature (1)..(246): NCBI GI NO: 21593716 NR Description: PGPD14 protein [Arabidopsis thaliana]
  misc_feature (3)..(245): NCBI GI NO: 37535002 NR Description: putative PGPD14 protein
  misc_feature (1)..(246): NCBI GI NO: 15238890 NR Description: expressed protein [Arabidopsis thaliana]
  misc_feature (1)..(246): NCBI GI NO: 30695702 NR Description: expressed protein [Arabidopsis thaliana]
  misc_feature (1)..(246): NCBI GI NO: 30102616 NR Description: At3g62970 [Arabidopsis thaliana]
  misc_feature (1)..(246): NCBI GI NO: 11358168 NR Description: hypothetical protein T20O10
  misc_feature (1)..(245): NCBI GI NO: 24582224 NR Description: CG16947-PA [Drosophila melanogaster]
MHYGCPHYRRRCRIRAPCCNEIFDCRHCHNETKNSIKIDKMKRHELPRHEVQQVVCSLCGTEQEVRQVCINCGVCMGKYFCGLCKLFDDDVSKQQYHCNGCGICRIGGRENFFHCSKCGCCYSIALKNSHACVEGAMHHDCPICFEYLFDSTNDVSVLPCGHTIHVKCLKEMEEHCQFACPLCSKSVCDMSKAWERLDMELATLSDSCDHKMVRILCNDCGAISDVQFHLIAHKCQNCKSYNTRQI

SEQ ID NO: 32835 - protein, 206 aa, Zea mays subsp. mays
  peptide (1)..(206): Ceres Seq. ID no. 13573194
  misc_feature (101)..(143): Pfam Name: RING finger Pfam Description: Zinc finger, C3HC4 type
  misc_feature (1)..(206): NCBI GI NO: 34910658 NR Description: putative PGPD14 protein
  misc_feature (1)..(205): NCBI GI NO: 4105798 NR Description: PGPD14 [Petunia x hybrida]
  misc_feature (1)..(206): NCBI GI NO: 15237169 NR Description: PGPD14 protein [Arabidopsis thaliana]
  misc_feature (1)..(206): NCBI GI NO: 21593716 NR Description: PGPD14 protein [Arabidopsis thaliana]
  misc_feature (1)..(205): NCBI GI NO: 37535002 NR Description: putative PGPD14 protein
  misc_feature (1)..(206): NCBI GI NO: 15238890 NR Description: expressed protein [Arabidopsis thaliana]
  misc_feature (1)..(206): NCBI GI NO: 30695702 NR Description: expressed protein [Arabidopsis thaliana]
  misc_feature (1)..(206): NCBI GI NO: 30102616 NR Description: At3g62970 [Arabidopsis thaliana]
  misc_feature (1)..(206): NCBI GI NO: 11358168 NR Description: hypothetical protein T20O10
  misc_feature (1)..(205): NCBI GI NO: 24582224 NR Description: CG16947-PA [Drosophila melanogaster]
MKRHELPRHEVQQVVCSLCGTEQEVRQVCINCGVCMGKYFCGLCKLFDDDVSKQQYHCNGCGICRIGGRENFFHCSKCGCCYSIALKNSHACVEGAMHHDCPICFEYLFDSTNDVSVLPCGHTIHVKCLKEMEEHCQFACPLCSKSVCDMSKAWERLDMELATLSDSCDHKMVRILCNDCGAISDVQFHLIAHKCQNCKSYNTRQI

SEQ ID NO: 32836 - DNA, 691 bp, Zea mays subsp. mays
  misc_feature (1)..(691): Ceres Seq. ID no. 12358105
gtttgctccccctccctcacccgcctccactcccccctcccaggcgctgcccaggtaagtcggcggcggcgatgacaacgcgcttcaagaagaaccgcaagaagcgcggccacgtgtccgccgggcacggccgcatcggcaagcacaggaagcacccgggaggtcgcggtaacgccggtggcatgcaccaccaccgtatcctcttcgacaagtaccatccgggctacttcggcaaggttggcatgcgttacttccataagctccgcaacaagttctactgccccgcggtcaacatcgagcgcctctggtcgatggtgcccgccgacaaggcggcggaggccggcctcgacaaggccccgcagatcgacgtcacgcagttcggctacttcaaggtgctcgggaagggggtgctgccgcccaagcccattgtcgtcaaggccaagctcatctccaaggtcgccgagaagaagatcaaggcagcaggcggggccgtcgtgctcaccgcctaggtttcagtccttgttcgcctcctggttttgaaatctatatctgaactgatagtgctttcctgtctcagcaatttgtgttaagaaaacctgtagttttaaaatatgtggttcctgcctgttgggcagtgcttatgcggtttttgatgccagttcatatcaaatatttcacatcaattaaatcc

SEQ ID NO: 32837 - protein, 168 aa, Zea mays subsp. mays
  peptide (1)..(168): Ceres Seq. ID no. 12358106
  misc_feature (130)..(162): Pfam Name: Pfam Description:  Ribosomal protein L15
  misc_feature (24)..(168): NCBI GI NO: 30017566 NR Description: putative ribosomal protein L27a
  misc_feature (24)..(168): NCBI GI NO: 23237917 NR Description: putative 60S ribosomal protein L27a
  misc_feature (24)..(168): NCBI GI NO: 15223190 NR Description: 60S ribosomal protein L27A; protein id:At1g70600
  misc_feature (24)..(168): NCBI GI NO: 3608481 NR Description: ribosomal protein L27a [Petunia x hybrida]
  misc_feature (24)..(168): NCBI GI NO: 21553702 NR Description: 60S ribosomal protein L27A [Arabidopsis thaliana]
  misc_feature (24)..(168): NCBI GI NO: 7959355 NR Description: 60S ribosomal protein L27a [Panax ginseng]
  misc_feature (24)..(168): NCBI GI NO: 15220698 NR Description: 60s ribosomal protein l27a
  misc_feature (26)..(168): NCBI GI NO: 22758850 NR Description: ribosomal protein L22 [Argopecten irradians]
  misc_feature (24)..(168): NCBI GI NO: 1350711 NR Description: 60S RIBOSOMAL PROTEIN L27A
  misc_feature (24)..(168): NCBI GI NO: 23612262 NR Description: 60S ribosomal protein L27a, putative
LLPLPHPPPLPPPRRCPGKSAAAMTTRFKKNRKKRGHVSAGHGRIGKHRKHPGGRGNAGGMHHHRILFDKYHPGYFGKVGMRYFHKLRNKFYCPAVNIERLWSMVPADKAAEAGLDKAPQIDVTQFGYFKVLGKGVLPPKPIVVKAKLISKVAEKKIKAAGGAVVLTA

SEQ ID NO: 32838 - protein, 145 aa, Zea mays subsp. mays
  peptide (1)..(145): Ceres Seq. ID no. 12358107
  misc_feature (107)..(139): Pfam Name: Pfam Description:  Ribosomal protein L15
  misc_feature (1)..(145): NCBI GI NO: 30017566 NR Description: putative ribosomal protein L27a
  misc_feature (1)..(145): NCBI GI NO: 23237917 NR Description: putative 60S ribosomal protein L27a
  misc_feature (1)..(145): NCBI GI NO: 15223190 NR Description: 60S ribosomal protein L27A; protein id:At1g70600
  misc_feature (1)..(145): NCBI GI NO: 3608481 NR Description: ribosomal protein L27a [Petunia x hybrida]
  misc_feature (1)..(145): NCBI GI NO: 21553702 NR Description: 60S ribosomal protein L27A [Arabidopsis thaliana]
  misc_feature (1)..(145): NCBI GI NO: 7959355 NR Description: 60S ribosomal protein L27a [Panax ginseng]
  misc_feature (1)..(145): NCBI GI NO: 15220698 NR Description: 60s ribosomal protein l27a
  misc_feature (3)..(145): NCBI GI NO: 22758850 NR Description: ribosomal protein L22 [Argopecten irradians]
  misc_feature (1)..(145): NCBI GI NO: 1350711 NR Description: 60S RIBOSOMAL PROTEIN L27A
  misc_feature (1)..(145): NCBI GI NO: 23612262 NR Description: 60S ribosomal protein L27a, putative
MTTRFKKNRKKRGHVSAGHGRIGKHRKHPGGRGNAGGMHHHRILFDKYHPGYFGKVGMRYFHKLRNKFYCPAVNIERLWSMVPADKAAEAGLDKAPQIDVTQFGYFKVLGKGVLPPKPIVVKAKLISKVAEKKIKAAGGAVVLTA

SEQ ID NO: 32839 - protein, 108 aa, Zea mays subsp. mays
  peptide (1)..(108): Ceres Seq. ID no. 12358108
  misc_feature (70)..(102): Pfam Name: Pfam Description:  Ribosomal protein L15
  misc_feature (1)..(108): NCBI GI NO: 30017566 NR Description: putative ribosomal protein L27a
  misc_feature (1)..(108): NCBI GI NO: 23237917 NR Description: putative 60S ribosomal protein L27a
  misc_feature (1)..(108): NCBI GI NO: 15223190 NR Description: 60S ribosomal protein L27A; protein id:At1g70600
  misc_feature (1)..(108): NCBI GI NO: 3608481 NR Description: ribosomal protein L27a [Petunia x hybrida]
  misc_feature (1)..(108): NCBI GI NO: 21553702 NR Description: 60S ribosomal protein L27A [Arabidopsis thaliana]
  misc_feature (1)..(108): NCBI GI NO: 7959355 NR Description: 60S ribosomal protein L27a [Panax ginseng]
  misc_feature (1)..(108): NCBI GI NO: 15220698 NR Description: 60s ribosomal protein l27a
  misc_feature (1)..(108): NCBI GI NO: 22758850 NR Description: ribosomal protein L22 [Argopecten irradians]
  misc_feature (1)..(108): NCBI GI NO: 1350711 NR Description: 60S RIBOSOMAL PROTEIN L27A
  misc_feature (1)..(108): NCBI GI NO: 23612262 NR Description: 60S ribosomal protein L27a, putative
MHHHRILFDKYHPGYFGKVGMRYFHKLRNKFYCPAVNIERLWSMVPADKAAEAGLDKAPQIDVTQFGYFKVLGKGVLPPKPIVVKAKLISKVAEKKIKAAGGAVVLTA

SEQ ID NO: 32840 - DNA, 683 bp, Zea mays subsp. mays
  misc_feature (1)..(683): Ceres Seq. ID no. 12403959
acctgagacctagaaccctcttccccctcgatggccgtagggagcggcggcggctcgcggcgcgcgcgtccgaacgtgctagtgacggggacgccggggacggggaagacgacaacgtgctcgctccttgccgacgccgcaggcctccgccacgtcaacatcggcgacctcgtccgcgagaagagcctccacgacggctgggacgccgacctcgagtgccatgtcatcaacgaggacctggtgtgcgacgagcttgaggacatgatggaagaaggtggcatactagtagattaccacggatgtgatttctttccagaacgttggtttgacctcgtagttgtgctccagactgacaactcaattctgcatgatcgcctgacggaggttacatgggttccaaactcgccaacaacatagagtgcgaaatcttccaagtgctcctcgaggaggcgagggagagctacagagaggacatcgtgatgccattgcgaagtgacaacgtggaggatattagtaggaacgtaggtgcactgacagactgggtaaacaattggagacctagttagacctgtcaaaagaaatgttgccttatgtgttgtatttggatatgtattgggtggaccagctgccatgtttgtaatgtacggggtgttttggttaaagaaacgaagtcgttcatcctt

SEQ ID NO: 32841 - protein, 128 aa, Zea mays subsp. mays
  peptide (1)..(128): Ceres Seq. ID no. 12403960
  misc_feature (6)..(117): NCBI GI NO: 34395293 NR Description: putative adrenal gland protein AD-004
  misc_feature (6)..(70): NCBI GI NO: 34902744 NR Description: hypothetical protein~similar to Arabidopsisthaliana chromosome 5
  misc_feature (71)..(117): NCBI GI NO: 34902744 NR Description: hypothetical protein~similar to Arabidopsisthaliana chromosome 5
  misc_feature (1)..(117): NCBI GI NO: 10177726 NR Description: gene_id:K9B18
  misc_feature (14)..(116): NCBI GI NO: 7706212 NR Description: adrenal gland protein AD-004
  misc_feature (14)..(116): NCBI GI NO: 33303797 NR Description: TAF9 RNA polymerase II, TATA box binding protein
  misc_feature (14)..(116): NCBI GI NO: 28076975 NR Description: RIKEN cDNA 4921516M08 [Mus musculus]
  misc_feature (14)..(116): NCBI GI NO: 34853506 NR Description: similar to RIKEN cDNA 4921516M08
  misc_feature (14)..(116): NCBI GI NO: 6457370 NR Description: unknown protein [Oryctolagus sp.]
  misc_feature (1)..(127): NCBI GI NO: 15239296 NR Description: putative protein; protein id: At5g60340.1
MAVGSGGGSRRARPNVLVTGTPGTGKTTTCSLLADAAGLRHVNIGDLVREKSLHDGWDADLECHVINEDLVCDELEDMMEEGGILVDYHGCDFFPERWFDLVVVLQTDNSILHDRLTEVTWVPNSPTT

SEQ ID NO: 32842 - protein, 84 aa, Zea mays subsp. mays
  peptide (1)..(84): Ceres Seq. ID no. 12403961
LRPRTLFPLDGRRERRRLAARASERASDGDAGDGEDDNVLAPCRRRRPPPRQHRRPRPREEPPRRLGRRPRVPCHQRGPGVRRA

SEQ ID NO: 32843 - DNA, 1055 bp, Zea mays subsp. mays
  misc_feature (1)..(1055): Ceres Seq. ID no. 12351694
attctccactgcctccagcaagtgttctaaaatctgaatggcatcttgctcctctgtccacgccgcaccatcgctcctcgtctcggcgccgcctagtaggcggcgcacaagtacggccgtatgtcttcagggtgttcgccgcggcagggtcgcgtcctgccgcgtgcggtgtagcgccggggccgggcagggcggggtcaaggtccctgcgaagctggcggagctgtggtcggcggcgaagagcgcgcctcccctggccgtgctcgcgggtgtggcggcggcggtggcgatatacaaggtcgggtccagtctccttgcgccgcgccatcccccgccccgtcggctggaggcccagacggccccgccgcctccagtcccggagccggtgcaggtgggcgagataacggaggaggaactacggcagtacgacggggtccgaccccgagaaaccgctgctgatggccatcaaggggcagatctatgacgtctcagagagcaggatgttctatggacctggcgcagcttatgctctgtttgctggtaaagatgccagtagggcattggctaagatgtcctttgaatcacaggatctgaatggtgatatatctggtctaacgccaatggagctcggcgccttgaatgactgggagtacaagttcgccaccaagtatgcgaaggtaggaaccataagaagagcagcgcccgtcgaagtggtttatggcaacatttcgcctgaaatgagggaagaagttagtgaacctgtggttgaacctgagcttgagcctgagcccgagcctgagccgcatgacgacgatgcaccatgaataggaaaaacacaaagacatcagttcgggtaggaagatgaaatggagggcggcacactgcttataatgttccagaggtagtcagaatttcgaaataatgaaaagcctcataggctcgtacttgttgcgtggatattcagaaagaatagtgtctaaatttaaaccaatagtagatgtgtactctgtagtaggattgaattgttggatatgtacatgtcattcttctatttt

SEQ ID NO: 32844 - protein, 148 aa, Zea mays subsp. mays
  peptide (1)..(148): Ceres Seq. ID no. 12351695
  misc_feature (1)..(137): NCBI GI NO: 37535794 NR Description: putative steroid membrane binding protein
  misc_feature (58)..(137): NCBI GI NO: 37535798 NR Description: putative steroid membrane binding protein
  misc_feature (62)..(137): NCBI GI NO: 4960156 NR Description: putative progesterone-binding protein homolog
  misc_feature (62)..(137): NCBI GI NO: 15242943 NR Description: progesterone-binding protein-like
  misc_feature (60)..(132): NCBI GI NO: 4960154 NR Description: putative progesterone-binding protein homolog
  misc_feature (60)..(132): NCBI GI NO: 15229044 NR Description: putative progesterone-binding protein homologAtmp2
  misc_feature (66)..(137): NCBI GI NO: 38637200 NR Description: steroid membrane binding protein-like
MASCSSVHAAPSLLVSAPPSRRRTSTAVCLQGVRRGRVASCRVRCSAGAGQGGVKVPAKLAELWSAAKSAPPLAVLAGVAAAVAIYKVGSSLLAPRHPPPRRLEAQTAPPPPVPEPVQVGEITEEELRQYDGVRPRETAADGHQGADL

SEQ ID NO: 32845 - protein, 133 aa, Zea mays subsp. mays
  peptide (1)..(133): Ceres Seq. ID no. 12351696
  misc_feature (95)..(133): NCBI GI NO: 13384818 NR Description: RIKEN cDNA 1110060M21 [Mus musculus]
SPLPPASVLKSEWHLAPLSTPHHRSSSRRRLVGGAQVRPYVFRVFAAAGSRPAACGVAPGPGRAGSRSLRSWRSCGRRRRARLPWPCSRVWRRRWRYTRSGPVSLRRAIPRPVGWRPRRPRRLQSRSRCRWAR

SEQ ID NO: 32846 - protein, 121 aa, Zea mays subsp. mays
  peptide (1)..(121): Ceres Seq. ID no. 12351697
  misc_feature (1)..(78): Pfam Name: Pfam Description:  Cytochrome b5-like Heme/Steroid binding domain
  misc_feature (1)..(79): NCBI GI NO: 37535794 NR Description: putative steroid membrane binding protein
  misc_feature (1)..(117): NCBI GI NO: 37535798 NR Description: putative steroid membrane binding protein
  misc_feature (1)..(121): NCBI GI NO: 4960156 NR Description: putative progesterone-binding protein homolog
  misc_feature (1)..(121): NCBI GI NO: 15242943 NR Description: progesterone-binding protein-like
  misc_feature (1)..(79): NCBI GI NO: 4960154 NR Description: putative progesterone-binding protein homolog
  misc_feature (1)..(79): NCBI GI NO: 15229044 NR Description: putative progesterone-binding protein homologAtmp2
  misc_feature (1)..(77): NCBI GI NO: 15224648 NR Description: putative steroid binding protein
  misc_feature (1)..(77): NCBI GI NO: 40889041 NR Description: Chain A
  misc_feature (1)..(117): NCBI GI NO: 18859969 NR Description: CG9066-PA [Drosophila melanogaster]
  misc_feature (1)..(79): NCBI GI NO: 13384818 NR Description: RIKEN cDNA 1110060M21 [Mus musculus]
MAIKGQIYDVSESRMFYGPGAAYALFAGKDASRALAKMSFESQDLNGDISGLTPMELGALNDWEYKFATKYAKVGTIRRAAPVEVVYGNISPEMREEVSEPVVEPELEPEPEPEPHDDDAP

SEQ ID NO: 32847 - DNA, 648 bp, Zea mays subsp. mays
  misc_feature (1)..(648): Ceres Seq. ID no. 12340573
cttcttcgcattgcctttcccttcagttgcaccgacctccagacgaaaccacccaagacgcgtgcttccattcctagcccaacagaagcgaagcacgccaccgaccaccggcctcgaagggatcatcttctctacaactcgtcctcgtggccttgttcctcctcttgtataggggactgcggcggagtggagatccgtgccgacatagtccgacttcttcgctcgctgcctacgattgatggcctcaccttcaccaaccgaagagttcagcagggaagcagctcgtcagtctctgatcgcgatctccgagtccactccggagacaccttcaccgcagacggtgaggacaccgccgatctccagcgcagagaacgggaagccgggcgatggggcggacaagttcagatcgaagctgatgtccatcacagacctgtcttctgatgcccaacctgcgcagtgccctcccgaggatgtcgctgcttaatcaatcgtgtgattctctgctcgacttgcggacacgatgtatcagtgcttgccgatcctctgaactggacatttggctgtcgtgctttaaactggacgtccttatggcttatgttattactggtcgtttttatttgataaataaatattcaggggaacgggtgc

SEQ ID NO: 32848 - protein, 146 aa, Zea mays subsp. mays
  peptide (1)..(146): Ceres Seq. ID no. 12340574
LLRIAFPFSCTDLQTKPPKTRASIPSPTEAKHATDHRPRRDHLLYNSSSWPCSSSCIGDCGGVEIRADIVRLLRSLPTIDGLTFTNRRVQQGSSSSVSDRDLRVHSGDTFTADGEDTADLQRREREAGRWGGQVQIEADVHHRPVF

SEQ ID NO: 32849 - protein, 81 aa, Zea mays subsp. mays; identical to SEQ ID NO: 32186
  peptide (1)..(81): Ceres Seq. ID no. 12340575
  misc_feature (1)..(81): NCBI GI NO: 38346711 NR Description: OSJNBa0086O06.9

SEQ ID NO: 32850 - DNA, 1784 bp, Zea mays subsp. mays; identical to SEQ ID NO: 31227
  misc_feature (1)..(1784): Ceres Seq. ID no. 12414416

SEQ ID NO: 32851 - protein, 354 aa, Zea mays subsp. mays; identical to SEQ ID NO: 31228
  peptide (1)..(354): Ceres Seq. ID no. 12414417
  misc_feature (1)..(353): NCBI GI NO: 13699188 NR Description: putative glucose-6-phosphate/phosphate-tranlocat or
  misc_feature (1)..(353): NCBI GI NO: 34896140 NR Description: P0701D05.25
  misc_feature (5)..(349): NCBI GI NO: 22329373 NR Description: unknown protein; protein id: At1g06890
  misc_feature (6)..(349): NCBI GI NO: 27311731 NR Description: putative integral membrane protein
  misc_feature (6)..(323): NCBI GI NO: 30683853 NR Description: transporter-related [Arabidopsis thaliana]
  misc_feature (5)..(335): NCBI GI NO: 13384378 NR Description: putative phosphate translocator
  misc_feature (104)..(349): NCBI GI NO: 25406945 NR Description: hypothetical protein
  misc_feature (104)..(335): NCBI GI NO: 37535412 NR Description: putative glucose-6-phosphate/phosphate-translocator
  misc_feature (5)..(82): NCBI GI NO: 37535412 NR Description: putative glucose-6-phosphate/phosphate-translocator
  misc_feature (6)..(331): NCBI GI NO: 18411172 NR Description: expressed protein; protein id: At1g76670

SEQ ID NO: 32852 - protein, 321 aa, Zea mays subsp. mays; identical to SEQ ID NO: 31229
  peptide (1)..(321): Ceres Seq. ID no. 12414418
  misc_feature (1)..(320): NCBI GI NO: 13699188 NR Description: putative glucose-6-phosphate/phosphate-tranlocat or
  misc_feature (1)..(320): NCBI GI NO: 34896140 NR Description: P0701D05.25
  misc_feature (1)..(316): NCBI GI NO: 22329373 NR Description: unknown protein; protein id: At1g06890
  misc_feature (1)..(316): NCBI GI NO: 27311731 NR Description: putative integral membrane protein
  misc_feature (1)..(290): NCBI GI NO: 30683853 NR Description: transporter-related [Arabidopsis thaliana]
  misc_feature (1)..(302): NCBI GI NO: 13384378 NR Description: putative phosphate translocator
  misc_feature (71)..(316): NCBI GI NO: 25406945 NR Description: hypothetical protein
  misc_feature (71)..(302): NCBI GI NO: 37535412 NR Description: putative glucose-6-phosphate/phosphate-translocator
  misc_feature (1)..(49): NCBI GI NO: 37535412 NR Description: putative glucose-6-phosphate/phosphate-translocator
  misc_feature (1)..(298): NCBI GI NO: 18411172 NR Description: expressed protein; protein id: At1g76670

SEQ ID NO: 32853 - protein, 292 aa, Zea mays subsp. mays; identical to SEQ ID NO: 31230
  peptide (1)..(292): Ceres Seq. ID no. 12414419
  misc_feature (1)..(291): NCBI GI NO: 13699188 NR Description: putative glucose-6-phosphate/phosphate-tranlocat or
  misc_feature (1)..(291): NCBI GI NO: 34896140 NR Description: P0701D05.25
  misc_feature (1)..(287): NCBI GI NO: 22329373 NR Description: unknown protein; protein id: At1g06890
  misc_feature (1)..(287): NCBI GI NO: 27311731 NR Description: putative integral membrane protein
  misc_feature (1)..(261): NCBI GI NO: 30683853 NR Description: transporter-related [Arabidopsis thaliana]
  misc_feature (1)..(273): NCBI GI NO: 13384378 NR Description: putative phosphate translocator
  misc_feature (42)..(287): NCBI GI NO: 25406945 NR Description: hypothetical protein
  misc_feature (42)..(273): NCBI GI NO: 37535412 NR Description: putative glucose-6-phosphate/phosphate-translocator
  misc_feature (1)..(20): NCBI GI NO: 37535412 NR Description: putative glucose-6-phosphate/phosphate-translocator
  misc_feature (1)..(269): NCBI GI NO: 18411172 NR Description: expressed protein; protein id: At1g76670

SEQ ID NO: 32854 - DNA, 1084 bp, Zea mays subsp. mays
  misc_feature (1)..(1084): Ceres Seq. ID no. 12355615
aagttcaggcagtttcgtgcccttttcttctccaccagctcaaagctgaacgcggcatccttcctttcacaccggggaccggcgagcagagccgcgcacagcagaacgcggaagcaagaggaggcgatcgactactcgaccagccctctccgtgtctccgatggcggctcgcgtcctcgcggccctcgcccttgccctcgccctcgccctcgtcgccgtacccgctcccacgcgggcgtccaacgacgagggggacgcgctctacgcgctgcggcagcggctgtcggaccccaacggcgtgctgcagagctgggatcccacgctcgtcaccccctgcacctggttccacatctcctgcgaccaggtcggccgcgtcgtccgcctggacttgggcaactccaacgtctccggctccatcggccctgagctcggccgccttgtcaacctcaagtacctggagctgtacaggaacaaccttgacggcgagatccccaaggaattgggcaacctcaagaacctgatcagcttggatctgtatgccaacaagctcacgggaggaatccccaagtcactctccaagctcgactcactcagattcatgcgcttgaacaacaacaagcttacaggatcaattccaagggagtttgccaagctctccaacctgaaagtcatcgatttgtctaacaatgatctctgtggaactatccctgttgatgggcctttctcaacctttcctctccgaagctttgagaacaacagcaggctcaacggtccagagctacaaggattggttccttatgattttggatgttagatgccgatcaacaatgtaccaccttccccagttgaaagggggaaagacaagatagtattatcaatagaaacctagcttcaagaatgtcgtgactatatatatgtatgatattaagactagatttgataagggtggcatagcaagtcctgatattctgtgtgcattcagaatagctgcttttatgccccttgtgttgatattttgcaaaccaaaacaaactgttctgaaacgagggcacatattgttcatgaataaatttgagcctccaat

SEQ ID NO: 32855 - protein, 217 aa, Zea mays subsp. mays
  peptide (1)..(217): Ceres Seq. ID no. 12355616
  misc_feature (167)..(199): Pfam Name: Pfam Description:  Leucine Rich Repeat
  misc_feature (1)..(217): NCBI GI NO: 34896972 NR Description: putative leucine-rich repeat protein
  misc_feature (7)..(217): NCBI GI NO: 34903344 NR Description: unnamed protein product
  misc_feature (1)..(217): NCBI GI NO: 34146800 NR Description: At3g43740 [Arabidopsis thaliana]
  misc_feature (6)..(217): NCBI GI NO: 15242153 NR Description: leucine-rich repeat protein; protein id:At5g21090
  misc_feature (1)..(217): NCBI GI NO: 29468120 NR Description: leucine-rich repeat protein [Oryza sativa]
  misc_feature (26)..(217): NCBI GI NO: 30385250 NR Description: leucine-rich repeat protein
  misc_feature (1)..(217): NCBI GI NO: 27497122 NR Description: floral organ regulator 1
  misc_feature (15)..(217): NCBI GI NO: 7489030 NR Description: leucine-rich repeat protein LRP - tomato
  misc_feature (1)..(217): NCBI GI NO: 13897320 NR Description: somatic embryogenesis receptor-like kinase 2
  misc_feature (1)..(217): NCBI GI NO: 40253600 NR Description: putative somatic embryogenesis receptor kinase 1
MAARVLAALALALALALVAVPAPTRASNDEGDALYALRQRLSDPNGVLQSWDPTLVTPCTWFHISCDQVGRVVRLDLGNSNVSGSIGPELGRLVNLKYLELYRNNLDGEIPKELGNLKNLISLDLYANKLTGGIPKSLSKLDSLRFMRLNNNKLTGSIPREFAKLSNLKVIDLSNNDLCGTIPVDGPFSTFPLRSFENNSRLNGPELQGLVPYDFGC

SEQ ID NO: 32856 - protein, 172 aa, Zea mays subsp. mays
  peptide (1)..(172): Ceres Seq. ID no. 12355617
  misc_feature (62)..(172): Pfam Name: BLLF1 Pfam Description: Herpes virus major outer envelope glycoprotein
VQAVSCPFLLHQLKAERGILPFTPGTGEQSRAQQNAEARGGDRLLDQPSPCLRWRLASSRPSPLPSPSPSSPYPLPRGRPTTRGTRSTRCGSGCRTPTACCRAGIPRSSPPAPGSTSPATRSAASSAWTWATPTSPAPSALSSAALSTSSTWSCTGTTLTARSPRNWATSRT

SEQ ID NO: 32857 - protein, 141 aa, Zea mays subsp. mays
  peptide (1)..(141): Ceres Seq. ID no. 12355618
KFRQFRALFFSTSSKLNAASFLSHRGPASRAAHSRTRKQEEAIDYSTSPLRVSDGGSRPRGPRPCPRPRPRRRTRSHAGVQRRGGRALRAAAAAVGPQRRAAELGSHARHPLHLVPHLLRPGRPRRPPGLGQLQRLRLHRP

SEQ ID NO: 32858 - DNA, 1483 bp, Zea mays subsp. mays
  misc_feature (1)..(1483): Ceres Seq. ID no. 13492502
tgaagagttcagctaccctaccatccacactttattcatctcagggcagtagccagtagctagctgtagagggagttatcggccatgtcggaggaggcgacgctggaggacacgcctacgtggatcgtggcgtccgtgtgctccgtcatcgtcctcatctccttcgtcttcgagcgcgcgctccaccacctcggcaaggcactggagcgcctgaggaagaccctgtacgaggcgctgctaaagctcaaagaagagctcatgctgctgggcttcgtctcgctgctcctcgtcgtctcccaggacttgatacagaagatctgcatcgacgacagcctcatggagcactggatgccgtgccggggtgctagcgccaccgcctcggctcattacggtgtctcctcctcctcctcctcctccgcggtcggtggcgggaggaggatgctcaaaggcggcggggcagctttcgggcactgttcaagcaagggaaaagtcccgttgctatcacttcacgccttggagcaggtacacattttcatcttcgtcctagctatcacgcaagtcgttctcagcgtcgccaccgtcctcctgggacttctgcagatgcggatatggatgcactgggagaacaccattcagcaagagggcagctctgctcccaagatgatcgcccgtgtgcagaaaatcaggttcatccaggaccggtgtaaggggtacgagaaggccgcctgggttataatatggctgcgttctttcttcaaacagttctacggatcagtgtccaacgacgactacattgcgatgagactcggtttcgtcatggagcactttagggggcaccccaagttcaacttttacgactacatgatcaaagctctcgagaaagatttcaagcgagtagttagtataaaatggtattactggatttttgtgatgatctttctgctgctcaatgtcaccgggtggcactcctacttctggatctcattagttccactggctctgctgcttctgattgggacgaagctggagcacatcataaacaggctggcctacgaggtggcctcgaagcacgccgccgggcaaggcgaagggggcatcgtggtgagcccttcggacgagctgttctggttccgcagcccacggctggtgctcgtgctcatccacttcatcctgttccagaacgcgttcgagttcgcgtatttcttctggacactggtaaacatctggcatgcatgcatgcatgcatcatgcatgcgctctctgtctcaaatgcatgcagctacgccgtcgagtcgtcgtcgtcgttcgtcgacccaatctggccactggccagtgacgacctgtgtggcagtattcctgaatcctgatccctgtacgtgttaattgcaacgcaggcgatgttcggcgccaactcctgcatcatggacagtctaggatacagcgtctcgcgaatcatcatatggtactgagaacgtcgctgtcg

SEQ ID NO: 32859 - protein, 432 aa, Zea mays subsp. mays
  peptide (1)..(432): Ceres Seq. ID no. 13492503
  misc_feature (2)..(396): Pfam Name: Pfam Description:  Mlo family
  misc_feature (1)..(396): NCBI GI NO: 13784979 NR Description: seven transmembrane protein Mlo3 [Zea mays]
  misc_feature (5)..(385): NCBI GI NO: 34907492 NR Description: putative seven transmembrane protein
  misc_feature (1)..(377): NCBI GI NO: 13784989 NR Description: seven transmembrane protein Mlo8 [Zea mays]
  misc_feature (3)..(401): NCBI GI NO: 15235429 NR Description: seven transmembrane MLO protein family (MLO1)
  misc_feature (6)..(385): NCBI GI NO: 15224823 NR Description: seven transmembrane MLO protein family (MLO15)
  misc_feature (1)..(385): NCBI GI NO: 18416311 NR Description: seven transmembrane MLO protein family (MLO13)
  misc_feature (119)..(385): NCBI GI NO: 7487333 NR Description: hypothetical protein T22A6
  misc_feature (1)..(84): NCBI GI NO: 7487333 NR Description: hypothetical protein T22A6
  misc_feature (1)..(385): NCBI GI NO: 13784987 NR Description: seven transmembrane protein Mlo7 [Zea mays]
  misc_feature (95)..(377): NCBI GI NO: 13784985 NR Description: seven transmembrane protein Mlo6 [Zea mays]
MSEEATLEDTPTWIVASVCSVIVLISFVFERALHHLGKALERLRKTLYEALLKLKEELMLLGFVSLLLVVSQDLIQKICIDDSLMEHWMPCRGASATASAHYGVSSSSSSSAVGGGRRMLKGGGAAFGHCSSKGKVPLLSLHALEQVHIFIFVLAITQVVLSVATVLLGLLQMRIWMHWENTIQQEGSSAPKMIARVQKIRFIQDRCKGYEKAAWVIIWLRSFFKQFYGSVSNDDYIAMRLGFVMEHFRGHPKFNFYDYMIKALEKDFKRVVSIKWYYWIFVMIFLLLNVTGWHSYFWISLVPLALLLLIGTKLEHIINRLAYEVASKHAAGQGEGGIVVSPSDELFWFRSPRLVLVLIHFILFQNAFEFAYFFWTLVNIWHACMHASCMRSLSQMHAATPSSRRRRSSTQSGHWPVTTCVAVFLNPDPCTC

SEQ ID NO: 32860 - protein, 374 aa, Zea mays subsp. mays
  peptide (1)..(374): Ceres Seq. ID no. 13492504
  misc_feature (1)..(338): Pfam Name: Pfam Description:  Mlo family
  misc_feature (1)..(338): NCBI GI NO: 13784979 NR Description: seven transmembrane protein Mlo3 [Zea mays]
  misc_feature (1)..(327): NCBI GI NO: 34907492 NR Description: putative seven transmembrane protein
  misc_feature (1)..(319): NCBI GI NO: 13784989 NR Description: seven transmembrane protein Mlo8 [Zea mays]
  misc_feature (1)..(343): NCBI GI NO: 15235429 NR Description: seven transmembrane MLO protein family (MLO1)
  misc_feature (1)..(327): NCBI GI NO: 15224823 NR Description: seven transmembrane MLO protein family (MLO15)
  misc_feature (1)..(327): NCBI GI NO: 18416311 NR Description: seven transmembrane MLO protein family (MLO13)
  misc_feature (61)..(327): NCBI GI NO: 7487333 NR Description: hypothetical protein T22A6
  misc_feature (1)..(26): NCBI GI NO: 7487333 NR Description: hypothetical protein T22A6
  misc_feature (1)..(327): NCBI GI NO: 13784987 NR Description: seven transmembrane protein Mlo7 [Zea mays]
  misc_feature (37)..(319): NCBI GI NO: 13784985 NR Description: seven transmembrane protein Mlo6 [Zea mays]
MLLGFVSLLLVVSQDLIQKICIDDSLMEHWMPCRGASATASAHYGVSSSSSSSAVGGGRRMLKGGGAAFGHCSSKGKVPLLSLHALEQVHIFIFVLAITQVVLSVATVLLGLLQMRIWMHWENTIQQEGSSAPKMIARVQKIRFIQDRCKGYEKAAWVIIWLRSFFKQFYGSVSNDDYIAMRLGFVMEHFRGHPKFNFYDYMIKALEKDFKRVVSIKWYYWIFVMIFLLLNVTGWHSYFWISLVPLALLLLIGTKLEHIINRLAYEVASKHAAGQGEGGIVVSPSDELFWFRSPRLVLVLIHFILFQNAFEFAYFFWTLVNIWHACMHASCMRSLSQMHAATPSSRRRRSSTQSGHWPVTTCVAVFLNPDPCTC

SEQ ID NO: 32861 - protein, 348 aa, Zea mays subsp. mays
  peptide (1)..(348): Ceres Seq. ID no. 13492505
  misc_feature (1)..(312): Pfam Name: Pfam Description:  Mlo family
  misc_feature (1)..(312): NCBI GI NO: 13784979 NR Description: seven transmembrane protein Mlo3 [Zea mays]
  misc_feature (1)..(301): NCBI GI NO: 34907492 NR Description: putative seven transmembrane protein
  misc_feature (1)..(293): NCBI GI NO: 13784989 NR Description: seven transmembrane protein Mlo8 [Zea mays]
  misc_feature (1)..(317): NCBI GI NO: 15235429 NR Description: seven transmembrane MLO protein family (MLO1)
  misc_feature (1)..(301): NCBI GI NO: 15224823 NR Description: seven transmembrane MLO protein family (MLO15)
  misc_feature (1)..(301): NCBI GI NO: 18416311 NR Description: seven transmembrane MLO protein family (MLO13)
  misc_feature (35)..(301): NCBI GI NO: 7487333 NR Description: hypothetical protein T22A6
  misc_feature (1)..(301): NCBI GI NO: 13784987 NR Description: seven transmembrane protein Mlo7 [Zea mays]
  misc_feature (11)..(293): NCBI GI NO: 13784985 NR Description: seven transmembrane protein Mlo6 [Zea mays]
  misc_feature (1)..(35): NCBI GI NO: 13784985 NR Description: seven transmembrane protein Mlo6 [Zea mays]
MEHWMPCRGASATASAHYGVSSSSSSSAVGGGRRMLKGGGAAFGHCSSKGKVPLLSLHALEQVHIFIFVLAITQVVLSVATVLLGLLQMRIWMHWENTIQQEGSSAPKMIARVQKIRFIQDRCKGYEKAAWVIIWLRSFFKQFYGSVSNDDYIAMRLGFVMEHFRGHPKFNFYDYMIKALEKDFKRVVSIKWYYWIFVMIFLLLNVTGWHSYFWISLVPLALLLLIGTKLEHIINRLAYEVASKHAAGQGEGGIVVSPSDELFWFRSPRLVLVLIHFILFQNAFEFAYFFWTLVNIWHACMHASCMRSLSQMHAATPSSRRRRSSTQSGHWPVTTCVAVFLNPDPCTC

SEQ ID NO: 32862 - DNA, 1324 bp, Zea mays subsp. mays
  misc_feature (1)..(1324): Ceres Seq. ID no. 12411942
aatcctttcacccttcagcccgcgtgccctctgtttctctcccggttcttcccctctcctgcgacgacagggttgggtaacgccgctcgccgccgccgccgccgccatacgcaggtgccgaggccttcgtcgatctcttagccgtcgacaagcacccaagagatgcaggatagaatgagacggcaggggcaatatggtgaagcggatattaactccatggttgctgcccagttgcatcactaccaggcacagcaaagggtacagaaacaccctgagaatagctacactggaagagatcctgcacaagcttctgcggagcatcagtacactccccctaaggcaagacagagtcaatgggatcgaggtggaccaaatgcgccaagccaggttccatcatatgcatataacgaagcccaaggtgctggaggtgcgcaatccttttatgatgggcagagatctgatacaaaggttggtctagaaaagcagcccagcaaggagtctagggagcaacctcgtactgaacgaactgaaacaagatacgagaattataatcttcctcggacattcgaaggtcttgaacaaagtttccatgaagacattattttgctatccaaggaactacaggaggcagaggatgctgaaaattctagacacatggagagattgaaggatataaatacacagtaccaggagaaactattagcacttagagctcggcaagcgaactatagagatgagttcctgcgcaaggaatctctagcacgccagcagcaataccagcacgccagcatgagccattacgccagcaattccacggctggggagcagcatggttataacccaacggcagcaggcacgcctcctgttgctgctggaggtgcttatggtgaggctcatcggggttatgcttctggccagtatgaatcatttagcgatcgtccagattatccagagttccatgatgggggcagaggtcgtggtcgtagttctgagcagcgtgctcaataccctggtggtcgtgcttataattccggtggccggcgattctagatatgctttgaactttgaaggacgatctatcactctgtcaagcgagctcatatcacctgatgtcagtgtgctgtaccgtgctatactcgaccgagaaacctaagcgctcataaaacttgttctacaattcaggtgcatcgaactactttatggttttgctagagttcattctggttataattgtagaggaacgaaacgatgagagaacactgacttttccgtttctctgcaattcatgtaatatgatctcggaagcaataacatttcatcttcg

SEQ ID NO: 32863 - protein, 295 aa, Zea mays subsp. mays
  peptide (1)..(295): Ceres Seq. ID no. 12411943
  misc_feature (5)..(293): NCBI GI NO: 22326954 NR Description: unknown protein; protein id: At5g22040.1
  misc_feature (125)..(289): NCBI GI NO: 26449851 NR Description: unknown protein [Arabidopsis thaliana]
  misc_feature (30)..(289): NCBI GI NO: 15228732 NR Description: putative protein; protein id: At3g62330.1
MQDRMRRQGQYGEADINSMVAAQLHHYQAQQRVQKHPENSYTGRDPAQASAEHQYTPPKARQSQWDRGGPNAPSQVPSYAYNEAQGAGGAQSFYDGQRSDTKVGLEKQPSKESREQPRTERTETRYENYNLPRTFEGLEQSFHEDIILLSKELQEAEDAENSRHMERLKDINTQYQEKLLALRARQANYRDEFLRKESLARQQQYQHASMSHYASNSTAGEQHGYNPTAAGTPPVAAGGAYGEAHRGYASGQYESFSDRPDYPEFHDGGRGRGRSSEQRAQYPGGRAYNSGGRRF

SEQ ID NO: 32864 - protein, 291 aa, Zea mays subsp. mays
  peptide (1)..(291): Ceres Seq. ID no. 12411944
  misc_feature (1)..(289): NCBI GI NO: 22326954 NR Description: unknown protein; protein id: At5g22040.1
  misc_feature (121)..(285): NCBI GI NO: 26449851 NR Description: unknown protein [Arabidopsis thaliana]
  misc_feature (26)..(285): NCBI GI NO: 15228732 NR Description: putative protein; protein id: At3g62330.1
MRRQGQYGEADINSMVAAQLHHYQAQQRVQKHPENSYTGRDPAQASAEHQYTPPKARQSQWDRGGPNAPSQVPSYAYNEAQGAGGAQSFYDGQRSDTKVGLEKQPSKESREQPRTERTETRYENYNLPRTFEGLEQSFHEDIILLSKELQEAEDAENSRHMERLKDINTQYQEKLLALRARQANYRDEFLRKESLARQQQYQHASMSHYASNSTAGEQHGYNPTAAGTPPVAAGGAYGEAHRGYASGQYESFSDRPDYPEFHDGGRGRGRSSEQRAQYPGGRAYNSGGRRF

SEQ ID NO: 32865 - protein, 277 aa, Zea mays subsp. mays
  peptide (1)..(277): Ceres Seq. ID no. 12411945
  misc_feature (1)..(275): NCBI GI NO: 22326954 NR Description: unknown protein; protein id: At5g22040.1
  misc_feature (107)..(271): NCBI GI NO: 26449851 NR Description: unknown protein [Arabidopsis thaliana]
  misc_feature (12)..(271): NCBI GI NO: 15228732 NR Description: putative protein; protein id: At3g62330.1
MVAAQLHHYQAQQRVQKHPENSYTGRDPAQASAEHQYTPPKARQSQWDRGGPNAPSQVPSYAYNEAQGAGGAQSFYDGQRSDTKVGLEKQPSKESREQPRTERTETRYENYNLPRTFEGLEQSFHEDIILLSKELQEAEDAENSRHMERLKDINTQYQEKLLALRARQANYRDEFLRKESLARQQQYQHASMSHYASNSTAGEQHGYNPTAAGTPPVAAGGAYGEAHRGYASGQYESFSDRPDYPEFHDGGRGRGRSSEQRAQYPGGRAYNSGGRRF

SEQ ID NO: 32866 - DNA, 1362 bp, Zea mays subsp. mays
  misc_feature (1)..(1362): Ceres Seq. ID no. 12374139
gatcctatcgcatcgaatcgaaactgttccgctcccactccgatcggattcggtgggacggtggcatctatgcgcccgtcgcaccgtcgctcaaactgtataaacctgcgcccgaacacttcgagctcacccgcaacctcctccgggaagcgcgatcgccgtctcgaaggagctgaaatccaagattccaagctcttctgtcacaggttgagggaagttgaagcaaaagtctaagcaaaaatgttttacgggggatatgcttaccatggcaactcgtttgagcaaacataccgttgttatccagcatcgttttttgataagccacacctggaaggcggtgataaagtaataatgccaccttctgcccttgatcgtcttgcttccttgcacatcgagtaccctatgctatttgagctgcacaatgatgcaacccagcggatttcacactgtggtgttttggagtttgttgcagaagaaggcatgatcatcatgccctattggatgatgcaaaacatgctgcttcaagagggtgacactgtccatgtaaaaaatgcgactcttcccaagggcacatatgtgaaattgcaacctcacacaactgattttctggatatttcaaacccgaaagccatcttggaaaaaactttaagaaatttctcctgcttaaccacgggagacagcatcatggtagcctacaacaacaaacaatattatattgatattgttgaaacaaagcctgcttctgcggttagcattattgagacagactgtgaagtggactttgcgcctcctcttgattataaagaacctgagaaaccacgacaaccaacagttcctgcaagcaaggcacctgctgaagatggcaacactgcagtggaggatgaaccaaaattcaaaccatttactggttttggaaagcggttggatggaaaagcctcaaaactgcaagcatcagaggttccttccactgcactttctgcaccttcagattcaaacaaaagagcaaatcagcaaatctcagcacccgcagcttcaggagctagcaattacagtcgacagaaaactgggaaacttgtttttggttcaagtgcaagcaacaataaggaaccacaaaaggctcctgctaaagaggagcaacccgcaaagaaggacgacgagctgaggttccaagcgttcagcgggaagagctactcattgaaacgttagctgcttcagttaaccttcaaattcgccgctactctttcgtttcgtgcatggtgggtgttctggcacctggtcaccaccatgtagatatgaattgaagtatgtatatgcttatcttgatggaaacatgacagtctgtttatttaagcccaaaagttc

SEQ ID NO: 32867 - protein, 321 aa, Zea mays subsp. mays
  peptide (1)..(321): Ceres Seq. ID no. 12374140
  misc_feature (10)..(184): Pfam Name: Pfam Description:  Ubiquitin fusion degradation protein UFD1
  misc_feature (1)..(321): NCBI GI NO: 38345534 NR Description: OSJNBa0020J04.9
  misc_feature (1)..(320): NCBI GI NO: 21592947 NR Description: putative ubiquitin fusion-degradation protein
  misc_feature (1)..(320): NCBI GI NO: 18399646 NR Description: putative ubiquitin fusion-degradation protein
  misc_feature (2)..(320): NCBI GI NO: 25347017 NR Description: probable ubiquitin fusion-degradation protein
  misc_feature (1)..(320): NCBI GI NO: 7488221 NR Description: probable ubiquitin-dependent proteolytic protein -Arabidopsis thaliana
  misc_feature (1)..(320): NCBI GI NO: 18420341 NR Description: putative ubiquitin-dependent proteolytic protein
  misc_feature (34)..(319): NCBI GI NO: 7488408 NR Description: probable ubiquitin fusion-degradation proteinAt2g29070
  misc_feature (38)..(319): NCBI GI NO: 30684115 NR Description: ubiquitin fusion degradation
  misc_feature (11)..(241): NCBI GI NO: 38540890 NR Description: Ubiquitin fusion degradation 1-like protein
  misc_feature (11)..(241): NCBI GI NO: 16758158 NR Description: ubiquitin fusion degradation 1-like
MFYGGYAYHGNSFEQTYRCYPASFFDKPHLEGGDKVIMPPSALDRLASLHIEYPMLFELHNDATQRISHCGVLEFVAEEGMIIMPYWMMQNMLLQEGDTVHVKNATLPKGTYVKLQPHTTDFLDISNPKAILEKTLRNFSCLTTGDSIMVAYNNKQYYIDIVETKPASAVSIIETDCEVDFAPPLDYKEPEKPRQPTVPASKAPAEDGNTAVEDEPKFKPFTGFGKRLDGKASKLQASEVPSTALSAPSDSNKRANQQISAPAASGASNYSRQKTGKLVFGSSASNNKEPQKAPAKEEQPAKKDDELRFQAFSGKSYSLKR

SEQ ID NO: 32868 - protein, 284 aa, Zea mays subsp. mays
  peptide (1)..(284): Ceres Seq. ID no. 12374141
  misc_feature (1)..(147): Pfam Name: Pfam Description:  Ubiquitin fusion degradation protein UFD1
  misc_feature (1)..(284): NCBI GI NO: 38345534 NR Description: OSJNBa0020J04.9
  misc_feature (1)..(283): NCBI GI NO: 21592947 NR Description: putative ubiquitin fusion-degradation protein
  misc_feature (1)..(283): NCBI GI NO: 18399646 NR Description: putative ubiquitin fusion-degradation protein
  misc_feature (1)..(283): NCBI GI NO: 25347017 NR Description: probable ubiquitin fusion-degradation protein
  misc_feature (1)..(283): NCBI GI NO: 7488221 NR Description: probable ubiquitin-dependent proteolytic protein -Arabidopsis thaliana
  misc_feature (1)..(283): NCBI GI NO: 18420341 NR Description: putative ubiquitin-dependent proteolytic protein
  misc_feature (1)..(282): NCBI GI NO: 7488408 NR Description: probable ubiquitin fusion-degradation proteinAt2g29070
  misc_feature (1)..(282): NCBI GI NO: 30684115 NR Description: ubiquitin fusion degradation
  misc_feature (1)..(204): NCBI GI NO: 38540890 NR Description: Ubiquitin fusion degradation 1-like protein
  misc_feature (1)..(204): NCBI GI NO: 16758158 NR Description: ubiquitin fusion degradation 1-like
MPPSALDRLASLHIEYPMLFELHNDATQRISHCGVLEFVAEEGMIIMPYWMMQNMLLQEGDTVHVKNATLPKGTYVKLQPHTTDFLDISNPKAILEKTLRNFSCLTTGDSIMVAYNNKQYYIDIVETKPASAVSIIETDCEVDFAPPLDYKEPEKPRQPTVPASKAPAEDGNTAVEDEPKFKPFTGFGKRLDGKASKLQASEVPSTALSAPSDSNKRANQQISAPAASGASNYSRQKTGKLVFGSSASNNKEPQKAPAKEEQPAKKDDELRFQAFSGKSYSLKR

SEQ ID NO: 32869 - protein, 267 aa, Zea mays subsp. mays
  peptide (1)..(267): Ceres Seq. ID no. 12374142
  misc_feature (1)..(130): Pfam Name: Pfam Description:  Ubiquitin fusion degradation protein UFD1
  misc_feature (1)..(267): NCBI GI NO: 38345534 NR Description: OSJNBa0020J04.9
  misc_feature (1)..(266): NCBI GI NO: 21592947 NR Description: putative ubiquitin fusion-degradation protein
  misc_feature (1)..(266): NCBI GI NO: 18399646 NR Description: putative ubiquitin fusion-degradation protein
  misc_feature (1)..(266): NCBI GI NO: 25347017 NR Description: probable ubiquitin fusion-degradation protein
  misc_feature (1)..(266): NCBI GI NO: 7488221 NR Description: probable ubiquitin-dependent proteolytic protein -Arabidopsis thaliana
  misc_feature (1)..(266): NCBI GI NO: 18420341 NR Description: putative ubiquitin-dependent proteolytic protein
  misc_feature (1)..(265): NCBI GI NO: 7488408 NR Description: probable ubiquitin fusion-degradation proteinAt2g29070
  misc_feature (1)..(265): NCBI GI NO: 30684115 NR Description: ubiquitin fusion degradation
  misc_feature (1)..(187): NCBI GI NO: 38540890 NR Description: Ubiquitin fusion degradation 1-like protein
  misc_feature (1)..(187): NCBI GI NO: 16758158 NR Description: ubiquitin fusion degradation 1-like
MLFELHNDATQRISHCGVLEFVAEEGMIIMPYWMMQNMLLQEGDTVHVKNATLPKGTYVKLQPHTTDFLDISNPKAILEKTLRNFSCLTTGDSIMVAYNNKQYYIDIVETKPASAVSIIETDCEVDFAPPLDYKEPEKPRQPTVPASKAPAEDGNTAVEDEPKFKPFTGFGKRLDGKASKLQASEVPSTALSAPSDSNKRANQQISAPAASGASNYSRQKTGKLVFGSSASNNKEPQKAPAKEEQPAKKDDELRFQAFSGKSYSLKR

SEQ ID NO: 32870 - DNA, 1710 bp, Zea mays subsp. mays
  misc_feature (1)..(1710): Ceres Seq. ID no. 12413551
  misc_feature (1330)..(1330): n is a, c, t, g, unknown, or other
  misc_feature (1285)..(1285): n is a, c, t, g, unknown, or other
  misc_feature (1380)..(1380): n is a, c, t, g, unknown, or other
  misc_feature (1301)..(1301): n is a, c, t, g, unknown, or other
  misc_feature (1366)..(1366): n is a, c, t, g, unknown, or other
tgaataccagtatccgcagtgtaaaagcttcattttattacaaaaaaaaaatcttcgtcctccccgcgaagacgcttcccgagcttctccttcgttcctcctcttccccgcggctctcctctgccccgcaccggcaccgctagggttttgccgccgacctctcgctcgcttccgggctccgcgaggcaaccgtccggaccggccggtcgaaatggtggatgtggaggaggtcgggaacaagatgcaatcgcagatgcgcctgcacgcggaccggatgacgccgccgccgacctccccctcccggcgctcttcgacagggcgtcgcggcttcacgccctggcctccagctccgccctcgaccaggatgggatccgcaccggggttgagctgctgcggacgctgcgacgagatggtcggcaggctcggtcttttctcccccaacgagaccaaggacgacgtctccaccgcaaacctcaagtacctactcgtcccatattaccttgcggaaatgaccgagaagatggcgcaggaggatcggatcccggttcttaaggcgtcgcaggaccatttgaaggagttcattgctctatgcgaagtactagagcttattccagaggatgagctagaattgtctaggcagaagcagtctgatactatggcaaacagaagagcacagaaggttgcccggttcaaacgtcaaaaggctgcagaaacaaagctccaagagatcagagagagaaaagaaaggcgtggacgctcattgagagcaactgctttgtctgccccagttgaagctggagaggaagatgacctggaggatgacggggaggaagaaagggaggcttggttagctaccatctcattggctatctgcaaggcttttgatcttctcgacatgttaaagaaggaagaagaaatgcttctagctgtaaaggaaaggaaggcaaaggacgggaatgcatttgctcgtgaaatgctcgacgaacggacaaagaaggctgaagcatggcaccacaaagctgccagtcgtgtggcgtattccaaaccagccgatccgatcacctgtgcaacatttgctcaggatgtcattgaagggagagcgagcgtttcacaggcccacgagcacaaacaccagcccctgatatttggacctgcaagccttgttggcggcggtctgaccagtgaaagggaaagaatggcagcgcaagtttttcagcccagttacaggatgccaacaatgagcatagaagaggctggcttgcgcgagatgaagatgatggagagntggcaagagaggaccnccgagatgatgagagaagcaaactccgcntggcacaagggcggcgacagcagcagcagctcgatnccgcaaggggaggncggggacgaggatgccgaggaggccaaggcacgagcgtgggacgactggaaggacgacaaccctcgcggcgctggcaacaagaagctcacgccctgtggctagactgcaaatcgaagcacgctcgctgtgtgatcgtacggtgtttgactcgaccagtatttagtttgtatctgacgatcagtgtatttattatataggctgcttctgtaacagtgtgtttatacaccatccactgcagcttcttcacacaggtgtttccgaagttaactgggttagacaaactgtgttgtccaagcaagagtatctaacaaatagctacgtaactactt

SEQ ID NO: 32871 - protein, 493 aa, Zea mays subsp. mays
  peptide (1)..(493): Ceres Seq. ID no. 12413552
  misc_feature (133)..(481): Pfam Name: Pfam Description:  TAP42-like family
  misc_feature (71)..(493): NCBI GI NO: 29367365 NR Description: PP2A regulatory subunit-like protein
  misc_feature (133)..(493): NCBI GI NO: 18423459 NR Description: PP2A regulatory subunit; protein id: At5g53000
  misc_feature (133)..(493): NCBI GI NO: 21553995 NR Description: PP2A regulatory subunit [Arabidopsis thaliana]
  misc_feature (133)..(493): NCBI GI NO: 8809589 NR Description: PP2A regulatory subunit [Arabidopsis thaliana]
  misc_feature (71)..(316): NCBI GI NO: 7489459 NR Description: chilling-induced protein - rice
  misc_feature (271)..(493): NCBI GI NO: 7489459 NR Description: chilling-induced protein - rice
  misc_feature (133)..(331): NCBI GI NO: 19075479 NR Description: putative phosphatase component
  misc_feature (392)..(486): NCBI GI NO: 19075479 NR Description: putative phosphatase component
  misc_feature (134)..(242): NCBI GI NO: 40746142 NR Description: hypothetical protein AN0120.2
  misc_feature (392)..(486): NCBI GI NO: 40746142 NR Description: hypothetical protein AN0120.2
  misc_feature (428)..(428): Xaa is any aa, unknown or other
  misc_feature (434)..(434): Xaa is any aa, unknown or other
  misc_feature (443)..(443): Xaa is any aa, unknown or other
  misc_feature (455)..(455): Xaa is any aa, unknown or other
  misc_feature (460)..(460): Xaa is any aa, unknown or other
EYQYPQCKSFILLQKKNLRPPREDASRASPSFLLFPAALLCPAPAPLGFCRRPLARFRAPRGNRPDRPVEMVDVEEVGNKMQSQMRLHADRMTPPPTSPSRRSSTGRRGFTPWPPAPPSTRMGSAPGLSCCGRCDEMVGRLGLFSPNETKDDVSTANLKYLLVPYYLAEMTEKMAQEDRIPVLKASQDHLKEFIALCEVLELIPEDELELSRQKQSDTMANRRAQKVARFKRQKAAETKLQEIRERKERRGRSLRATALSAPVEAGEEDDLEDDGEEEREAWLATISLAICKAFDLLDMLKKEEEMLLAVKERKAKDGNAFAREMLDERTKKAEAWHHKAASRVAYSKPADPITCATFAQDVIEGRASVSQAHEHKHQPLIFGPASLVGGGLTSERERMAAQVFQPSYRMPTMSIEEAGLREMKMMEXWQERTXEMMREANSXWHKGGDSSSSSXPQGEXGDEDAEEAKARAWDDWKDDNPRGAGNKKLTPCG

SEQ ID NO: 32872 - protein, 423 aa, Zea mays subsp. mays
  peptide (1)..(423): Ceres Seq. ID no. 12413553
  misc_feature (63)..(411): Pfam Name: Pfam Description:  TAP42-like family
  misc_feature (1)..(423): NCBI GI NO: 29367365 NR Description: PP2A regulatory subunit-like protein
  misc_feature (63)..(423): NCBI GI NO: 18423459 NR Description: PP2A regulatory subunit; protein id: At5g53000
  misc_feature (63)..(423): NCBI GI NO: 21553995 NR Description: PP2A regulatory subunit [Arabidopsis thaliana]
  misc_feature (63)..(423): NCBI GI NO: 8809589 NR Description: PP2A regulatory subunit [Arabidopsis thaliana]
  misc_feature (1)..(246): NCBI GI NO: 7489459 NR Description: chilling-induced protein - rice
  misc_feature (201)..(423): NCBI GI NO: 7489459 NR Description: chilling-induced protein - rice
  misc_feature (63)..(261): NCBI GI NO: 19075479 NR Description: putative phosphatase component
  misc_feature (322)..(416): NCBI GI NO: 19075479 NR Description: putative phosphatase component
  misc_feature (64)..(172): NCBI GI NO: 40746142 NR Description: hypothetical protein AN0120.2
  misc_feature (322)..(416): NCBI GI NO: 40746142 NR Description: hypothetical protein AN0120.2
  misc_feature (358)..(358): Xaa is any aa, unknown or other
  misc_feature (364)..(364): Xaa is any aa, unknown or other
  misc_feature (373)..(373): Xaa is any aa, unknown or other
  misc_feature (385)..(385): Xaa is any aa, unknown or other
  misc_feature (390)..(390): Xaa is any aa, unknown or other
MVDVEEVGNKMQSQMRLHADRMTPPPTSPSRRSSTGRRGFTPWPPAPPSTRMGSAPGLSCCGRCDEMVGRLGLFSPNETKDDVSTANLKYLLVPYYLAEMTEKMAQEDRIPVLKASQDHLKEFIALCEVLELIPEDELELSRQKQSDTMANRRAQKVARFKRQKAAETKLQEIRERKERRGRSLRATALSAPVEAGEEDDLEDDGEEEREAWLATISLAICKAFDLLDMLKKEEEMLLAVKERKAKDGNAFAREMLDERTKKAEAWHHKAASRVAYSKPADPITCATFAQDVIEGRASVSQAHEHKHQPLIFGPASLVGGGLTSERERMAAQVFQPSYRMPTMSIEEAGLREMKMMEXWQERTXEMMREANSXWHKGGDSSSSSXPQGEXGDEDAEEAKARAWDDWKDDNPRGAGNKKLTPCG

SEQ ID NO: 32873 - protein, 413 aa, Zea mays subsp. mays
  peptide (1)..(413): Ceres Seq. ID no. 12413554
  misc_feature (53)..(401): Pfam Name: Pfam Description:  TAP42-like family
  misc_feature (1)..(413): NCBI GI NO: 29367365 NR Description: PP2A regulatory subunit-like protein
  misc_feature (53)..(413): NCBI GI NO: 18423459 NR Description: PP2A regulatory subunit; protein id: At5g53000
  misc_feature (53)..(413): NCBI GI NO: 21553995 NR Description: PP2A regulatory subunit [Arabidopsis thaliana]
  misc_feature (53)..(413): NCBI GI NO: 8809589 NR Description: PP2A regulatory subunit [Arabidopsis thaliana]
  misc_feature (1)..(236): NCBI GI NO: 7489459 NR Description: chilling-induced protein - rice
  misc_feature (191)..(413): NCBI GI NO: 7489459 NR Description: chilling-induced protein - rice
  misc_feature (53)..(251): NCBI GI NO: 19075479 NR Description: putative phosphatase component
  misc_feature (312)..(406): NCBI GI NO: 19075479 NR Description: putative phosphatase component
  misc_feature (54)..(162): NCBI GI NO: 40746142 NR Description: hypothetical protein AN0120.2
  misc_feature (312)..(406): NCBI GI NO: 40746142 NR Description: hypothetical protein AN0120.2
  misc_feature (348)..(348): Xaa is any aa, unknown or other
  misc_feature (354)..(354): Xaa is any aa, unknown or other
  misc_feature (363)..(363): Xaa is any aa, unknown or other
  misc_feature (375)..(375): Xaa is any aa, unknown or other
  misc_feature (380)..(380): Xaa is any aa, unknown or other
MQSQMRLHADRMTPPPTSPSRRSSTGRRGFTPWPPAPPSTRMGSAPGLSCCGRCDEMVGRLGLFSPNETKDDVSTANLKYLLVPYYLAEMTEKMAQEDRIPVLKASQDHLKEFIALCEVLELIPEDELELSRQKQSDTMANRRAQKVARFKRQKAAETKLQEIRERKERRGRSLRATALSAPVEAGEEDDLEDDGEEEREAWLATISLAICKAFDLLDMLKKEEEMLLAVKERKAKDGNAFAREMLDERTKKAEAWHHKAASRVAYSKPADPITCATFAQDVIEGRASVSQAHEHKHQPLIFGPASLVGGGLTSERERMAAQVFQPSYRMPTMSIEEAGLREMKMMEXWQERTXEMMREANSXWHKGGDSSSSSXPQGEXGDEDAEEAKARAWDDWKDDNPRGAGNKKLTPCG

SEQ ID NO: 32874 - DNA, 1140 bp, Zea mays subsp. mays
  misc_feature (1)..(1140): Ceres Seq. ID no. 12411938
gcccgtcctctcggtctccgaccacgactgtgcgccttcctaagtaaccctagctcggcgccctccctccgcgacatccaagcccggcaatctcatcgtcgcgcttgcaccgttacgcagtgcgacctctgcgtcttcgaatccaggtctctgcaggaaggtagagaggaggaggaggtttgtggcaggatttaaccagcccaatggttccatccgagatggggagcgtcgccaccgccgtcagcacgcctgctgcggacaagctgctccatgggcctatctctggcaagaagtgcaagaaaccaggcccgaggaagattcataaggctgagagggagaagcttaaacgagaccacctaaatgatctctttgttgagctgggtaatatgctagaagcagatagacagaacaatgggaaagcatgcatactgactgacactactcggatactaagagacctgcttgttcaagtagactctcttcgaaaggaacatagcgacctacaaaacgaatctcattatgtaacaatggagagggatgagatgcaggatgaaaacggcgtgctccgcaaagaaatttcagagcttcaaaacgagttgacaatgcgggtttcaggcagtccagcaggttggggccatggcaccgccagatcagatccccctcttcctcactcaaccgcagtgttctcgtcggagcaggcgatgcaaccacccaccattgcaagcgttgtattcccgttgcagcagccactggcaccatcagcaatgaccaaaccacctcatgctgcaccaccactcgaactgaagctctttccagaagtggcatttgccgaaggccatgagccgtgtgaagaccacaaagctcccaaccatgtggcacgaccacaggcaaggtacccaacgcaatcagcctcatggcccgtaaacctgttctctggccttccacgaatggaagatgagcaatgcagtagcagcacaagcggcagcagcagagaggataacacagatatagaatgagtggatcagctcctacaatcaaagagtctctgttttgagtctagtggatgtaaatttgaatctcctttttggatttcagaacgatagattatactctgttggaaataggacccctcccattgct

SEQ ID NO: 32875 - protein, 270 aa, Zea mays subsp. mays
  peptide (1)..(270): Ceres Seq. ID no. 12411939
  misc_feature (37)..(87): Pfam Name: Pfam Description:  Helix-loop-helix DNA-binding domain
  misc_feature (1)..(253): NCBI GI NO: 18071393 NR Description: putative amelogenin precursor [Oryza sativa]
  misc_feature (1)..(265): NCBI GI NO: 33146544 NR Description: amelogenin precursor-like protein
  misc_feature (97)..(268): NCBI GI NO: 34913194 NR Description: contains EST C74688
  misc_feature (1)..(106): NCBI GI NO: 34913194 NR Description: contains EST C74688
  misc_feature (1)..(265): NCBI GI NO: 34391901 NR Description: putative transcription factor bHLH
  misc_feature (15)..(242): NCBI GI NO: 15228207 NR Description: hypothetical protein; protein id: At3g47640
  misc_feature (37)..(196): NCBI GI NO: 15230975 NR Description: bHLH protein; protein id: At3g19860
  misc_feature (37)..(196): NCBI GI NO: 11994197 NR Description: emb|CAA18500
  misc_feature (1)..(166): NCBI GI NO: 7487183 NR Description: hypothetical protein T19K4
  misc_feature (1)..(136): NCBI GI NO: 30690568 NR Description: bHLH protein family [Arabidopsis thaliana]
MVPSEMGSVATAVSTPAADKLLHGPISGKKCKKPGPRKIHKAEREKLKRDHLNDLFVELGNMLEADRQNNGKACILTDTTRILRDLLVQVDSLRKEHSDLQNESHYVTMERDEMQDENGVLRKEISELQNELTMRVSGSPAGWGHGTARSDPPLPHSTAVFSSEQAMQPPTIASVVFPLQQPLAPSAMTKPPHAAPPLELKLFPEVAFAEGHEPCEDHKAPNHVARPQARYPTQSASWPVNLFSGLPRMEDEQCSSSTSGSSREDNTDIE

SEQ ID NO: 32876 - protein, 265 aa, Zea mays subsp. mays
  peptide (1)..(265): Ceres Seq. ID no. 12411940
  misc_feature (32)..(82): Pfam Name: Pfam Description:  Helix-loop-helix DNA-binding domain
  misc_feature (1)..(248): NCBI GI NO: 18071393 NR Description: putative amelogenin precursor [Oryza sativa]
  misc_feature (1)..(260): NCBI GI NO: 33146544 NR Description: amelogenin precursor-like protein
  misc_feature (92)..(263): NCBI GI NO: 34913194 NR Description: contains EST C74688
  misc_feature (1)..(101): NCBI GI NO: 34913194 NR Description: contains EST C74688
  misc_feature (1)..(260): NCBI GI NO: 34391901 NR Description: putative transcription factor bHLH
  misc_feature (10)..(237): NCBI GI NO: 15228207 NR Description: hypothetical protein; protein id: At3g47640
  misc_feature (32)..(191): NCBI GI NO: 15230975 NR Description: bHLH protein; protein id: At3g19860
  misc_feature (32)..(191): NCBI GI NO: 11994197 NR Description: emb|CAA18500
  misc_feature (1)..(161): NCBI GI NO: 7487183 NR Description: hypothetical protein T19K4
  misc_feature (1)..(131): NCBI GI NO: 30690568 NR Description: bHLH protein family [Arabidopsis thaliana]
MGSVATAVSTPAADKLLHGPISGKKCKKPGPRKIHKAEREKLKRDHLNDLFVELGNMLEADRQNNGKACILTDTTRILRDLLVQVDSLRKEHSDLQNESHYVTMERDEMQDENGVLRKEISELQNELTMRVSGSPAGWGHGTARSDPPLPHSTAVFSSEQAMQPPTIASVVFPLQQPLAPSAMTKPPHAAPPLELKLFPEVAFAEGHEPCEDHKAPNHVARPQARYPTQSASWPVNLFSGLPRMEDEQCSSSTSGSSREDNTDIE

SEQ ID NO: 32877 - protein, 209 aa, Zea mays subsp. mays
  peptide (1)..(209): Ceres Seq. ID no. 12411941
  misc_feature (1)..(192): NCBI GI NO: 18071393 NR Description: putative amelogenin precursor [Oryza sativa]
  misc_feature (1)..(204): NCBI GI NO: 33146544 NR Description: amelogenin precursor-like protein
  misc_feature (36)..(207): NCBI GI NO: 34913194 NR Description: contains EST C74688
  misc_feature (1)..(45): NCBI GI NO: 34913194 NR Description: contains EST C74688
  misc_feature (1)..(204): NCBI GI NO: 34391901 NR Description: putative transcription factor bHLH
  misc_feature (1)..(181): NCBI GI NO: 15228207 NR Description: hypothetical protein; protein id: At3g47640
  misc_feature (1)..(135): NCBI GI NO: 15230975 NR Description: bHLH protein; protein id: At3g19860
  misc_feature (1)..(135): NCBI GI NO: 11994197 NR Description: emb|CAA18500
  misc_feature (1)..(105): NCBI GI NO: 7487183 NR Description: hypothetical protein T19K4
  misc_feature (1)..(75): NCBI GI NO: 30690568 NR Description: bHLH protein family [Arabidopsis thaliana]
MLEADRQNNGKACILTDTTRILRDLLVQVDSLRKEHSDLQNESHYVTMERDEMQDENGVLRKEISELQNELTMRVSGSPAGWGHGTARSDPPLPHSTAVFSSEQAMQPPTIASVVFPLQQPLAPSAMTKPPHAAPPLELKLFPEVAFAEGHEPCEDHKAPNHVARPQARYPTQSASWPVNLFSGLPRMEDEQCSSSTSGSSREDNTDIE

SEQ ID NO: 32878 - DNA, 1762 bp, Zea mays subsp. mays
  misc_feature (1)..(1762): Ceres Seq. ID no. 12411934
actgacaaaaccctggctcgttccccgctctacaggcctaaacctcacctcgccggcggccaaaaatcgaagcaccgaaccagcggctgcggcagcggcggcggcgcggcaagggttgaccatggcggagctaaagcggttgtcggagagccgtgacctgacgcggattgagcgcatcggtgcgcactcccacatccgggggctagggttggactcgtccatggaggcgcgcgatacctcggagggcatggtcgggcagctccacgcgcgccgcgcctcggggctcatactccagctcatccgccagggcaagattgccggccgcgctgtgctccttgcgggccagcccggcaccggcaagaccgcgctcgccatgggtatcgccaagtcgcttggtgcggagacacccttcgcctccgtcgctgcctcggagctcttctcgctcgacctctccaagacggaggctctgacgcaggccttccgccgcgccataggcgtccgcatcaaggaggaggccgagatcattgagggcgaggtcgtggagatctcaatcgaccgccctttgtcggcctctggcgttggcggcagctcagttgctccttctggtgcaactgctgctggtaagtcagggcggctcacgctgaagaccacggacatggagactgtgtacgagctcgggggaaagatgattgaggctcttgggaaggagaaggtgcagagtggagatgtgattgcgcttgacaaggcctccgggaaggtcaccaagcttggccgctccattgggaggtcgcgggattatgatgccgtaggtccacacaccaagtttgtcaagtgtcctgatggtgagctccagaagcgcaaggaggtcgtgcactgtgtcaccttacatgagattgatgtcatcaatagcaggacacagggttttcttgcactgttcactggtgacactggtgaaattcgtgcagaggttcgggagcagattgacacaaaggttgcagagtggagagaggaaggaaaagctgatattgtccctggtgttctgttcatcgatgaagtccacatgctagacatcgagtgcttctccttcctcaaccgcgcattggaaaacgacatggcgccgatcttagtaatcgcaacaaaccgagggatcacgtctatccgtgggacaaactaccgctcgccgcatgggatcccgccagacttccttgaccggctactgattatcacgacgcatccctacacggaggatgagatccggaagatcctggatatccggtgcgacgaggaagacgtggagatgtccgcggacgctaaggttctgctcaccaagatcggtgtggagacctctctgcggtatgccatcaaccttatcacatctgccgcgctagcctgccagaggcgcaaggggaaggtggtcgagatggaggacattagccgggtgtaccagctgttcctggacgtgaagcgatcgacgcagtacctgatggagtaccagagccagtacatgttcaacgaagtgccggggcaagcagatggagaggacgccatgcaatcgtagatgaactttcctttacatggtgtgtgtgggttatagtatgtaccgcgtggcgtatatttatgatgcgtctttcttgttcaggttgctgttaccctgacccaaggcgcggtgtgtgcggtggactgtttgttagcttgatgtaggtgactatgcaactcaatctatcttattaaattcaccccggttggaaaccgtggtttgttt

SEQ ID NO: 32879 - protein, 518 aa, Zea mays subsp. mays
  peptide (1)..(518): Ceres Seq. ID no. 12411935
  misc_feature (161)..(487): Pfam Name: Pfam Description:  TIP49 C-terminus
  misc_feature (41)..(517): NCBI GI NO: 15240788 NR Description: RuvB DNA helicase-like protein
  misc_feature (41)..(507): NCBI GI NO: 15229623 NR Description: RuvB DNA helicase - like protein
  misc_feature (40)..(506): NCBI GI NO: 30316328 NR Description: RuvB-like 2 (Reptin)
  misc_feature (40)..(506): NCBI GI NO: 29126859 NR Description: Similar to RuvB-like protein 2 [Xenopus laevis]
  misc_feature (40)..(509): NCBI GI NO: 6755382 NR Description: RuvB-like protein 2 [Mus musculus]
  misc_feature (40)..(509): NCBI GI NO: 5730023 NR Description: RuvB-like 2
  misc_feature (46)..(505): NCBI GI NO: 27819634 NR Description: RuvB-like protein 2 [Danio rerio]
  misc_feature (41)..(515): NCBI GI NO: 17737635 NR Description: reptin CG9750-PA
  misc_feature (40)..(451): NCBI GI NO: 4929561 NR Description: CGI-46 protein [Homo sapiens]
  misc_feature (46)..(507): NCBI GI NO: 23480914 NR Description: Arabidopsis thaliana At5g67630/K9I9_20
LTKPWLVPRSTGLNLTSPAAKNRSTEPAAAAAAAARQGLTMAELKRLSESRDLTRIERIGAHSHIRGLGLDSSMEARDTSEGMVGQLHARRASGLILQLIRQGKIAGRAVLLAGQPGTGKTALAMGIAKSLGAETPFASVAASELFSLDLSKTEALTQAFRRAIGVRIKEEAEIIEGEVVEISIDRPLSASGVGGSSVAPSGATAAGKSGRLTLKTTDMETVYELGGKMIEALGKEKVQSGDVIALDKASGKVTKLGRSIGRSRDYDAVGPHTKFVKCPDGELQKRKEVVHCVTLHEIDVINSRTQGFLALFTGDTGEIRAEVREQIDTKVAEWREEGKADIVPGVLFIDEVHMLDIECFSFLNRALENDMAPILVIATNRGITSIRGTNYRSPHGIPPDFLDRLLIITTHPYTEDEIRKILDIRCDEEDVEMSADAKVLLTKIGVETSLRYAINLITSAALACQRRKGKVVEMEDISRVYQLFLDVKRSTQYLMEYQSQYMFNEVPGQADGEDAMQS

SEQ ID NO: 32880 - protein, 478 aa, Zea mays subsp. mays
  peptide (1)..(478): Ceres Seq. ID no. 12411936
  misc_feature (121)..(447): Pfam Name: Pfam Description:  TIP49 C-terminus
  misc_feature (1)..(477): NCBI GI NO: 15240788 NR Description: RuvB DNA helicase-like protein
  misc_feature (1)..(467): NCBI GI NO: 15229623 NR Description: RuvB DNA helicase - like protein
  misc_feature (1)..(466): NCBI GI NO: 30316328 NR Description: RuvB-like 2 (Reptin)
  misc_feature (1)..(466): NCBI GI NO: 29126859 NR Description: Similar to RuvB-like protein 2 [Xenopus laevis]
  misc_feature (1)..(469): NCBI GI NO: 6755382 NR Description: RuvB-like protein 2 [Mus musculus]
  misc_feature (1)..(469): NCBI GI NO: 5730023 NR Description: RuvB-like 2
  misc_feature (6)..(465): NCBI GI NO: 27819634 NR Description: RuvB-like protein 2 [Danio rerio]
  misc_feature (1)..(475): NCBI GI NO: 17737635 NR Description: reptin CG9750-PA
  misc_feature (1)..(411): NCBI GI NO: 4929561 NR Description: CGI-46 protein [Homo sapiens]
  misc_feature (6)..(467): NCBI GI NO: 23480914 NR Description: Arabidopsis thaliana At5g67630/K9I9_20
MAELKRLSESRDLTRIERIGAHSHIRGLGLDSSMEARDTSEGMVGQLHARRASGLILQLIRQGKIAGRAVLLAGQPGTGKTALAMGIAKSLGAETPFASVAASELFSLDLSKTEALTQAFRRAIGVRIKEEAEIIEGEVVEISIDRPLSASGVGGSSVAPSGATAAGKSGRLTLKTTDMETVYELGGKMIEALGKEKVQSGDVIALDKASGKVTKLGRSIGRSRDYDAVGPHTKFVKCPDGELQKRKEVVHCVTLHEIDVINSRTQGFLALFTGDTGEIRAEVREQIDTKVAEWREEGKADIVPGVLFIDEVHMLDIECFSFLNRALENDMAPILVIATNRGITSIRGTNYRSPHGIPPDFLDRLLIITTHPYTEDEIRKILDIRCDEEDVEMSADAKVLLTKIGVETSLRYAINLITSAALACQRRKGKVVEMEDISRVYQLFLDVKRSTQYLMEYQSQYMFNEVPGQADGEDAMQS

SEQ ID NO: 32881 - protein, 445 aa, Zea mays subsp. mays
  peptide (1)..(445): Ceres Seq. ID no. 12411937
  misc_feature (88)..(414): Pfam Name: Pfam Description:  TIP49 C-terminus
  misc_feature (1)..(444): NCBI GI NO: 15240788 NR Description: RuvB DNA helicase-like protein
  misc_feature (1)..(434): NCBI GI NO: 15229623 NR Description: RuvB DNA helicase - like protein
  misc_feature (1)..(433): NCBI GI NO: 30316328 NR Description: RuvB-like 2 (Reptin)
  misc_feature (1)..(433): NCBI GI NO: 29126859 NR Description: Similar to RuvB-like protein 2 [Xenopus laevis]
  misc_feature (1)..(436): NCBI GI NO: 6755382 NR Description: RuvB-like protein 2 [Mus musculus]
  misc_feature (1)..(436): NCBI GI NO: 5730023 NR Description: RuvB-like 2
  misc_feature (1)..(432): NCBI GI NO: 27819634 NR Description: RuvB-like protein 2 [Danio rerio]
  misc_feature (1)..(442): NCBI GI NO: 17737635 NR Description: reptin CG9750-PA
  misc_feature (1)..(378): NCBI GI NO: 4929561 NR Description: CGI-46 protein [Homo sapiens]
  misc_feature (1)..(434): NCBI GI NO: 23480914 NR Description: Arabidopsis thaliana At5g67630/K9I9_20
MEARDTSEGMVGQLHARRASGLILQLIRQGKIAGRAVLLAGQPGTGKTALAMGIAKSLGAETPFASVAASELFSLDLSKTEALTQAFRRAIGVRIKEEAEIIEGEVVEISIDRPLSASGVGGSSVAPSGATAAGKSGRLTLKTTDMETVYELGGKMIEALGKEKVQSGDVIALDKASGKVTKLGRSIGRSRDYDAVGPHTKFVKCPDGELQKRKEVVHCVTLHEIDVINSRTQGFLALFTGDTGEIRAEVREQIDTKVAEWREEGKADIVPGVLFIDEVHMLDIECFSFLNRALENDMAPILVIATNRGITSIRGTNYRSPHGIPPDFLDRLLIITTHPYTEDEIRKILDIRCDEEDVEMSADAKVLLTKIGVETSLRYAINLITSAALACQRRKGKVVEMEDISRVYQLFLDVKRSTQYLMEYQSQYMFNEVPGQADGEDAMQS

SEQ ID NO: 32882 - DNA, 1072 bp, Zea mays subsp. mays; identical to SEQ ID NO: 32212
  misc_feature (1)..(1072): Ceres Seq. ID no. 12340576

SEQ ID NO: 32883 - protein, 237 aa, Zea mays subsp. mays; identical to SEQ ID NO: 32213
  peptide (1)..(237): Ceres Seq. ID no. 12340577
  misc_feature (92)..(162): Pfam Name: Pfam Description:  linker histone H1 and H5 family
  misc_feature (44)..(225): NCBI GI NO: 121950 NR Description: HISTONE H1
  misc_feature (44)..(233): NCBI GI NO: 34897182 NR Description: histone-like protein
  misc_feature (44)..(237): NCBI GI NO: 11558848 NR Description: histone H1 [Triticum aestivum]
  misc_feature (44)..(237): NCBI GI NO: 5230781 NR Description: histone H1 WH1A.1 [Triticum aestivum]
  misc_feature (44)..(237): NCBI GI NO: 5230785 NR Description: histone H1 WH1B.1 [Triticum aestivum]
  misc_feature (44)..(237): NCBI GI NO: 5230790 NR Description: histone H1 WH1A.4 [Triticum aestivum]
  misc_feature (44)..(237): NCBI GI NO: 5230783 NR Description: histone H1 WH1A.2 [Triticum aestivum]
  misc_feature (44)..(237): NCBI GI NO: 14916992 NR Description: HISTONE H1
  misc_feature (52)..(237): NCBI GI NO: 5230788 NR Description: histone H1 WH1A.3 [Triticum aestivum]
  misc_feature (44)..(237): NCBI GI NO: 283024 NR Description: histone H1 - wheat

SEQ ID NO: 32884 - protein, 194 aa, Zea mays subsp. mays; identical to SEQ ID NO: 32214
  peptide (1)..(194): Ceres Seq. ID no. 12340578
  misc_feature (49)..(119): Pfam Name: Pfam Description:  linker histone H1 and H5 family
  misc_feature (1)..(182): NCBI GI NO: 121950 NR Description: HISTONE H1
  misc_feature (1)..(190): NCBI GI NO: 34897182 NR Description: histone-like protein
  misc_feature (1)..(194): NCBI GI NO: 11558848 NR Description: histone H1 [Triticum aestivum]
  misc_feature (1)..(194): NCBI GI NO: 5230781 NR Description: histone H1 WH1A.1 [Triticum aestivum]
  misc_feature (1)..(194): NCBI GI NO: 5230785 NR Description: histone H1 WH1B.1 [Triticum aestivum]
  misc_feature (1)..(194): NCBI GI NO: 5230790 NR Description: histone H1 WH1A.4 [Triticum aestivum]
  misc_feature (1)..(194): NCBI GI NO: 5230783 NR Description: histone H1 WH1A.2 [Triticum aestivum]
  misc_feature (1)..(194): NCBI GI NO: 14916992 NR Description: HISTONE H1
  misc_feature (9)..(194): NCBI GI NO: 5230788 NR Description: histone H1 WH1A.3 [Triticum aestivum]
  misc_feature (1)..(194): NCBI GI NO: 283024 NR Description: histone H1 - wheat

SEQ ID NO: 32885 - protein, 139 aa, Zea mays subsp. mays; identical to SEQ ID NO: 32215
  peptide (1)..(139): Ceres Seq. ID no. 12340579
  misc_feature (1)..(64): Pfam Name: Pfam Description:  linker histone H1 and H5 family
  misc_feature (1)..(127): NCBI GI NO: 121950 NR Description: HISTONE H1
  misc_feature (1)..(135): NCBI GI NO: 34897182 NR Description: histone-like protein
  misc_feature (1)..(139): NCBI GI NO: 11558848 NR Description: histone H1 [Triticum aestivum]
  misc_feature (1)..(139): NCBI GI NO: 5230781 NR Description: histone H1 WH1A.1 [Triticum aestivum]
  misc_feature (1)..(139): NCBI GI NO: 5230785 NR Description: histone H1 WH1B.1 [Triticum aestivum]
  misc_feature (1)..(139): NCBI GI NO: 5230790 NR Description: histone H1 WH1A.4 [Triticum aestivum]
  misc_feature (1)..(139): NCBI GI NO: 5230783 NR Description: histone H1 WH1A.2 [Triticum aestivum]
  misc_feature (1)..(139): NCBI GI NO: 14916992 NR Description: HISTONE H1
  misc_feature (1)..(139): NCBI GI NO: 5230788 NR Description: histone H1 WH1A.3 [Triticum aestivum]
  misc_feature (1)..(139): NCBI GI NO: 283024 NR Description: histone H1 - wheat

SEQ ID NO: 32886 - DNA, 600 bp, Zea mays subsp. mays
  misc_feature (1)..(600): Ceres Seq. ID no. 12594988
ctaatcgaaaaacctcagcactagtctcctcttcgcacgagcgcaacaccatccacccaccagttcgaagcggaggcgaccggcaacctgcggcggagatgtcaggcaggggcaagggcggcaaggggctcgggaagggcggcgcgaagcgtcaccggaaggtgctgcgcgacaacatccaggggatcacgaagccggcgatccggaggccgaggaggggtggcgtgaagcgcatctccgggctgatctacgaggagacccgcggcgtgctcaagatctttctcgagaatgtcatccgcgacgctgtgacctacacggagcacgcccgtcgcaaaaccgtcaccgctatggacgtcgtgtacgccctcaaacgccagggccgcactctctatggcttcggcggctaggttaggtgtgggtaattgcctgtccaggtgtctcggatctgtggtactagtttggctgccttcctgtgttcgtattgtagtagttgtggtagctggttgctttgtcgtcctgtagtcgtgcttctttgggtctgtaagaaccgctggttcgatgggattggattggacggtgaagtaggaatgttggcatgct

SEQ ID NO: 32887 - protein, 134 aa, Zea mays subsp. mays
  peptide (1)..(134): Ceres Seq. ID no. 12594989
  misc_feature (33)..(134): NCBI GI NO: 15226944 NR Description: histone H4; protein id: At2g28740
  misc_feature (33)..(134): NCBI GI NO: 462243 NR Description: Histone H4
  misc_feature (33)..(134): NCBI GI NO: 1806283 NR Description: Histone H4 homologue [Sesbania rostrata]
  misc_feature (28)..(134): NCBI GI NO: 34858262 NR Description: similar to germinal histone H4 gene
  misc_feature (32)..(134): NCBI GI NO: 34876368 NR Description: similar to germinal histone H4 gene
  misc_feature (33)..(134): NCBI GI NO: 4504301 NR Description: H4 histone family, member A [Homo sapiens]
  misc_feature (33)..(134): NCBI GI NO: 27692935 NR Description: Similar to germinal histone H4 gene [Mus musculus]
  misc_feature (33)..(134): NCBI GI NO: 27692960 NR Description: Similar to germinal histone H4 gene [Mus musculus]
  misc_feature (33)..(134): NCBI GI NO: 37590121 NR Description: Hist1h4h protein [Mus musculus]
  misc_feature (33)..(134): NCBI GI NO: 462242 NR Description: Histone H4
NRKTSALVSSSHERNTIHPPVRSGGDRQPAAEMSGRGKGGKGLGKGGAKRHRKVLRDNIQGITKPAIRRPRRGGVKRISGLIYEETRGVLKIFLENVIRDAVTYTEHARRKTVTAMDVVYALKRQGRTLYGFGG

SEQ ID NO: 32888 - protein, 102 aa, Zea mays subsp. mays
  peptide (1)..(102): Ceres Seq. ID no. 12594990
  misc_feature (1)..(102): NCBI GI NO: 15226944 NR Description: histone H4; protein id: At2g28740
  misc_feature (1)..(102): NCBI GI NO: 462243 NR Description: Histone H4
  misc_feature (1)..(102): NCBI GI NO: 1806283 NR Description: Histone H4 homologue [Sesbania rostrata]
  misc_feature (1)..(102): NCBI GI NO: 34858262 NR Description: similar to germinal histone H4 gene
  misc_feature (1)..(102): NCBI GI NO: 34876368 NR Description: similar to germinal histone H4 gene
  misc_feature (1)..(102): NCBI GI NO: 4504301 NR Description: H4 histone family, member A [Homo sapiens]
  misc_feature (1)..(102): NCBI GI NO: 27692935 NR Description: Similar to germinal histone H4 gene [Mus musculus]
  misc_feature (1)..(102): NCBI GI NO: 27692960 NR Description: Similar to germinal histone H4 gene [Mus musculus]
  misc_feature (1)..(102): NCBI GI NO: 37590121 NR Description: Hist1h4h protein [Mus musculus]
  misc_feature (1)..(102): NCBI GI NO: 462242 NR Description: Histone H4
MSGRGKGGKGLGKGGAKRHRKVLRDNIQGITKPAIRRPRRGGVKRISGLIYEETRGVLKIFLENVIRDAVTYTEHARRKTVTAMDVVYALKRQGRTLYGFGG

SEQ ID NO: 32889 - DNA, 886 bp, Zea mays subsp. mays
  misc_feature (1)..(886): Ceres Seq. ID no. 12413697
ataaataacttatgaggccaaactaaagagggcagggcaggcgaatcgaaggaaaagtagtcaggagaggcgtttccctcgcaatcgaccatcacagatcaaatcgctgcaactagctagggtttcgtcgcctcatctctcgtcgatccatcgatggcgtccgagggcgaaaacaagaggatgatcacgctcaggagctccgacttagaggagttcgaggtggaggaagcggtggccatggagtcgcagactctccgccacatgatcgaggacgactgcgccgacaacggcatcccgctccccaacgtcaactccaggatcctctctaaggtcatcgagtactgcaacagtcacgtccacgccgccgccaaacccgctgactccgctgcctccgagggcggcgaggacctcaagagctgggacgcgaagttcgtcaaggtggaccaggctacgctcttcgacctcatcctggctgccaactatctgaacatcaagggattgctggacctgacctgccagacggttgctgacatgatcaagggcaagactccggaggagatccgcaagacattcagcatcaagaacgacttcacccaagaggaggaggatgagatccgcatggagaaccagtgggccttcgagtgattgttgtcttcctttccctggtgatggtggtggttcttttacaagaacagatggatgtctgcactgcactctacaatgctagtctatctacttacgaaatagtagtgaaatagtagtataatggtcgtgatggttgtatccttttttggattggatgtatgtcaagctggtgggtgctagttcgtctgtctggacttgttactagttaatatctcataatacatatataaaagtggatctt

SEQ ID NO: 32890 - protein, 163 aa, Zea mays subsp. mays
  peptide (1)..(163): Ceres Seq. ID no. 12413698
  misc_feature (86)..(163): Pfam Name: Pfam Description:  Skp1 family, dimerisation domain
  misc_feature (1)..(163): NCBI GI NO: 40644754 NR Description: putative SKP1 protein [Triticum aestivum]
  misc_feature (1)..(163): NCBI GI NO: 7378764 NR Description: putative kinetochore protein
  misc_feature (9)..(163): NCBI GI NO: 3719211 NR Description: UIP2 [Arabidopsis thaliana]
  misc_feature (9)..(163): NCBI GI NO: 18422184 NR Description: E3 ubiquitin ligase SCF complex subunit, SKP1/ASK1
  misc_feature (9)..(163): NCBI GI NO: 4959710 NR Description: Skp1 [Medicago sativa]
  misc_feature (9)..(163): NCBI GI NO: 18410982 NR Description: E3 ubiquitin ligase SCF complex subunit, SKP1/ASK1
  misc_feature (2)..(163): NCBI GI NO: 7489300 NR Description: fimbriata-associated protein 2 - garden snapdragon
  misc_feature (9)..(163): NCBI GI NO: 7489299 NR Description: fimbriata-associated protein - garden snapdragon
  misc_feature (9)..(163): NCBI GI NO: 3551838 NR Description: SKP1-like protein [Nicotiana clevelandii]
  misc_feature (9)..(163): NCBI GI NO: 18958257 NR Description: kinetochore protein [Brassica juncea]
MASEGENKRMITLRSSDLEEFEVEEAVAMESQTLRHMIEDDCADNGIPLPNVNSRILSKVIEYCNSHVHAAAKPADSAASEGGEDLKSWDAKFVKVDQATLFDLILAANYLNIKGLLDLTCQTVADMIKGKTPEEIRKTFSIKNDFTQEEEDEIRMENQWAFE

SEQ ID NO: 32891 - protein, 154 aa, Zea mays subsp. mays
  peptide (1)..(154): Ceres Seq. ID no. 12413699
  misc_feature (77)..(154): Pfam Name: Pfam Description:  Skp1 family, dimerisation domain
  misc_feature (1)..(154): NCBI GI NO: 40644754 NR Description: putative SKP1 protein [Triticum aestivum]
  misc_feature (1)..(154): NCBI GI NO: 7378764 NR Description: putative kinetochore protein
  misc_feature (1)..(154): NCBI GI NO: 3719211 NR Description: UIP2 [Arabidopsis thaliana]
  misc_feature (1)..(154): NCBI GI NO: 18422184 NR Description: E3 ubiquitin ligase SCF complex subunit, SKP1/ASK1
  misc_feature (1)..(154): NCBI GI NO: 4959710 NR Description: Skp1 [Medicago sativa]
  misc_feature (1)..(154): NCBI GI NO: 18410982 NR Description: E3 ubiquitin ligase SCF complex subunit, SKP1/ASK1
  misc_feature (1)..(154): NCBI GI NO: 7489300 NR Description: fimbriata-associated protein 2 - garden snapdragon
  misc_feature (1)..(154): NCBI GI NO: 7489299 NR Description: fimbriata-associated protein - garden snapdragon
  misc_feature (1)..(154): NCBI GI NO: 3551838 NR Description: SKP1-like protein [Nicotiana clevelandii]
  misc_feature (1)..(154): NCBI GI NO: 18958257 NR Description: kinetochore protein [Brassica juncea]
MITLRSSDLEEFEVEEAVAMESQTLRHMIEDDCADNGIPLPNVNSRILSKVIEYCNSHVHAAAKPADSAASEGGEDLKSWDAKFVKVDQATLFDLILAANYLNIKGLLDLTCQTVADMIKGKTPEEIRKTFSIKNDFTQEEEDEIRMENQWAFE

SEQ ID NO: 32892 - protein, 135 aa, Zea mays subsp. mays
  peptide (1)..(135): Ceres Seq. ID no. 12413700
  misc_feature (58)..(135): Pfam Name: Pfam Description:  Skp1 family, dimerisation domain
  misc_feature (1)..(135): NCBI GI NO: 40644754 NR Description: putative SKP1 protein [Triticum aestivum]
  misc_feature (1)..(135): NCBI GI NO: 7378764 NR Description: putative kinetochore protein
  misc_feature (1)..(135): NCBI GI NO: 3719211 NR Description: UIP2 [Arabidopsis thaliana]
  misc_feature (1)..(135): NCBI GI NO: 18422184 NR Description: E3 ubiquitin ligase SCF complex subunit, SKP1/ASK1
  misc_feature (1)..(135): NCBI GI NO: 4959710 NR Description: Skp1 [Medicago sativa]
  misc_feature (1)..(135): NCBI GI NO: 18410982 NR Description: E3 ubiquitin ligase SCF complex subunit, SKP1/ASK1
  misc_feature (1)..(135): NCBI GI NO: 7489300 NR Description: fimbriata-associated protein 2 - garden snapdragon
  misc_feature (1)..(135): NCBI GI NO: 7489299 NR Description: fimbriata-associated protein - garden snapdragon
  misc_feature (1)..(135): NCBI GI NO: 3551838 NR Description: SKP1-like protein [Nicotiana clevelandii]
  misc_feature (1)..(135): NCBI GI NO: 18958257 NR Description: kinetochore protein [Brassica juncea]
MESQTLRHMIEDDCADNGIPLPNVNSRILSKVIEYCNSHVHAAAKPADSAASEGGEDLKSWDAKFVKVDQATLFDLILAANYLNIKGLLDLTCQTVADMIKGKTPEEIRKTFSIKNDFTQEEEDEIRMENQWAFE

SEQ ID NO: 32893 - DNA, 1103 bp, Zea mays subsp. mays
  misc_feature (1)..(1103): Ceres Seq. ID no. 12345090
atgcatactctatcaactaacattgcgctgcattgcattgcaggccccgccgtctccgtggggcgacctggaggaggtgctggcgcgcgcggcgaccaaggaccgcacggtgatcatgacgcagatcaacgcggcgtggacgcgcccgggctcgctgctggacctcttcttcgagagcttccgcacgggggaaggcggcgtggcgcgcctcctggaccacctggtcatcgtcaccatggacccggccgcctacgagggctgcagggccgtgcacagccactgctacttcctccgcacgggcaacgccgtcgactaccgatcagagaaggtgttcatgagcaaggactacctggagatgatgtggggacgcaaccgcttccagcagacggtgctggagctgggatacaacttcctattcacggacgttgacgtgatgtggttccgcgacccgttccgccacatctccatggcggcggacatcgccatctccagcgacgtgtacatgggcgacccctacagcctgcgcaacttccccaacggcggcttcctcttcgtgcgggcgtcggacaagacggtcgccttctaccgggcgtggcagcaggggcggtggcgcttcctggggaagcacgagcaggacgtgttcaacctcatcaagcacgaggaggcgcccaggctggacctcgccatccagttcctcgacacagcctacatcagcggcttctgccagctcagcaaggacctcaacaggatctgcacgctccacgccaactgctgcgtcggcctcggcgccaagctccacgacctccgcggggtcctcgacgtctggaggaactacaccgccggcacacccgaggagcgacgcgcgggaaagttccagtggaagctaccgggcatctgcatccactgatatccattctttctcagccggcctctcgcctccttggtagtaaaagatccattcttttgattccatcatcaacaaattaaaggttatatatatactagtaacagatagttagaatttcatagctataagtatacagtagcagtatatgtttgtaatatatctgcacctgcaaatcaatttcattgtcggtaacccc

SEQ ID NO: 32894 - protein, 301 aa, Zea mays subsp. mays
  peptide (1)..(301): Ceres Seq. ID no. 12345091
  misc_feature (15)..(301): NCBI GI NO: 34897442 NR Description: putative regulatory protein
  misc_feature (22)..(301): NCBI GI NO: 19386737 NR Description: P0678F11.26
  misc_feature (15)..(301): NCBI GI NO: 34904674 NR Description: P0446G09.1
  misc_feature (23)..(301): NCBI GI NO: 34897440 NR Description: putative regulatory protein
  misc_feature (18)..(290): NCBI GI NO: 19386738 NR Description: P0678F11.28
  misc_feature (23)..(299): NCBI GI NO: 18395292 NR Description: unknown protein; protein id: At2g02060.1
  misc_feature (23)..(299): NCBI GI NO: 15223826 NR Description: hypothetical protein common family
  misc_feature (23)..(299): NCBI GI NO: 19386741 NR Description: P0678F11.31
  misc_feature (25)..(299): NCBI GI NO: 15235236 NR Description: hypothetical protein common family
  misc_feature (23)..(299): NCBI GI NO: 38344278 NR Description: OSJNBa0013K16.10
CILYQLTLRCIALQAPPSPWGDLEEVLARAATKDRTVIMTQINAAWTRPGSLLDLFFESFRTGEGGVARLLDHLVIVTMDPAAYEGCRAVHSHCYFLRTGNAVDYRSEKVFMSKDYLEMMWGRNRFQQTVLELGYNFLFTDVDVMWFRDPFRHISMAADIAISSDVYMGDPYSLRNFPNGGFLFVRASDKTVAFYRAWQQGRWRFLGKHEQDVFNLIKHEEAPRLDLAIQFLDTAYISGFCQLSKDLNRICTLHANCCVGLGAKLHDLRGVLDVWRNYTAGTPEERRAGKFQWKLPGICIH

SEQ ID NO: 32895 - protein, 263 aa, Zea mays subsp. mays
  peptide (1)..(263): Ceres Seq. ID no. 12345092
  misc_feature (1)..(263): NCBI GI NO: 34897442 NR Description: putative regulatory protein
  misc_feature (1)..(263): NCBI GI NO: 19386737 NR Description: P0678F11.26
  misc_feature (1)..(263): NCBI GI NO: 34904674 NR Description: P0446G09.1
  misc_feature (1)..(263): NCBI GI NO: 34897440 NR Description: putative regulatory protein
  misc_feature (1)..(252): NCBI GI NO: 19386738 NR Description: P0678F11.28
  misc_feature (1)..(261): NCBI GI NO: 18395292 NR Description: unknown protein; protein id: At2g02060.1
  misc_feature (1)..(261): NCBI GI NO: 15223826 NR Description: hypothetical protein common family
  misc_feature (1)..(261): NCBI GI NO: 19386741 NR Description: P0678F11.31
  misc_feature (1)..(261): NCBI GI NO: 15235236 NR Description: hypothetical protein common family
  misc_feature (1)..(261): NCBI GI NO: 38344278 NR Description: OSJNBa0013K16.10
MTQINAAWTRPGSLLDLFFESFRTGEGGVARLLDHLVIVTMDPAAYEGCRAVHSHCYFLRTGNAVDYRSEKVFMSKDYLEMMWGRNRFQQTVLELGYNFLFTDVDVMWFRDPFRHISMAADIAISSDVYMGDPYSLRNFPNGGFLFVRASDKTVAFYRAWQQGRWRFLGKHEQDVFNLIKHEEAPRLDLAIQFLDTAYISGFCQLSKDLNRICTLHANCCVGLGAKLHDLRGVLDVWRNYTAGTPEERRAGKFQWKLPGICIH

SEQ ID NO: 32896 - protein, 223 aa, Zea mays subsp. mays
  peptide (1)..(223): Ceres Seq. ID no. 12345093
  misc_feature (1)..(223): NCBI GI NO: 34897442 NR Description: putative regulatory protein
  misc_feature (1)..(223): NCBI GI NO: 19386737 NR Description: P0678F11.26
  misc_feature (1)..(223): NCBI GI NO: 34904674 NR Description: P0446G09.1
  misc_feature (1)..(223): NCBI GI NO: 34897440 NR Description: putative regulatory protein
  misc_feature (1)..(212): NCBI GI NO: 19386738 NR Description: P0678F11.28
  misc_feature (1)..(221): NCBI GI NO: 18395292 NR Description: unknown protein; protein id: At2g02060.1
  misc_feature (1)..(221): NCBI GI NO: 15223826 NR Description: hypothetical protein common family
  misc_feature (1)..(221): NCBI GI NO: 19386741 NR Description: P0678F11.31
  misc_feature (1)..(221): NCBI GI NO: 15235236 NR Description: hypothetical protein common family
  misc_feature (1)..(221): NCBI GI NO: 38344278 NR Description: OSJNBa0013K16.10
MDPAAYEGCRAVHSHCYFLRTGNAVDYRSEKVFMSKDYLEMMWGRNRFQQTVLELGYNFLFTDVDVMWFRDPFRHISMAADIAISSDVYMGDPYSLRNFPNGGFLFVRASDKTVAFYRAWQQGRWRFLGKHEQDVFNLIKHEEAPRLDLAIQFLDTAYISGFCQLSKDLNRICTLHANCCVGLGAKLHDLRGVLDVWRNYTAGTPEERRAGKFQWKLPGICIH

SEQ ID NO: 32897 - DNA, 1714 bp, Zea mays subsp. mays
  misc_feature (1)..(1714): Ceres Seq. ID no. 12341046
aggcggccaaaccgcaccctccttcccgtcgtttcccatctcttcctcctttagagctaccactatataaatcagggctcattttctcgctcctcacaggctcatctcgctttggatcgattggtttcgtaactggtgaaggactgagggtctcggagtggatcgatttgggattctgttcgaagatttgcggaggggggcaatggcgaccgcggggaaggtgatcaagtgcaaagctgcggtggcatgggaggccggcaagccactgtcgatcgaggaggtggaggtagcgcctccgcaggccatggaggtgcgcgtcaagatcctcttcacctcgctctgccacaccgacgtctacttctgggaggccaaggggcagactcccgtgttccctcggatctttggccacgaggctggaggtatcatagagagtgttggagagggtgtgactgacgtagctccgggcgaccatgtccttcctgtgttcactggggagtgcaaggagtgtgcccactgcaagtcggcagagagcaacatgtgtgatctgctcaggatcaacaccgaccgcggtgtgatgattgccgatggcaagtcgcggttttcaatcaatgggaagcctatctaccactttgttgggacttccaccttcagcgagtacaccgtcatgcatgtgggttgtgttgcaaagatcaaccctcaggctccccttgataaagtttgcgtccttagctgtggtatttctaccggtcttggtgcatcaattaatgttgcaaaacctccgaagggttcgacagtggctgttttcggtttaggagccgttggtcttgccgctgcagaaggtgcaaggattgctggagcgtcaaggatcattggtgtcgacctgaaccccagcagattcgaagaagctaggaagttcggttgcactgaatttgtgaacccaaaagaccacaacaagccagtgcaggaggtacttgctgagatgaccaacggaggggtcgaccgcagtgtggaatgcactggcaacattaatgctatgatccaagctttcgaatgtgttcatgatggctggggtgttgctgtgctggtgggtgtgccacataaggacgctgagttcaagacccacccgatgaacttcctgaacgaaaggaccctgaaggggaccttctttggcaactataagccacgcactgatctgccaaatgtggtggagctgtacatgaaaaaggagctggaggtggagaagttcatcacgcacagcgtcccgttcgccgagatcaacaaggcgttcgacctgatggccaagggggagggcatccgctgcatcatccgcatggagaactagatttcgctgtctagtttgtgatctggcctaggcttggggttaataaaggaggcaatgctagcctgccctttcgatgaggaggtacatacacgctggcgatggaccgcgcttgtgtgtcgcgttcagtttggcttttgccaagcactagggtagcttcccgtgtcggtaattatatggtatgaaccatcaccttttggctctacacggtatgaacgtaagatacaaattccaactacctctagctcgcttgtgtggtatctgtatcagtatacatgtgtttgtttgcttatgtgtttgtttgcttgtatttgctggtgtctgtatcgcgggatgcaatgagttgttgtttggttgtgtcaaccaggctcaaat

SEQ ID NO: 32898 - protein, 379 aa, Zea mays subsp. mays
  peptide (1)..(379): Ceres Seq. ID no. 12341047
  misc_feature (1)..(379): NCBI GI NO: 22122 NR Description: alcohol dehydrogenase 1 [Zea mays]
  misc_feature (1)..(379): NCBI GI NO: 113359 NR Description: Alcohol dehydrogenase 1
  misc_feature (1)..(379): NCBI GI NO: 82669 NR Description: alcohol dehydrogenase (EC 1.1.1.1) 1 - maize
  misc_feature (1)..(379): NCBI GI NO: 168407 NR Description: alcohol dehydrogenase
  misc_feature (1)..(379): NCBI GI NO: 388053 NR Description: alcohol dehydrogenase
  misc_feature (1)..(379): NCBI GI NO: 3420019 NR Description: putative alcohol dehydrogenase 1 [Sorghum bicolor]
  misc_feature (1)..(379): NCBI GI NO: 113362 NR Description: Alcohol dehydrogenase 1 (ADH slow-allele)
  misc_feature (1)..(379): NCBI GI NO: 13872817 NR Description: alcohol dehydrogenase [Pennisetum glaucum]
  misc_feature (1)..(379): NCBI GI NO: 13872815 NR Description: alcohol dehydrogenase [Pennisetum glaucum]
  misc_feature (1)..(379): NCBI GI NO: 6979321 NR Description: alcohol dehydrogenase 1 [Oryza sativa]
MATAGKVIKCKAAVAWEAGKPLSIEEVEVAPPQAMEVRVKILFTSLCHTDVYFWEAKGQTPVFPRIFGHEAGGIIESVGEGVTDVAPGDHVLPVFTGECKECAHCKSAESNMCDLLRINTDRGVMIADGKSRFSINGKPIYHFVGTSTFSEYTVMHVGCVAKINPQAPLDKVCVLSCGISTGLGASINVAKPPKGSTVAVFGLGAVGLAAAEGARIAGASRIIGVDLNPSRFEEARKFGCTEFVNPKDHNKPVQEVLAEMTNGGVDRSVECTGNINAMIQAFECVHDGWGVAVLVGVPHKDAEFKTHPMNFLNERTLKGTFFGNYKPRTDLPNVVELYMKKELEVEKFITHSVPFAEINKAFDLMAKGEGIRCIIRMEN

SEQ ID NO: 32899 - protein, 345 aa, Zea mays subsp. mays
  peptide (1)..(345): Ceres Seq. ID no. 12341048
  misc_feature (1)..(345): NCBI GI NO: 22122 NR Description: alcohol dehydrogenase 1 [Zea mays]
  misc_feature (1)..(345): NCBI GI NO: 113359 NR Description: Alcohol dehydrogenase 1
  misc_feature (1)..(345): NCBI GI NO: 82669 NR Description: alcohol dehydrogenase (EC 1.1.1.1) 1 - maize
  misc_feature (1)..(345): NCBI GI NO: 168407 NR Description: alcohol dehydrogenase
  misc_feature (1)..(345): NCBI GI NO: 388053 NR Description: alcohol dehydrogenase
  misc_feature (1)..(345): NCBI GI NO: 3420019 NR Description: putative alcohol dehydrogenase 1 [Sorghum bicolor]
  misc_feature (1)..(345): NCBI GI NO: 113362 NR Description: Alcohol dehydrogenase 1 (ADH slow-allele)
  misc_feature (1)..(345): NCBI GI NO: 13872817 NR Description: alcohol dehydrogenase [Pennisetum glaucum]
  misc_feature (1)..(345): NCBI GI NO: 13872815 NR Description: alcohol dehydrogenase [Pennisetum glaucum]
  misc_feature (1)..(345): NCBI GI NO: 6979321 NR Description: alcohol dehydrogenase 1 [Oryza sativa]
MEVRVKILFTSLCHTDVYFWEAKGQTPVFPRIFGHEAGGIIESVGEGVTDVAPGDHVLPVFTGECKECAHCKSAESNMCDLLRINTDRGVMIADGKSRFSINGKPIYHFVGTSTFSEYTVMHVGCVAKINPQAPLDKVCVLSCGISTGLGASINVAKPPKGSTVAVFGLGAVGLAAAEGARIAGASRIIGVDLNPSRFEEARKFGCTEFVNPKDHNKPVQEVLAEMTNGGVDRSVECTGNINAMIQAFECVHDGWGVAVLVGVPHKDAEFKTHPMNFLNERTLKGTFFGNYKPRTDLPNVVELYMKKELEVEKFITHSVPFAEINKAFDLMAKGEGIRCIIRMEN

SEQ ID NO: 32900 - protein, 268 aa, Zea mays subsp. mays
  peptide (1)..(268): Ceres Seq. ID no. 12341049
  misc_feature (1)..(268): NCBI GI NO: 22122 NR Description: alcohol dehydrogenase 1 [Zea mays]
  misc_feature (1)..(268): NCBI GI NO: 113359 NR Description: Alcohol dehydrogenase 1
  misc_feature (1)..(268): NCBI GI NO: 82669 NR Description: alcohol dehydrogenase (EC 1.1.1.1) 1 - maize
  misc_feature (1)..(268): NCBI GI NO: 168407 NR Description: alcohol dehydrogenase
  misc_feature (1)..(268): NCBI GI NO: 388053 NR Description: alcohol dehydrogenase
  misc_feature (1)..(268): NCBI GI NO: 3420019 NR Description: putative alcohol dehydrogenase 1 [Sorghum bicolor]
  misc_feature (1)..(268): NCBI GI NO: 113362 NR Description: Alcohol dehydrogenase 1 (ADH slow-allele)
  misc_feature (1)..(268): NCBI GI NO: 13872817 NR Description: alcohol dehydrogenase [Pennisetum glaucum]
  misc_feature (1)..(268): NCBI GI NO: 13872815 NR Description: alcohol dehydrogenase [Pennisetum glaucum]
  misc_feature (1)..(268): NCBI GI NO: 6979321 NR Description: alcohol dehydrogenase 1 [Oryza sativa]
MCDLLRINTDRGVMIADGKSRFSINGKPIYHFVGTSTFSEYTVMHVGCVAKINPQAPLDKVCVLSCGISTGLGASINVAKPPKGSTVAVFGLGAVGLAAAEGARIAGASRIIGVDLNPSRFEEARKFGCTEFVNPKDHNKPVQEVLAEMTNGGVDRSVECTGNINAMIQAFECVHDGWGVAVLVGVPHKDAEFKTHPMNFLNERTLKGTFFGNYKPRTDLPNVVELYMKKELEVEKFITHSVPFAEINKAFDLMAKGEGIRCIIRMEN

SEQ ID NO: 32901 - DNA, 1661 bp, Zea mays subsp. mays
  misc_feature (1)..(1661): Ceres Seq. ID no. 12342131
aacgagcgccaccgccttgatcccgcccgctcctccccagatctcctcgccattgccgccgccctgccaggattcgcgccctactcgcccagatccgaccgcggctctgattttccaactgacgcaggagcggtgggtctgaccgggcgcgacccgtcttctcatgggcgagacagcgtgatccctgcggctcgattgtaaattcgtgatctttcggggcattccttggtttgtctgtcggtgctggtggtgctgcgtttggagggccgcggagatgggcgtcggcggggagaagttccagctggggacggtgggggcgctgagcctctccgtggtgtcctctgtctccattgtcatctgcaacaaggcgctcatgagctccctcggctttaacttcgccactaccttgacgagctggcatctgctggttacattctgctcccttcatgtagcattatggatgaagttctttgagcataagccttttgattcaagaactgtcatgggatttggagtacttaacggaatctccattgggctcctcaacttgagtcttggcttcaactctgttgggttttaccagatgactaagctggcaatcatcccgtgcactgtcattttagagacacttttcttcaggaagaagttcagtcggagtatccagatgtccctttctgtgcttcttcttggtgttggtgttgcaactgtcactgatctgcaactcaatgctgtgggatccatactgtccttgctggcaattatcacgacttgcattgctcaaattatgacaaacactatccagaagaagttcaaggtctcatcaacccaactgctttaccagtcttgcccttaccaatcactgaccctgtttctcattggccccttccttgatggctttttgactaaccaaaatgtctttgcttttaattatacatctcaagttgtgtttttcatcgtcctgtcatgcttgatatctgtttcagtgaacttcagcactttccttgtgatcggaaagacatctcctgttacttaccaagtcctgggccatcttaaaacatgccttgttcttgcttttggttatgttttgcttcacgatccgtttagctggagaaacatacttggaatcctaattgctgtagttggaatggtcttgtattcatacttctgcacagtggagacccagcaaaaaaatgttgaagtctccccacaacaggtgaaagaaagcgaggcaggccctttgatcgcagactctatgagcaaagttgaaaacgggggtggtggtgttgatgacgagcctttgaaggtacccatgtggagctcaaagtactcgcgggagtgaaaaggtcacgatggcatggcaccatacaggattcaatttagtaggcagatagtagggttggaagccaacccagagtgtaatgaacatttcagttacatttttgggcttctttagtgtcgcagtctactagcagttaaaggatctgtttcttggaaggatcctaccttcagggctctcagacctaccttgaaactagacagcaggtattgtatgattgtatctcgatatgctccacatcctcttactgtaacttccaactggtacatggcgtgcctatatccaaagatagacctcattctttttgtatcaagaagatccgggt

SEQ ID NO: 32902 - protein, 354 aa, Zea mays subsp. mays
  peptide (1)..(354): Ceres Seq. ID no. 12342132
  misc_feature (1)..(353): NCBI GI NO: 13699188 NR Description: putative glucose-6-phosphate/phosphate-tranlocat or
  misc_feature (1)..(353): NCBI GI NO: 34896140 NR Description: P0701D05.25
  misc_feature (5)..(349): NCBI GI NO: 22329373 NR Description: unknown protein; protein id: At1g06890
  misc_feature (6)..(349): NCBI GI NO: 27311731 NR Description: putative integral membrane protein
  misc_feature (6)..(323): NCBI GI NO: 30683853 NR Description: transporter-related [Arabidopsis thaliana]
  misc_feature (5)..(335): NCBI GI NO: 13384378 NR Description: putative phosphate translocator
  misc_feature (104)..(349): NCBI GI NO: 25406945 NR Description: hypothetical protein
  misc_feature (104)..(335): NCBI GI NO: 37535412 NR Description: putative glucose-6-phosphate/phosphate-translocator
  misc_feature (5)..(82): NCBI GI NO: 37535412 NR Description: putative glucose-6-phosphate/phosphate-translocator
  misc_feature (6)..(311): NCBI GI NO: 18411172 NR Description: expressed protein; protein id: At1g76670
MGVGGEKFQLGTVGALSLSVVSSVSIVICNKALMSSLGFNFATTLTSWHLLVTFCSLHVALWMKFFEHKPFDSRTVMGFGVLNGISIGLLNLSLGFNSVGFYQMTKLAIIPCTVILETLFFRKKFSRSIQMSLSVLLLGVGVATVTDLQLNAVGSILSLLAIITTCIAQIMTNTIQKKFKVSSTQLLYQSCPYQSLTLFLIGPFLDGFLTNQNVFAFNYTSQVVFFIVLSCLISVSVNFSTFLVIGKTSPVTYQVLGHLKTCLVLAFGYVLLHDPFSWRNILGILIAVVGMVLYSYFCTVETQQKNVEVSPQQVKESEAGPLIADSMSKVENGGGGVDDEPLKVPMWSSKYSRE

SEQ ID NO: 32903 - protein, 321 aa, Zea mays subsp. mays
  peptide (1)..(321): Ceres Seq. ID no. 12342133
  misc_feature (1)..(320): NCBI GI NO: 13699188 NR Description: putative glucose-6-phosphate/phosphate-tranlocat or
  misc_feature (1)..(320): NCBI GI NO: 34896140 NR Description: P0701D05.25
  misc_feature (1)..(316): NCBI GI NO: 22329373 NR Description: unknown protein; protein id: At1g06890
  misc_feature (1)..(316): NCBI GI NO: 27311731 NR Description: putative integral membrane protein
  misc_feature (1)..(290): NCBI GI NO: 30683853 NR Description: transporter-related [Arabidopsis thaliana]
  misc_feature (1)..(302): NCBI GI NO: 13384378 NR Description: putative phosphate translocator
  misc_feature (71)..(316): NCBI GI NO: 25406945 NR Description: hypothetical protein
  misc_feature (71)..(302): NCBI GI NO: 37535412 NR Description: putative glucose-6-phosphate/phosphate-translocator
  misc_feature (1)..(49): NCBI GI NO: 37535412 NR Description: putative glucose-6-phosphate/phosphate-translocator
  misc_feature (1)..(278): NCBI GI NO: 18411172 NR Description: expressed protein; protein id: At1g76670
MSSLGFNFATTLTSWHLLVTFCSLHVALWMKFFEHKPFDSRTVMGFGVLNGISIGLLNLSLGFNSVGFYQMTKLAIIPCTVILETLFFRKKFSRSIQMSLSVLLLGVGVATVTDLQLNAVGSILSLLAIITTCIAQIMTNTIQKKFKVSSTQLLYQSCPYQSLTLFLIGPFLDGFLTNQNVFAFNYTSQVVFFIVLSCLISVSVNFSTFLVIGKTSPVTYQVLGHLKTCLVLAFGYVLLHDPFSWRNILGILIAVVGMVLYSYFCTVETQQKNVEVSPQQVKESEAGPLIADSMSKVENGGGGVDDEPLKVPMWSSKYSRE

SEQ ID NO: 32904 - protein, 292 aa, Zea mays subsp. mays
  peptide (1)..(292): Ceres Seq. ID no. 12342134
  misc_feature (1)..(291): NCBI GI NO: 13699188 NR Description: putative glucose-6-phosphate/phosphate-tranlocat or
  misc_feature (1)..(291): NCBI GI NO: 34896140 NR Description: P0701D05.25
  misc_feature (1)..(287): NCBI GI NO: 22329373 NR Description: unknown protein; protein id: At1g06890
  misc_feature (1)..(287): NCBI GI NO: 27311731 NR Description: putative integral membrane protein
  misc_feature (1)..(261): NCBI GI NO: 30683853 NR Description: transporter-related [Arabidopsis thaliana]
  misc_feature (1)..(273): NCBI GI NO: 13384378 NR Description: putative phosphate translocator
  misc_feature (42)..(287): NCBI GI NO: 25406945 NR Description: hypothetical protein
  misc_feature (42)..(273): NCBI GI NO: 37535412 NR Description: putative glucose-6-phosphate/phosphate-translocator
  misc_feature (1)..(20): NCBI GI NO: 37535412 NR Description: putative glucose-6-phosphate/phosphate-translocator
  misc_feature (1)..(249): NCBI GI NO: 18411172 NR Description: expressed protein; protein id: At1g76670
MKFFEHKPFDSRTVMGFGVLNGISIGLLNLSLGFNSVGFYQMTKLAIIPCTVILETLFFRKKFSRSIQMSLSVLLLGVGVATVTDLQLNAVGSILSLLAIITTCIAQIMTNTIQKKFKVSSTQLLYQSCPYQSLTLFLIGPFLDGFLTNQNVFAFNYTSQVVFFIVLSCLISVSVNFSTFLVIGKTSPVTYQVLGHLKTCLVLAFGYVLLHDPFSWRNILGILIAVVGMVLYSYFCTVETQQKNVEVSPQQVKESEAGPLIADSMSKVENGGGGVDDEPLKVPMWSSKYSRE

SEQ ID NO: 32905 - DNA, 1674 bp, Zea mays subsp. mays; identical to SEQ ID NO: 32832
  misc_feature (1)..(1674): Ceres Seq. ID no. 13573191

SEQ ID NO: 32906 - protein, 300 aa, Zea mays subsp. mays; identical to SEQ ID NO: 32833
  peptide (1)..(300): Ceres Seq. ID no. 13573192
  misc_feature (59)..(142): Pfam Name: Pfam Description:  CHY zinc finger
  misc_feature (4)..(300): NCBI GI NO: 34910658 NR Description: putative PGPD14 protein
  misc_feature (37)..(299): NCBI GI NO: 4105798 NR Description: PGPD14 [Petunia x hybrida]
  misc_feature (40)..(300): NCBI GI NO: 15237169 NR Description: PGPD14 protein [Arabidopsis thaliana]
  misc_feature (51)..(300): NCBI GI NO: 21593716 NR Description: PGPD14 protein [Arabidopsis thaliana]
  misc_feature (57)..(299): NCBI GI NO: 37535002 NR Description: putative PGPD14 protein
  misc_feature (42)..(300): NCBI GI NO: 15238890 NR Description: expressed protein [Arabidopsis thaliana]
  misc_feature (26)..(300): NCBI GI NO: 30695702 NR Description: expressed protein [Arabidopsis thaliana]
  misc_feature (53)..(300): NCBI GI NO: 30102616 NR Description: At3g62970 [Arabidopsis thaliana]
  misc_feature (26)..(300): NCBI GI NO: 11358168 NR Description: hypothetical protein T20O10
  misc_feature (6)..(299): NCBI GI NO: 24582224 NR Description: CG16947-PA [Drosophila melanogaster]

SEQ ID NO: 32907 - protein, 246 aa, Zea mays subsp. mays; identical to SEQ ID NO: 32834
  peptide (1)..(246): Ceres Seq. ID no. 13573193
  misc_feature (5)..(88): Pfam Name: Pfam Description:  CHY zinc finger
  misc_feature (1)..(246): NCBI GI NO: 34910658 NR Description: putative PGPD14 protein
  misc_feature (1)..(245): NCBI GI NO: 4105798 NR Description: PGPD14 [Petunia x hybrida]
  misc_feature (1)..(246): NCBI GI NO: 15237169 NR Description: PGPD14 protein [Arabidopsis thaliana]
  misc_feature (1)..(246): NCBI GI NO: 21593716 NR Description: PGPD14 protein [Arabidopsis thaliana]
  misc_feature (3)..(245): NCBI GI NO: 37535002 NR Description: putative PGPD14 protein
  misc_feature (1)..(246): NCBI GI NO: 15238890 NR Description: expressed protein [Arabidopsis thaliana]
  misc_feature (1)..(246): NCBI GI NO: 30695702 NR Description: expressed protein [Arabidopsis thaliana]
  misc_feature (1)..(246): NCBI GI NO: 30102616 NR Description: At3g62970 [Arabidopsis thaliana]
  misc_feature (1)..(246): NCBI GI NO: 11358168 NR Description: hypothetical protein T20O10
  misc_feature (1)..(245): NCBI GI NO: 24582224 NR Description: CG16947-PA [Drosophila melanogaster]

SEQ ID NO: 32908 - protein, 206 aa, Zea mays subsp. mays; identical to SEQ ID NO: 32835
  peptide (1)..(206): Ceres Seq. ID no. 13573194
  misc_feature (101)..(143): Pfam Name: RING finger Pfam Description: Zinc finger, C3HC4 type
  misc_feature (1)..(206): NCBI GI NO: 34910658 NR Description: putative PGPD14 protein
  misc_feature (1)..(205): NCBI GI NO: 4105798 NR Description: PGPD14 [Petunia x hybrida]
  misc_feature (1)..(206): NCBI GI NO: 15237169 NR Description: PGPD14 protein [Arabidopsis thaliana]
  misc_feature (1)..(206): NCBI GI NO: 21593716 NR Description: PGPD14 protein [Arabidopsis thaliana]
  misc_feature (1)..(205): NCBI GI NO: 37535002 NR Description: putative PGPD14 protein
  misc_feature (1)..(206): NCBI GI NO: 15238890 NR Description: expressed protein [Arabidopsis thaliana]
  misc_feature (1)..(206): NCBI GI NO: 30695702 NR Description: expressed protein [Arabidopsis thaliana]
  misc_feature (1)..(206): NCBI GI NO: 30102616 NR Description: At3g62970 [Arabidopsis thaliana]
  misc_feature (1)..(206): NCBI GI NO: 11358168 NR Description: hypothetical protein T20O10
  misc_feature (1)..(205): NCBI GI NO: 24582224 NR Description: CG16947-PA [Drosophila melanogaster]

SEQ ID NO: 32909 - DNA, 1179 bp, Zea mays subsp. mays
  misc_feature (1)..(1179): Ceres Seq. ID no. 12355619
gttgagaatcaattgctagtacgatttcttctctcctccaaaccggccaagccaccaaccagcgccccccaccgccgcctttttatttcatccacgctgctcgtgctcgctgcctgcttctcgcgcgatcgtctcggcctctcgggattctagagtggcggccggctctccgcctgttcttgtcgtcgctgctcctttcccaggatgtcggaacgttctgagagcgcaactgaaaagattatgagcagcatcatggataccattgctgacaaccttcctaagcagaagtctgggaaatttgatccaggttcagtctctgacaaagtgaagaataagctgtttggtcgtcagaagaccttgcatggagttctgggtggtggaaaacctgctgatgtgctgttatggaggaacaaaaagatatcatcgagtgttctggctcttgcaacagctatttgggttttctttgagtggctcgactaccacttactgacaattgtttcatttgcccttgttcttggaatggttgtccagtttgtttggtccaacttctcaaacatgctaagcagcggatcccgttctcaggtgccccgagttgaattgcctgatgagttatttgtgaacattgccgttgcaatcggtgcccaaataaacaagttcctgtgcttccttcaggatgtttcttgtgaaagaaacttgaagcattttgtagtggcgatcgcaggactgtgggctgctgcggtgattggaagttggtgcaatttcctgactgtcatatatgtcgggtttgtttgtgttcacacgcttccggtgctctatgagaagtacgaagaccaagtggacgatttcctctacagccttcttggtctgctgcgagatcaatatcagaagctcgaccaaggcgtcttgagcaagattcccaaggggaacatgaaggctaagaagaacgagtagtttagcaggtggtttctcgtgaatgagatcaatatcgttttgacttgtgtcgattattacctaaggcgtgtgtgccattctgaacctggctgctagttcatcgcccgccgggggtttaaactactaagctgcaatgcacaagtaatgaagtgtgctagttcattgcccacacgggtactagttcttcgactcatttaaatttctgatccgatcatttgcgggatattg

SEQ ID NO: 32910 - protein, 248 aa, Zea mays subsp. mays
  peptide (1)..(248): Ceres Seq. ID no. 12355620
  misc_feature (1)..(248): NCBI GI NO: 34897094 NR Description: unknown protein
  misc_feature (1)..(248): NCBI GI NO: 34899590 NR Description: hypothetical protein~similar to Oryza sativachromosome3
  misc_feature (1)..(248): NCBI GI NO: 30681227 NR Description: expressed protein [Arabidopsis thaliana]
  misc_feature (6)..(248): NCBI GI NO: 18398810 NR Description: expressed protein; protein id: At3g10260
  misc_feature (6)..(247): NCBI GI NO: 34909318 NR Description: OSJNBb0021A09.5
  misc_feature (44)..(247): NCBI GI NO: 34904202 NR Description: P0492F05.25
  misc_feature (6)..(245): NCBI GI NO: 18406991 NR Description: expressed protein; protein id: At2g46170
  misc_feature (14)..(248): NCBI GI NO: 15236556 NR Description: putative protein; protein id: At4g23630
  misc_feature (3)..(240): NCBI GI NO: 15222616 NR Description: hypothetical protein; protein id: At1g64090
  misc_feature (1)..(248): NCBI GI NO: 15237093 NR Description: putative protein; protein id: At4g11220
MSERSESATEKIMSSIMDTIADNLPKQKSGKFDPGSVSDKVKNKLFGRQKTLHGVLGGGKPADVLLWRNKKISSSVLALATAIWVFFEWLDYHLLTIVSFALVLGMVVQFVWSNFSNMLSSGSRSQVPRVELPDELFVNIAVAIGAQINKFLCFLQDVSCERNLKHFVVAIAGLWAAAVIGSWCNFLTVIYVGFVCVHTLPVLYEKYEDQVDDFLYSLLGLLRDQYQKLDQGVLSKIPKGNMKAKKNE

SEQ ID NO: 32911 - protein, 236 aa, Zea mays subsp. mays
  peptide (1)..(236): Ceres Seq. ID no. 12355621
  misc_feature (1)..(236): NCBI GI NO: 34897094 NR Description: unknown protein
  misc_feature (1)..(236): NCBI GI NO: 34899590 NR Description: hypothetical protein~similar to Oryza sativachromosome3
  misc_feature (1)..(236): NCBI GI NO: 30681227 NR Description: expressed protein [Arabidopsis thaliana]
  misc_feature (1)..(236): NCBI GI NO: 18398810 NR Description: expressed protein; protein id: At3g10260
  misc_feature (1)..(235): NCBI GI NO: 34909318 NR Description: OSJNBb0021A09.5
  misc_feature (32)..(235): NCBI GI NO: 34904202 NR Description: P0492F05.25
  misc_feature (1)..(233): NCBI GI NO: 18406991 NR Description: expressed protein; protein id: At2g46170
  misc_feature (2)..(236): NCBI GI NO: 15236556 NR Description: putative protein; protein id: At4g23630
  misc_feature (1)..(228): NCBI GI NO: 15222616 NR Description: hypothetical protein; protein id: At1g64090
  misc_feature (1)..(236): NCBI GI NO: 15237093 NR Description: putative protein; protein id: At4g11220
MSSIMDTIADNLPKQKSGKFDPGSVSDKVKNKLFGRQKTLHGVLGGGKPADVLLWRNKKISSSVLALATAIWVFFEWLDYHLLTIVSFALVLGMVVQFVWSNFSNMLSSGSRSQVPRVELPDELFVNIAVAIGAQINKFLCFLQDVSCERNLKHFVVAIAGLWAAAVIGSWCNFLTVIYVGFVCVHTLPVLYEKYEDQVDDFLYSLLGLLRDQYQKLDQGVLSKIPKGNMKAKKNE

SEQ ID NO: 32912 - protein, 232 aa, Zea mays subsp. mays
  peptide (1)..(232): Ceres Seq. ID no. 12355622
  misc_feature (1)..(232): NCBI GI NO: 34897094 NR Description: unknown protein
  misc_feature (1)..(232): NCBI GI NO: 34899590 NR Description: hypothetical protein~similar to Oryza sativachromosome3
  misc_feature (1)..(232): NCBI GI NO: 30681227 NR Description: expressed protein [Arabidopsis thaliana]
  misc_feature (1)..(232): NCBI GI NO: 18398810 NR Description: expressed protein; protein id: At3g10260
  misc_feature (1)..(231): NCBI GI NO: 34909318 NR Description: OSJNBb0021A09.5
  misc_feature (28)..(231): NCBI GI NO: 34904202 NR Description: P0492F05.25
  misc_feature (1)..(229): NCBI GI NO: 18406991 NR Description: expressed protein; protein id: At2g46170
  misc_feature (1)..(232): NCBI GI NO: 15236556 NR Description: putative protein; protein id: At4g23630
  misc_feature (1)..(224): NCBI GI NO: 15222616 NR Description: hypothetical protein; protein id: At1g64090
  misc_feature (1)..(232): NCBI GI NO: 15237093 NR Description: putative protein; protein id: At4g11220
MDTIADNLPKQKSGKFDPGSVSDKVKNKLFGRQKTLHGVLGGGKPADVLLWRNKKISSSVLALATAIWVFFEWLDYHLLTIVSFALVLGMVVQFVWSNFSNMLSSGSRSQVPRVELPDELFVNIAVAIGAQINKFLCFLQDVSCERNLKHFVVAIAGLWAAAVIGSWCNFLTVIYVGFVCVHTLPVLYEKYEDQVDDFLYSLLGLLRDQYQKLDQGVLSKIPKGNMKAKKNE

SEQ ID NO: 32913 - DNA, 1412 bp, Zea mays subsp. mays
  misc_feature (1)..(1412): Ceres Seq. ID no. 12413439
tctcttttccgcccatggtggccgcgccaccaccgccgccgcagtttgccaagcacttcgctgctgggccgcccccgccgccccaagctggtgctgggcgccgcacgccgaccccgccctcgtctggatccggcgggaacgggtgcgaagaaaataaaaccatttgggtcggtgacctccagtactggatggatgaaaactacctacataactgcttcgggcccagcggcgaggtggttacaataaaagttatccgcaataggcaaacaggacagtcagaggggtatggatttgttgagttcttttctcatgcatcaggcagagaaagctcttcagaattttactggtcatgtgatgccaaacactgaccggccatttaaattgaactgggcatcgtatagcatgggtgaaaagcgatctgaagtggcttctgatcactcgatatttgttggcgatctagctgctgatgtcactgatgaaatgctgctggagcttttctccagcaagtaccgctcggtgaaaggagctaaagttattattgatgcaaacacaggccgttccaggggctatggatttgtcaggtttggagacgacaacgacaaatctcatgccatgtctgaaatgaatggtgtatattgctctacgaggccaattcgtataggacctgcgactcccagaagatcttcaggtgattctggctcctcgactcctggtcattcagatggtgattcttctaacagaacggtatatgttggtgggcttgaccccaatgtcagtgaagatgaactgagaaaagcctttgccaaatatgatcttgcctctgtgaaaattcctctaggaaagcaatgtggctttgttcaatttgttagcagaactgatgctgaagaagcactacaaggattaaatggatcactcattggaaagcaggcagttcgcctttcatgggtccgcagcccatcgcataagcagtctaggggtgactccgtcaacaggaggaacaacatgtactatggcacaccattctacggcggatatggctatgcctccccggtgccacacccaaacatgtacgctgcagcgtatggcacgtacccgctatatggcaaccagcagctagtgagctagagagctcccctccgacgtgtcccctctgacgggaaacaaaggttttggtccggtgagcatagtagcgtcaggtgagaaggtgcctttataaggctgtcctaagaagtgggcgagatatgttgttgcatcgttatcgttatggtgcctgtaactgttgtgtgtgccgtgtgcgtccggaagaattggatggaatggaactcgtggcttgttgtagtacatcagagagtcatgttattctttcaagaaattttgacttggtaataaattaaactattgtttgtgcgtcc

SEQ ID NO: 32914 - protein, 279 aa, Zea mays subsp. mays
  peptide (1)..(279): Ceres Seq. ID no. 12413440
  misc_feature (53)..(125): Pfam Name: a.k.a. RRM, RBD, or RNP domain Pfam Description: RNA recognition motif.
  misc_feature (7)..(272): NCBI GI NO: 15594035 NR Description: nucleic acid binding protein [Nicotiana tabacum]
  misc_feature (1)..(276): NCBI GI NO: 15221071 NR Description: RNA binding protein 45
  misc_feature (1)..(276): NCBI GI NO: 21592583 NR Description: putative DNA binding protein
  misc_feature (7)..(276): NCBI GI NO: 7485342 NR Description: hypothetical protein F10M23
  misc_feature (7)..(276): NCBI GI NO: 18416906 NR Description: RNA binding protein 45
  misc_feature (7)..(273): NCBI GI NO: 30524689 NR Description: salt tolerance protein 6 [Beta vulgaris]
  misc_feature (1)..(151): NCBI GI NO: 9663769 NR Description: RNA Binding Protein 47 [Nicotiana plumbaginifolia]
  misc_feature (137)..(279): NCBI GI NO: 9663769 NR Description: RNA Binding Protein 47 [Nicotiana plumbaginifolia]
  misc_feature (1)..(279): NCBI GI NO: 15220241 NR Description: RNA binding protein 47
  misc_feature (1)..(151): NCBI GI NO: 7489196 NR Description: RNA binding protein homolog - common tobacco
MDLLSSFLMHQAEKALQNFTGHVMPNTDRPFKLNWASYSMGEKRSEVASDHSIFVGDLAADVTDEMLLELFSSKYRSVKGAKVIIDANTGRSRGYGFVRFGDDNDKSHAMSEMNGVYCSTRPIRIGPATPRRSSGDSGSSTPGHSDGDSSNRTVYVGGLDPNVSEDELRKAFAKYDLASVKIPLGKQCGFVQFVSRTDAEEALQGLNGSLIGKQAVRLSWVRSPSHKQSRGDSVNRRNNMYYGTPFYGGYGYASPVPHPNMYAAAYGTYPLYGNQQLVS

SEQ ID NO: 32915 - protein, 271 aa, Zea mays subsp. mays
  peptide (1)..(271): Ceres Seq. ID no. 12413441
  misc_feature (45)..(117): Pfam Name: a.k.a. RRM, RBD, or RNP domain Pfam Description: RNA recognition motif.
  misc_feature (1)..(264): NCBI GI NO: 15594035 NR Description: nucleic acid binding protein [Nicotiana tabacum]
  misc_feature (1)..(268): NCBI GI NO: 15221071 NR Description: RNA binding protein 45
  misc_feature (1)..(268): NCBI GI NO: 21592583 NR Description: putative DNA binding protein
  misc_feature (1)..(268): NCBI GI NO: 7485342 NR Description: hypothetical protein F10M23
  misc_feature (1)..(268): NCBI GI NO: 18416906 NR Description: RNA binding protein 45
  misc_feature (1)..(265): NCBI GI NO: 30524689 NR Description: salt tolerance protein 6 [Beta vulgaris]
  misc_feature (1)..(143): NCBI GI NO: 9663769 NR Description: RNA Binding Protein 47 [Nicotiana plumbaginifolia]
  misc_feature (129)..(271): NCBI GI NO: 9663769 NR Description: RNA Binding Protein 47 [Nicotiana plumbaginifolia]
  misc_feature (1)..(271): NCBI GI NO: 15220241 NR Description: RNA binding protein 47
  misc_feature (1)..(143): NCBI GI NO: 7489196 NR Description: RNA binding protein homolog - common tobacco
MHQAEKALQNFTGHVMPNTDRPFKLNWASYSMGEKRSEVASDHSIFVGDLAADVTDEMLLELFSSKYRSVKGAKVIIDANTGRSRGYGFVRFGDDNDKSHAMSEMNGVYCSTRPIRIGPATPRRSSGDSGSSTPGHSDGDSSNRTVYVGGLDPNVSEDELRKAFAKYDLASVKIPLGKQCGFVQFVSRTDAEEALQGLNGSLIGKQAVRLSWVRSPSHKQSRGDSVNRRNNMYYGTPFYGGYGYASPVPHPNMYAAAYGTYPLYGNQQLVS

SEQ ID NO: 32916 - protein, 256 aa, Zea mays subsp. mays
  peptide (1)..(256): Ceres Seq. ID no. 12413442
  misc_feature (30)..(102): Pfam Name: a.k.a. RRM, RBD, or RNP domain Pfam Description: RNA recognition motif.
  misc_feature (1)..(249): NCBI GI NO: 15594035 NR Description: nucleic acid binding protein [Nicotiana tabacum]
  misc_feature (1)..(253): NCBI GI NO: 15221071 NR Description: RNA binding protein 45
  misc_feature (1)..(253): NCBI GI NO: 21592583 NR Description: putative DNA binding protein
  misc_feature (1)..(253): NCBI GI NO: 7485342 NR Description: hypothetical protein F10M23
  misc_feature (1)..(253): NCBI GI NO: 18416906 NR Description: RNA binding protein 45
  misc_feature (1)..(250): NCBI GI NO: 30524689 NR Description: salt tolerance protein 6 [Beta vulgaris]
  misc_feature (1)..(128): NCBI GI NO: 9663769 NR Description: RNA Binding Protein 47 [Nicotiana plumbaginifolia]
  misc_feature (114)..(256): NCBI GI NO: 9663769 NR Description: RNA Binding Protein 47 [Nicotiana plumbaginifolia]
  misc_feature (1)..(256): NCBI GI NO: 15220241 NR Description: RNA binding protein 47
  misc_feature (1)..(128): NCBI GI NO: 7489196 NR Description: RNA binding protein homolog - common tobacco
MPNTDRPFKLNWASYSMGEKRSEVASDHSIFVGDLAADVTDEMLLELFSSKYRSVKGAKVIIDANTGRSRGYGFVRFGDDNDKSHAMSEMNGVYCSTRPIRIGPATPRRSSGDSGSSTPGHSDGDSSNRTVYVGGLDPNVSEDELRKAFAKYDLASVKIPLGKQCGFVQFVSRTDAEEALQGLNGSLIGKQAVRLSWVRSPSHKQSRGDSVNRRNNMYYGTPFYGGYGYASPVPHPNMYAAAYGTYPLYGNQQLVS

SEQ ID NO: 32917 - DNA, 1554 bp, Zea mays subsp. mays
  misc_feature (1)..(1554): Ceres Seq. ID no. 12411930
atttcgactcgtgtgttcgtgagctctgtgagaaacaaagaccatgacgcaggagaagacggtggtgctgtacccctccctgggcgttggccatctgaaccccatggcgcagctggccaaggccatcctccgccacggcagcgtcgccgtcaccatcgccgtcgtcgacccgcccgagaagcacgccgtgctagctgctgcgctggcccgcctggcagcggtcagtccctccatcacggtccacctcctccccatcccgccctgcgccaccagcaagcagcattcccaccccatcatgcccatcctggatgcgctccgcgccgcgaaccccgcgctccgggcgttccttgccgcgcgagtccctgccgtcgccgccctcgtggtcgacatgttctgcaccgacgcgctcgacgtcgccgcggagctcgcgatccccgcgcacttcttctacccgtccgcggcccggcgacctcgcggtctacctccaggttccagatctctgccgcgccgcgccgtccccgctaagggacatgggcaaggcggcgctgaacttcgccggcgtgccggcggtccgcgctctcgacatgcccgacaccatgcacgactgggagagcgacgtgggcagcgtacggctgcggcagctcgcccggatgccggaggccgcgggcattctggtgaacagcttcgagtggctggagtcgagggcgctggaagcgctacgtggcggccactgcctgcccggccgctcgacgccgaaaatctactgcgtcgggccgctggtcgacggtggcggcagtggcaccgaggggaacggcgagaggcacgcgtgcctcgcgtggatggacgggcagcccaggcagagcgtggtgttcctctgcttcggaagcctgggcgccttctcggcggcgcagctgaaggagacggcgcgcgggctagagcgttcaggacacaggttcttgtgggccgtgcgaagcccaagcgaggatcaggactctggcgagcctgatctggaggcgttgcttccggatgggttcttggagagaaccagaggcagaggactggttctgaagaactgggcgccccagacacaggtgctgcggcacgaggccgtgggtgcctttgtaactcactgcggctggaactcggtgctggaggcggccatgtccggcgtgccgatgatctgctggccgctgtacgcggagcagaggctgaataaggtgcacgtggtggaggagatgaaggttggggtggtgatggaaggctacgacgaggagttggtgacggctgacgaggtggaggccaaggtacgactagtgatggagtcggaggaagggaagaagctcagggagaggacagcgacggcgaaggaaatggctgctgatgccatcaaacaaggcgggtcgtcttacgtcgaacttggtgagtttttgaagggtttaggacgcaagtgatggatagctatgcgtatgaatgataataatctgtctgtatatcagtataagatgaatgcttaacgcagtctggaagataagtattatatggctacttatcatt

SEQ ID NO: 32918 - protein, 380 aa, Zea mays subsp. mays
  peptide (1)..(380): Ceres Seq. ID no. 12411931
  misc_feature (54)..(378): Pfam Name: Pfam Description:  UDP-glucoronosyl and UDP-glucosyl transferase
  misc_feature (54)..(378): NCBI GI NO: 34910222 NR Description: putative flavonol glucosyltransferase
  misc_feature (72)..(377): NCBI GI NO: 34910228 NR Description: putative flavonol glucosyltransferase
  misc_feature (54)..(377): NCBI GI NO: 34910204 NR Description: putative flavonol glucosyltransferase
  misc_feature (55)..(377): NCBI GI NO: 34910218 NR Description: putative flavonol glucosyltransferase
  misc_feature (55)..(374): NCBI GI NO: 34910206 NR Description: putative flavonol glucosyltransferase
  misc_feature (55)..(375): NCBI GI NO: 22535568 NR Description: putative glucosyltransferase
  misc_feature (73)..(370): NCBI GI NO: 34910208 NR Description: putative flavonol glucosyltransferase
  misc_feature (55)..(380): NCBI GI NO: 21593785 NR Description: putative glucosyltransferase
  misc_feature (55)..(380): NCBI GI NO: 18401158 NR Description: putative glucosyltransferase
  misc_feature (55)..(362): NCBI GI NO: 30684106 NR Description: glycosyltransferase family [Arabidopsis thaliana]
MRSAPRTPRSGRSLPRESLPSPPSWSTCSAPTRSTSPRSSRSPRTSSTRPRPGDLAVYLQVPDLCRAAPSPLRDMGKAALNFAGVPAVRALDMPDTMHDWESDVGSVRLRQLARMPEAAGILVNSFEWLESRALEALRGGHCLPGRSTPKIYCVGPLVDGGGSGTEGNGERHACLAWMDGQPRQSVVFLCFGSLGAFSAAQLKETARGLERSGHRFLWAVRSPSEDQDSGEPDLEALLPDGFLERTRGRGLVLKNWAPQTQVLRHEAVGAFVTHCGWNSVLEAAMSGVPMICWPLYAEQRLNKVHVVEEMKVGVVMEGYDEELVTADEVEAKVRLVMESEEGKKLRERTATAKEMAADAIKQGGSSYVELGEFLKGLGRK

SEQ ID NO: 32919 - protein, 320 aa, Zea mays subsp. mays
  peptide (1)..(320): Ceres Seq. ID no. 12411932
  misc_feature (5)..(140): Pfam Name: Pfam Description:  UDP-glucoronosyl and UDP-glucosyl transferase
  misc_feature (4)..(140): NCBI GI NO: 34910222 NR Description: putative flavonol glucosyltransferase
  misc_feature (5)..(140): NCBI GI NO: 34910228 NR Description: putative flavonol glucosyltransferase
  misc_feature (4)..(140): NCBI GI NO: 34910204 NR Description: putative flavonol glucosyltransferase
  misc_feature (7)..(140): NCBI GI NO: 34910218 NR Description: putative flavonol glucosyltransferase
  misc_feature (4)..(138): NCBI GI NO: 34910206 NR Description: putative flavonol glucosyltransferase
  misc_feature (1)..(140): NCBI GI NO: 22535568 NR Description: putative glucosyltransferase
  misc_feature (1)..(135): NCBI GI NO: 34910208 NR Description: putative flavonol glucosyltransferase
  misc_feature (4)..(140): NCBI GI NO: 21593785 NR Description: putative glucosyltransferase
  misc_feature (4)..(140): NCBI GI NO: 18401158 NR Description: putative glucosyltransferase
  misc_feature (4)..(140): NCBI GI NO: 30684106 NR Description: glycosyltransferase family [Arabidopsis thaliana]
MTQEKTVVLYPSLGVGHLNPMAQLAKAILRHGSVAVTIAVVDPPEKHAVLAAALARLAAVSPSITVHLLPIPPCATSKQHSHPIMPILDALRAANPALRAFLAARVPAVAALVVDMFCTDALDVAAELAIPAHFFYPSAARRPRGLPPGSRSLPRRAVPAKGHGQGGAELRRRAGGPRSRHARHHARLGERRGQRTAAAARPDAGGRGHSGEQLRVAGVEGAGSATWRPLPARPLDAENLLRRAAGRRWRQWHRGERREARVPRVDGRAAQAERGVPLLRKPGRLLGGAAEGDGARARAFRTQVLVGRAKPKRGSGLWRA

SEQ ID NO: 32920 - protein, 306 aa, Zea mays subsp. mays
  peptide (1)..(306): Ceres Seq. ID no. 12411933
  misc_feature (1)..(304): Pfam Name: Pfam Description:  UDP-glucoronosyl and UDP-glucosyl transferase
  misc_feature (1)..(304): NCBI GI NO: 34910222 NR Description: putative flavonol glucosyltransferase
  misc_feature (1)..(303): NCBI GI NO: 34910228 NR Description: putative flavonol glucosyltransferase
  misc_feature (1)..(303): NCBI GI NO: 34910204 NR Description: putative flavonol glucosyltransferase
  misc_feature (1)..(303): NCBI GI NO: 34910218 NR Description: putative flavonol glucosyltransferase
  misc_feature (1)..(300): NCBI GI NO: 34910206 NR Description: putative flavonol glucosyltransferase
  misc_feature (1)..(301): NCBI GI NO: 22535568 NR Description: putative glucosyltransferase
  misc_feature (1)..(296): NCBI GI NO: 34910208 NR Description: putative flavonol glucosyltransferase
  misc_feature (1)..(306): NCBI GI NO: 21593785 NR Description: putative glucosyltransferase
  misc_feature (1)..(306): NCBI GI NO: 18401158 NR Description: putative glucosyltransferase
  misc_feature (1)..(288): NCBI GI NO: 30684106 NR Description: glycosyltransferase family [Arabidopsis thaliana]
MGKAALNFAGVPAVRALDMPDTMHDWESDVGSVRLRQLARMPEAAGILVNSFEWLESRALEALRGGHCLPGRSTPKIYCVGPLVDGGGSGTEGNGERHACLAWMDGQPRQSVVFLCFGSLGAFSAAQLKETARGLERSGHRFLWAVRSPSEDQDSGEPDLEALLPDGFLERTRGRGLVLKNWAPQTQVLRHEAVGAFVTHCGWNSVLEAAMSGVPMICWPLYAEQRLNKVHVVEEMKVGVVMEGYDEELVTADEVEAKVRLVMESEEGKKLRERTATAKEMAADAIKQGGSSYVELGEFLKGLGRK

SEQ ID NO: 32921 - DNA, 1514 bp, Zea mays subsp. mays
  misc_feature (1)..(1514): Ceres Seq. ID no. 12374131
  misc_feature (230)..(230): n is a, c, t, g, unknown, or other
aatcgcaagctcaagcaaaaacacaaagcgcttaaaccacactcaaaccaaccgccaacaaacaggcctcctagtcccgaccagaacttgctcgtagccccgcccccgagaacccgacagcgcgagatggctcccgagctgatgacagccaagatgaccgccaaggccgcggcggcggcggcggcggtgaagcctgccacgagggcgtacgtgacgttccttgcgggcgncggcgactactggaagggcgtggtggggctggccaagggcctgcgcaaggtccgctcggcctaccccctggtggtggcggtgctgcccgacgtgcccgagtcccaccgccgcatcctcgtctcgcagggctgcgtcgtccgcgagatcgagcccgtgtacccgcctgagaaccagacgcagttcgccatggcgtactacgtcatcaactactccaagctccgcatctgggagttcgtggagtacgagaggatggtgtacctggacgcggacatccaggtgttcgagaacatcgacggcctgttcgagctcgagaaggggtacttctacgcggtgatggactgcttctgcgagaagacgtggagccacaccccgcagtacaggatcggctactgccagcagtgcccggacaaggtggcgtggccagcggcgaccgccgagctgggccctccgccgtcgctctacttcaacgccggcatgttcgtgcacgagcccagcgtggccaccgccaaggcgctcctcgacaccctccgcgtgactccgcccacccccttcgcagagcaggacttcctgaacatgttcttcagggatcagtacaggccgatccccaacgtgtacaacctcgtgctggccatgctctggaggcaccccgagaacgtgcagctggagaaggtgaaggtcgtgcactactgcgcggcggggtccaagccgtggaggttcacgggcaaggaggcgaacatggacagggaggacatcaacgccctggtgaacaagtggtgggacatctacaacgacgagacgctggacttgaagggcctgccctcgctctcgcccgacgacgacgacgaggtggaggcggtggccaagaagccgcttcgcgcggccctggcggaggccggcacggtcaagtacgtcaccgcgccctcggccgcgtgatcccgtgctctggccttcccccaccgcgcaccgtaccggtggccgcgcgctatagcttgtgtgtgtgtggccatcgcggaacataagaagaatctctcactataaaggccttcgttctgtgtttgcattttggttttggattagggtgtctaatttttcaccagttccttttccccttgtgtaagtgtggagcttactatatagctagcgcccatttcaaggtgctgcaagcgttggtcaggaattgggctagagtgtttgtcctgtaccgagggattatgtgtatttttgctatttcgctcggtaaattaatacaataataaaaaatagggagccgcaaaattatggcc

SEQ ID NO: 32922 - protein, 387 aa, Zea mays subsp. mays
  peptide (1)..(387): Ceres Seq. ID no. 12374132
  misc_feature (47)..(387): NCBI GI NO: 34898096 NR Description: WSI76 protein induced by water stress
  misc_feature (44)..(387): NCBI GI NO: 4588376 NR Description: galactinol synthase [Brassica napus]
  misc_feature (43)..(387): NCBI GI NO: 15226522 NR Description: putative galactinol synthase; protein id:At2g47180
  misc_feature (43)..(387): NCBI GI NO: 15223567 NR Description: water stress-induced protein, putative
  misc_feature (43)..(387): NCBI GI NO: 5541885 NR Description: putative galactinol synthase [Pisum sativum]
  misc_feature (43)..(387): NCBI GI NO: 20340247 NR Description: galactinol synthase-like protein
  misc_feature (56)..(387): NCBI GI NO: 18874402 NR Description: galactinol synthase [Cucumis melo]
  misc_feature (56)..(387): NCBI GI NO: 29569824 NR Description: galactinol synthase [Cucumis sativus]
  misc_feature (43)..(387): NCBI GI NO: 15219093 NR Description: galactinol synthase, putative
  misc_feature (66)..(387): NCBI GI NO: 5608497 NR Description: galactinol synthase, isoform GolS-1
  misc_feature (77)..(77): Xaa is any aa, unknown or other
NRKLKQKHKALKPHSNQPPTNRPPSPDQNLLVAPPPRTRQREMAPELMTAKMTAKAAAAAAAVKPATRAYVTFLAGXGDYWKGVVGLAKGLRKVRSAYPLVVAVLPDVPESHRRILVSQGCVVREIEPVYPPENQTQFAMAYYVINYSKLRIWEFVEYERMVYLDADIQVFENIDGLFELEKGYFYAVMDCFCEKTWSHTPQYRIGYCQQCPDKVAWPAATAELGPPPSLYFNAGMFVHEPSVATAKALLDTLRVTPPTPFAEQDFLNMFFRDQYRPIPNVYNLVLAMLWRHPENVQLEKVKVVHYCAAGSKPWRFTGKEANMDREDINALVNKWWDIYNDETLDLKGLPSLSPDDDDEVEAVAKKPLRAALAEAGTVKYVTAPSAA

SEQ ID NO: 32923 - protein, 345 aa, Zea mays subsp. mays
  peptide (1)..(345): Ceres Seq. ID no. 12374133
  misc_feature (5)..(345): NCBI GI NO: 34898096 NR Description: WSI76 protein induced by water stress
  misc_feature (2)..(345): NCBI GI NO: 4588376 NR Description: galactinol synthase [Brassica napus]
  misc_feature (1)..(345): NCBI GI NO: 15226522 NR Description: putative galactinol synthase; protein id:At2g47180
  misc_feature (1)..(345): NCBI GI NO: 15223567 NR Description: water stress-induced protein, putative
  misc_feature (1)..(345): NCBI GI NO: 5541885 NR Description: putative galactinol synthase [Pisum sativum]
  misc_feature (1)..(345): NCBI GI NO: 20340247 NR Description: galactinol synthase-like protein
  misc_feature (14)..(345): NCBI GI NO: 18874402 NR Description: galactinol synthase [Cucumis melo]
  misc_feature (14)..(345): NCBI GI NO: 29569824 NR Description: galactinol synthase [Cucumis sativus]
  misc_feature (1)..(345): NCBI GI NO: 15219093 NR Description: galactinol synthase, putative
  misc_feature (24)..(345): NCBI GI NO: 5608497 NR Description: galactinol synthase, isoform GolS-1
  misc_feature (35)..(35): Xaa is any aa, unknown or other
MAPELMTAKMTAKAAAAAAAVKPATRAYVTFLAGXGDYWKGVVGLAKGLRKVRSAYPLVVAVLPDVPESHRRILVSQGCVVREIEPVYPPENQTQFAMAYYVINYSKLRIWEFVEYERMVYLDADIQVFENIDGLFELEKGYFYAVMDCFCEKTWSHTPQYRIGYCQQCPDKVAWPAATAELGPPPSLYFNAGMFVHEPSVATAKALLDTLRVTPPTPFAEQDFLNMFFRDQYRPIPNVYNLVLAMLWRHPENVQLEKVKVVHYCAAGSKPWRFTGKEANMDREDINALVNKWWDIYNDETLDLKGLPSLSPDDDDEVEAVAKKPLRAALAEAGTVKYVTAPSAA

SEQ ID NO: 32924 - protein, 340 aa, Zea mays subsp. mays
  peptide (1)..(340): Ceres Seq. ID no. 12374134
  misc_feature (1)..(340): NCBI GI NO: 34898096 NR Description: WSI76 protein induced by water stress
  misc_feature (1)..(340): NCBI GI NO: 4588376 NR Description: galactinol synthase [Brassica napus]
  misc_feature (1)..(340): NCBI GI NO: 15226522 NR Description: putative galactinol synthase; protein id:At2g47180
  misc_feature (1)..(340): NCBI GI NO: 15223567 NR Description: water stress-induced protein, putative
  misc_feature (1)..(340): NCBI GI NO: 5541885 NR Description: putative galactinol synthase [Pisum sativum]
  misc_feature (1)..(340): NCBI GI NO: 20340247 NR Description: galactinol synthase-like protein
  misc_feature (9)..(340): NCBI GI NO: 18874402 NR Description: galactinol synthase [Cucumis melo]
  misc_feature (9)..(340): NCBI GI NO: 29569824 NR Description: galactinol synthase [Cucumis sativus]
  misc_feature (1)..(340): NCBI GI NO: 15219093 NR Description: galactinol synthase, putative
  misc_feature (19)..(340): NCBI GI NO: 5608497 NR Description: galactinol synthase, isoform GolS-1
  misc_feature (30)..(30): Xaa is any aa, unknown or other
MTAKMTAKAAAAAAAVKPATRAYVTFLAGXGDYWKGVVGLAKGLRKVRSAYPLVVAVLPDVPESHRRILVSQGCVVREIEPVYPPENQTQFAMAYYVINYSKLRIWEFVEYERMVYLDADIQVFENIDGLFELEKGYFYAVMDCFCEKTWSHTPQYRIGYCQQCPDKVAWPAATAELGPPPSLYFNAGMFVHEPSVATAKALLDTLRVTPPTPFAEQDFLNMFFRDQYRPIPNVYNLVLAMLWRHPENVQLEKVKVVHYCAAGSKPWRFTGKEANMDREDINALVNKWWDIYNDETLDLKGLPSLSPDDDDEVEAVAKKPLRAALAEAGTVKYVTAPSAA

SEQ ID NO: 32925 - DNA, 1534 bp, Zea mays subsp. mays
  misc_feature (1)..(1534): Ceres Seq. ID no. 13492041
tccaaattccccggtcacctacctcctctgccctctcactctcagatccgcgtcctcggctcctcctcctcctcctcctcctcccttccttcgttccttccagatctccctcccagtcgagagtcgagatccaccgcctccgcgccccctcaccggtgcagcgcgaggaagcggggggccagaggccagccatgggcaaggaaggggccagcgacggcggcatgtcggagtcggtgatccgcaaggtcctggtctcgtacatgtacgtggcggtgtggatcttcctctccttctccgtgatcgtctacaacaagtacatcctcgaccccaagatgtacaactggcccttccccatctccctcaccatggtgcacatggccttctgctcctccctcgccgtggcgctcgtccgcgtcctccgcgtcgtcgacctcccgtcctcgcccgccatgacgtcgcagctctacgtctcctccgtgctccctatcggcgcgctctactcgctctcgctctggttctccaactccgcctacatctacctctccgtctccttcatccagatgctcaaggcgctcatgcccgtcgccgtctactccatcggggtcctcttcaagaaggagaccttcaagtcctccgccatgctcaacatgctctccatctcgttcggcgtcgccatcgccgcctacggagaggcccgcttcgacgcccgcggcgtcgccctgcagctcgccgccgtcgccttcgaggccacgcgcctcgtcctcatccagatcctcctcacctccaagggcatctccctcaaccccatcacctcgctctactacgtcgcgccctgctgcctcgctttcctcgtcgtgccctgggtcttcgtcgagctgcccaggctgcgcgccgtcggcatcttccagccggacctcttcgtcttcggcaccaactccctctgcgccttcgcgctcaacctcgccgtcttcctgctcgtcggcaagacgtcggctctcaccatgaacgtcgccggcgtcgtcaaggactggctgctcatcgccttctcctggtccgtcatccgcgacaccgtcacccccatcaacctcttcggctacgggatcgccttcctcggggtgggatactacaaccacgtcaagctgcaggcgctcaaggccaaggaggcgcagaagaaggcgacgcaggccgacgaggaggccgggtcgctgctgcaggagcgcgactcgcacggcgaccgcaagactgacaaccaggcctagcgagtgtgccggatctcatgatccaattcgctcggttctgaacccagtgtactccaaatatgtgatccaacccttacacgtttgatgcaaaatttgttcatttcttgtctttgacttgatctggtggtaccaaggaaataagcacgggaaagatgcaagctttgtgtcgaacatgtgaaaaaaaatatatatgtatgagcaattttttgtcttttttttggggccagttgtagctgttactaccattaaacagtaagcaaaactgtttgcatttt

SEQ ID NO: 32926 - protein, 418 aa, Zea mays subsp. mays
  peptide (1)..(418): Ceres Seq. ID no. 13492042
  misc_feature (249)..(377): Pfam Name: Pfam Description:  Integral membrane protein DUF6
  misc_feature (63)..(418): NCBI GI NO: 34908982 NR Description: P0003D09.29
  misc_feature (64)..(413): NCBI GI NO: 15236781 NR Description: phosphate translocator-related
  misc_feature (64)..(412): NCBI GI NO: 15224742 NR Description: phosphate translocator-related
  misc_feature (72)..(415): NCBI GI NO: 18420914 NR Description: phosphate translocator-related
  misc_feature (64)..(418): NCBI GI NO: 15238995 NR Description: phosphate translocator-related
  misc_feature (74)..(385): NCBI GI NO: 15221115 NR Description: phosphate translocator-related
  misc_feature (74)..(418): NCBI GI NO: 18401506 NR Description: phosphate translocator-related
  misc_feature (74)..(385): NCBI GI NO: 8778534 NR Description: F21D18.5 [Arabidopsis thaliana]
  misc_feature (75)..(412): NCBI GI NO: 18400381 NR Description: transporter-related [Arabidopsis thaliana]
  misc_feature (75)..(412): NCBI GI NO: 9279588 NR Description: phosphate/phosphoenolpyruvate translocator protein-like
QIPRSPTSSALSLSDPRPRLLLLLLLLPSFVPSRSPSQSRVEIHRLRAPSPVQREEAGGQRPAMGKEGASDGGMSESVIRKVLVSYMYVAVWIFLSFSVIVYNKYILDPKMYNWPFPISLTMVHMAFCSSLAVALVRVLRVVDLPSSPAMTSQLYVSSVLPIGALYSLSLWFSNSAYIYLSVSFIQMLKALMPVAVYSIGVLFKKETFKSSAMLNMLSISFGVAIAAYGEARFDARGVALQLAAVAFEATRLVLIQILLTSKGISLNPITSLYYVAPCCLAFLVVPWVFVELPRLRAVGIFQPDLFVFGTNSLCAFALNLAVFLLVGKTSALTMNVAGVVKDWLLIAFSWSVIRDTVTPINLFGYGIAFLGVGYYNHVKLQALKAKEAQKKATQADEEAGSLLQERDSHGDRKTDNQA

SEQ ID NO: 32927 - protein, 414 aa, Zea mays subsp. mays
  peptide (1)..(414): Ceres Seq. ID no. 13492043
  misc_feature (19)..(66): NCBI GI NO: 27375632 NR Description: blr0521 [Bradyrhizobium japonicum]
PNSPVTYLLCPLTLRSASSAPPPPPPPPFLRSFQISLPVESRDPPPPRPLTGAARGSGGPEASHGQGRGQRRRHVGVGDPQGPGLVHVRGGVDLPLLLRDRLQQVHPRPQDVQLALPHLPHHGAHGLLLLPRRGARPRPPRRRPPVLARHDVAALRLLRAPYRRALLALALVLQLRLHLPLRLLHPDAQGAHARRRLLHRGPLQEGDLQVLRHAQHALHLVRRRHRRLRRGPLRRPRRRPAARRRRLRGHAPRPHPDPPHLQGHLPQPHHLALLRRALLPRFPRRALGLRRAAQAARRRHLPAGPLRLRHQLPLRLRAQPRRLPARRQDVGSHHERRRRRQGLAAHRLLLVRHPRHRHPHQPLRLRDRLPRGGILQPRQAAGAQGQGGAEEGDAGRRGGRVAAAGARLARRPQD

SEQ ID NO: 32928 - protein, 355 aa, Zea mays subsp. mays
  peptide (1)..(355): Ceres Seq. ID no. 13492044
  misc_feature (186)..(314): Pfam Name: Pfam Description:  Integral membrane protein DUF6
  misc_feature (1)..(355): NCBI GI NO: 34908982 NR Description: P0003D09.29
  misc_feature (1)..(350): NCBI GI NO: 15236781 NR Description: phosphate translocator-related
  misc_feature (1)..(349): NCBI GI NO: 15224742 NR Description: phosphate translocator-related
  misc_feature (9)..(352): NCBI GI NO: 18420914 NR Description: phosphate translocator-related
  misc_feature (1)..(355): NCBI GI NO: 15238995 NR Description: phosphate translocator-related
  misc_feature (11)..(322): NCBI GI NO: 15221115 NR Description: phosphate translocator-related
  misc_feature (11)..(355): NCBI GI NO: 18401506 NR Description: phosphate translocator-related
  misc_feature (11)..(322): NCBI GI NO: 8778534 NR Description: F21D18.5 [Arabidopsis thaliana]
  misc_feature (12)..(349): NCBI GI NO: 18400381 NR Description: transporter-related [Arabidopsis thaliana]
  misc_feature (12)..(349): NCBI GI NO: 9279588 NR Description: phosphate/phosphoenolpyruvate translocator protein-like
MGKEGASDGGMSESVIRKVLVSYMYVAVWIFLSFSVIVYNKYILDPKMYNWPFPISLTMVHMAFCSSLAVALVRVLRVVDLPSSPAMTSQLYVSSVLPIGALYSLSLWFSNSAYIYLSVSFIQMLKALMPVAVYSIGVLFKKETFKSSAMLNMLSISFGVAIAAYGEARFDARGVALQLAAVAFEATRLVLIQILLTSKGISLNPITSLYYVAPCCLAFLVVPWVFVELPRLRAVGIFQPDLFVFGTNSLCAFALNLAVFLLVGKTSALTMNVAGVVKDWLLIAFSWSVIRDTVTPINLFGYGIAFLGVGYYNHVKLQALKAKEAQKKATQADEEAGSLLQERDSHGDRKTDNQA

SEQ ID NO: 32929 - DNA, 1276 bp, Zea mays subsp. mays
  misc_feature (1)..(1276): Ceres Seq. ID no. 12411915
aacgatcaaaatgaaaattactgagatgtcccctcggacacacagtggtcaaccgacgccgccggtgggtgcccggaatcccggatccttgtccgccctcctgctcactccactcgcctgccagccgcacaccaatcacctctgcggccggcggcgtctgcaacgccagtctctgatccgaccccgatcggcacacacgttctccatggcggagcagctcgcatcccaagatgctcccaatccccctgctccggcacagagggtactggtgacgaacacgcatggggagaaactcgtcggcctgctgcaccacatggggtctgacaaggttgtagttctctgccatggctttacgggctccaaggactatagcctcatcactgaccttgcggccgcactaacaaagcaagggattagtgtgtttcgctttgattttagtggaaatggagaaagtgaaggtgaattccagtacggcaactacaagaaggaggctgctgacttgcactctgttgtcttgtatcttcgccaggagaagtacgacgtagcagcaattgttggtcacagcaaaggtggagatgtggtcgttctatatgcctctatctacaaggatgtccccatggtggttaacctctctggccggtttcatttggagaaaggcattgaggagcgcctaggcaaagagtttatggatagaataaacaaggaaggctacatcgatgtcaaagacaaatcaggaaatgttttgtacagagtaaccaaggagagcttgatggaacggctgagccatgatatgcacgcaacgagcctttccatcagcaaagagtgcaggttctttacaattcacggttcagctgacgagatcatacccgtggaagatgcgtatgagtttgcaaggcttataccaaaccacaagctgcgtgtcatcgagggagcaaatcactgctacactgctcaccgtagagaactttctgatgccgtagtagaagccatcacatccagtgaggcaggggagaccacaacctagatctgatgcagaacggcagcctgcctttccaatcctgcaatgccgctcttccatctcagtcacattgccttatcacaatttttaaaagaaaacgagttctttgaaaatatcgtttgaatctagacgttgttaactcgttgtatcatgacatccttaatgctacgtttggacgttgatattggagagtataaaattgaattgggttgaatatcaaatcagacatgatagtgaaataagatgtaatttcaatcc

SEQ ID NO: 32930 - protein, 340 aa, Zea mays subsp. mays
  peptide (1)..(340): Ceres Seq. ID no. 12411916
  misc_feature (49)..(340): NCBI GI NO: 34913064 NR Description: P0013G02.24
  misc_feature (68)..(333): NCBI GI NO: 34913068 NR Description: P0013G02.26
  misc_feature (86)..(332): NCBI GI NO: 21554728 NR Description: putative esterase [Arabidopsis thaliana]
  misc_feature (79)..(330): NCBI GI NO: 15228202 NR Description: putative protein; protein id: At3g47590.1
  misc_feature (86)..(332): NCBI GI NO: 15232826 NR Description: putative protein; protein id: At3g47560
  misc_feature (86)..(332): NCBI GI NO: 22135864 NR Description: putative protein [Arabidopsis thaliana]
  misc_feature (86)..(330): NCBI GI NO: 15220578 NR Description: hypothetical protein; protein id: At1g29840.1
  misc_feature (86)..(327): NCBI GI NO: 11358640 NR Description: probable esterase-like protein - Arabidopsisthaliana
  misc_feature (86)..(327): NCBI GI NO: 18416707 NR Description: putative esterase - like protein
  misc_feature (86)..(327): NCBI GI NO: 21595418 NR Description: putative esterase-like protein
TIKMKITEMSPRTHSGQPTPPVGARNPGSLSALLLTPLACQPHTNHLCGRRRLQRQSLIRPRSAHTFSMAEQLASQDAPNPPAPAQRVLVTNTHGEKLVGLLHHMGSDKVVVLCHGFTGSKDYSLITDLAAALTKQGISVFRFDFSGNGESEGEFQYGNYKKEAADLHSVVLYLRQEKYDVAAIVGHSKGGDVVVLYASIYKDVPMVVNLSGRFHLEKGIEERLGKEFMDRINKEGYIDVKDKSGNVLYRVTKESLMERLSHDMHATSLSISKECRFFTIHGSADEIIPVEDAYEFARLIPNHKLRVIEGANHCYTAHRRELSDAVVEAITSSEAGETTT

SEQ ID NO: 32931 - protein, 337 aa, Zea mays subsp. mays
  peptide (1)..(337): Ceres Seq. ID no. 12411917
  misc_feature (46)..(337): NCBI GI NO: 34913064 NR Description: P0013G02.24
  misc_feature (65)..(330): NCBI GI NO: 34913068 NR Description: P0013G02.26
  misc_feature (83)..(329): NCBI GI NO: 21554728 NR Description: putative esterase [Arabidopsis thaliana]
  misc_feature (76)..(327): NCBI GI NO: 15228202 NR Description: putative protein; protein id: At3g47590.1
  misc_feature (83)..(329): NCBI GI NO: 15232826 NR Description: putative protein; protein id: At3g47560
  misc_feature (83)..(329): NCBI GI NO: 22135864 NR Description: putative protein [Arabidopsis thaliana]
  misc_feature (83)..(327): NCBI GI NO: 15220578 NR Description: hypothetical protein; protein id: At1g29840.1
  misc_feature (83)..(324): NCBI GI NO: 11358640 NR Description: probable esterase-like protein - Arabidopsisthaliana
  misc_feature (83)..(324): NCBI GI NO: 18416707 NR Description: putative esterase - like protein
  misc_feature (83)..(324): NCBI GI NO: 21595418 NR Description: putative esterase-like protein
MKITEMSPRTHSGQPTPPVGARNPGSLSALLLTPLACQPHTNHLCGRRRLQRQSLIRPRSAHTFSMAEQLASQDAPNPPAPAQRVLVTNTHGEKLVGLLHHMGSDKVVVLCHGFTGSKDYSLITDLAAALTKQGISVFRFDFSGNGESEGEFQYGNYKKEAADLHSVVLYLRQEKYDVAAIVGHSKGGDVVVLYASIYKDVPMVVNLSGRFHLEKGIEERLGKEFMDRINKEGYIDVKDKSGNVLYRVTKESLMERLSHDMHATSLSISKECRFFTIHGSADEIIPVEDAYEFARLIPNHKLRVIEGANHCYTAHRRELSDAVVEAITSSEAGETTT

SEQ ID NO: 32932 - protein, 332 aa, Zea mays subsp. mays
  peptide (1)..(332): Ceres Seq. ID no. 12411918
  misc_feature (41)..(332): NCBI GI NO: 34913064 NR Description: P0013G02.24
  misc_feature (60)..(325): NCBI GI NO: 34913068 NR Description: P0013G02.26
  misc_feature (78)..(324): NCBI GI NO: 21554728 NR Description: putative esterase [Arabidopsis thaliana]
  misc_feature (71)..(322): NCBI GI NO: 15228202 NR Description: putative protein; protein id: At3g47590.1
  misc_feature (78)..(324): NCBI GI NO: 15232826 NR Description: putative protein; protein id: At3g47560
  misc_feature (78)..(324): NCBI GI NO: 22135864 NR Description: putative protein [Arabidopsis thaliana]
  misc_feature (78)..(322): NCBI GI NO: 15220578 NR Description: hypothetical protein; protein id: At1g29840.1
  misc_feature (78)..(319): NCBI GI NO: 11358640 NR Description: probable esterase-like protein - Arabidopsisthaliana
  misc_feature (78)..(319): NCBI GI NO: 18416707 NR Description: putative esterase - like protein
  misc_feature (78)..(319): NCBI GI NO: 21595418 NR Description: putative esterase-like protein
MSPRTHSGQPTPPVGARNPGSLSALLLTPLACQPHTNHLCGRRRLQRQSLIRPRSAHTFSMAEQLASQDAPNPPAPAQRVLVTNTHGEKLVGLLHHMGSDKVVVLCHGFTGSKDYSLITDLAAALTKQGISVFRFDFSGNGESEGEFQYGNYKKEAADLHSVVLYLRQEKYDVAAIVGHSKGGDVVVLYASIYKDVPMVVNLSGRFHLEKGIEERLGKEFMDRINKEGYIDVKDKSGNVLYRVTKESLMERLSHDMHATSLSISKECRFFTIHGSADEIIPVEDAYEFARLIPNHKLRVIEGANHCYTAHRRELSDAVVEAITSSEAGETTT

SEQ ID NO: 32933 - DNA, 1461 bp, Zea mays subsp. mays
  misc_feature (1)..(1461): Ceres Seq. ID no. 12411908
gaaggcgacgcagtggccgtacagtagtgtcacctgcacattgcagaccgcctcagcgcctcaccaagcgaaactcgttggcggctagggttttgctgcctcccgagcccaaaccctagagcacccgcgcccatcccatggcgtgctaggcttcgattgagactggggggattagtaccgcaggctgggattagagcaagcgccgagcggaaatggcatcgagtaaccaattcgatctacttggagacgtcgagaacgacgaccctgcccacctcctcgcagctgccgagaagaaggcggccgcggtgcctaagcccgcgcccgcgccggccaagttgcccaccaagcctccgccgcccgcgcaacctgtgagggaggaaaggaactatggtgctccaccgcgcgatggtccaggacgtggaagaggcggccgcggtggcaggactggcccgaggcgagattttggcgatgctgatgcccacggctttgagggggggtatggtggcggcggcggcggttttggggacggtggagttgctcgcggtgaaaatggtgagggtaggcaggcagagaggggccgtgggccccgccagccttaccgtggaggtgggcgacgtggtgggtacagcgatgggcaggctgggaatgagttcggacgtcctcgccgggcatatgagcgccacagcggcacaggccgtggctacgggatgaagcgtgaaggggctgggcgtggaaattggggaactgcaactgatgaaggccttgaacaggacactgtggatgctgttaatcctgaggagactactgccgtggtggaggatgaaaagaaacctgaagatgcaccacagtctgaggttgagaaggacaaggagggcgcggagaatgaagaagaaaaggaacctgaggataaggagatgactttggaggaatatgaaaaggtactggaggaaaaacgaaaagctttactctcccttaaggctgaggagagaaaagttgaaattgacaaggagctacaggccatgcaacaactgtcagttaaaaaggatggcgatgaagtgtttatcaagctgggctctgacaaggacttgaaaaagaaagaaagtgctgaaagagaagaacggggcaagaagtccctgagcatcaacgagttcttgaagccagctgaaggcgagaggtactataaccctagtggccgtggccgtggtaggggccgtggggggttccgtggtggttacaacggcggttatcggggaccagctgctgctccagcgatcgaagaccaggctcagttccctgccctggcctaagcacagctcgtgttctcgctcaagattgtgtcacttttgcggagtgcgtcagtcagtcctagtgttgttgctcccaagcttgctttccggattatgtgtatccaacattttctgatgttatgtactggtgtgctcgtgattgcatggttttgct

SEQ ID NO: 32934 - protein, 364 aa, Zea mays subsp. mays
  peptide (1)..(364): Ceres Seq. ID no. 12411909
  misc_feature (133)..(311): Pfam Name: Pfam Description:  Hyaluronan / mRNA binding family
  misc_feature (1)..(363): NCBI GI NO: 34910712 NR Description: putative nuclear RNA binding protein A
  misc_feature (1)..(363): NCBI GI NO: 39725278 NR Description: salt tolerance protein 2 [Beta vulgaris]
  misc_feature (1)..(363): NCBI GI NO: 7488863 NR Description: probable transcription factor - fava bean
  misc_feature (1)..(364): NCBI GI NO: 34912396 NR Description: putative putative nuclear RNA binding protein A
  misc_feature (1)..(363): NCBI GI NO: 6492266 NR Description: nuclear RNA binding protein A [Spinacia oleracea]
  misc_feature (1)..(363): NCBI GI NO: 39725276 NR Description: salt tolerance protein 1 [Beta vulgaris]
  misc_feature (1)..(363): NCBI GI NO: 15235894 NR Description: nuclear antigen homolog; protein id: At4g16830
  misc_feature (1)..(363): NCBI GI NO: 21537052 NR Description: nuclear antigen homolog [Arabidopsis thaliana]
  misc_feature (1)..(363): NCBI GI NO: 15238039 NR Description: putative protein; protein id: At5g47210
  misc_feature (1)..(363): NCBI GI NO: 21553991 NR Description: nuclear RNA binding protein A-like protein
MASSNQFDLLGDVENDDPAHLLAAAEKKAAAVPKPAPAPAKLPTKPPPPAQPVREERNYGAPPRDGPGRGRGGRGGRTGPRRDFGDADAHGFEGGYGGGGGGFGDGGVARGENGEGRQAERGRGPRQPYRGGGRRGGYSDGQAGNEFGRPRRAYERHSGTGRGYGMKREGAGRGNWGTATDEGLEQDTVDAVNPEETTAVVEDEKKPEDAPQSEVEKDKEGAENEEEKEPEDKEMTLEEYEKVLEEKRKALLSLKAEERKVEIDKELQAMQQLSVKKDGDEVFIKLGSDKDLKKKESAEREERGKKSLSINEFLKPAEGERYYNPSGRGRGRGRGGFRGGYNGGYRGPAAAPAIEDQAQFPALA

SEQ ID NO: 32935 - protein, 199 aa, Zea mays subsp. mays
  peptide (1)..(199): Ceres Seq. ID no. 12411910
  misc_feature (1)..(146): Pfam Name: Pfam Description:  Hyaluronan / mRNA binding family
  misc_feature (1)..(198): NCBI GI NO: 34910712 NR Description: putative nuclear RNA binding protein A
  misc_feature (1)..(198): NCBI GI NO: 39725278 NR Description: salt tolerance protein 2 [Beta vulgaris]
  misc_feature (1)..(198): NCBI GI NO: 7488863 NR Description: probable transcription factor - fava bean
  misc_feature (1)..(199): NCBI GI NO: 34912396 NR Description: putative putative nuclear RNA binding protein A
  misc_feature (1)..(198): NCBI GI NO: 6492266 NR Description: nuclear RNA binding protein A [Spinacia oleracea]
  misc_feature (1)..(198): NCBI GI NO: 39725276 NR Description: salt tolerance protein 1 [Beta vulgaris]
  misc_feature (1)..(198): NCBI GI NO: 15235894 NR Description: nuclear antigen homolog; protein id: At4g16830
  misc_feature (1)..(198): NCBI GI NO: 21537052 NR Description: nuclear antigen homolog [Arabidopsis thaliana]
  misc_feature (1)..(198): NCBI GI NO: 15238039 NR Description: putative protein; protein id: At5g47210
  misc_feature (1)..(198): NCBI GI NO: 21553991 NR Description: nuclear RNA binding protein A-like protein
MKREGAGRGNWGTATDEGLEQDTVDAVNPEETTAVVEDEKKPEDAPQSEVEKDKEGAENEEEKEPEDKEMTLEEYEKVLEEKRKALLSLKAEERKVEIDKELQAMQQLSVKKDGDEVFIKLGSDKDLKKKESAEREERGKKSLSINEFLKPAEGERYYNPSGRGRGRGRGGFRGGYNGGYRGPAAAPAIEDQAQFPALA

SEQ ID NO: 32936 - DNA, 1196 bp, Zea mays subsp. mays
  misc_feature (1)..(1196): Ceres Seq. ID no. 12353396
gctttacaactccccaccccatcccatccacacacacttcacccagcgcggcggccgccggccgccggcaatggaggccgtggcgcacagcggcgactacctttggcggttcgtggcggagacagagtggtacaacgaggttgtcctcagcgccgtggcgccaggcgactggtggcgcggcctgccgcacccggtgcagtcatggatgcgcaactgcgtcggcggttacctcctctatttcatctctggtttcctctggtgcttcgtcatctactactggaagcgccacgcctacatccccaaagatgccatccccacaaatgacgctatgaagaagcaaatagttgtagcatcgaaggctatgcctttttactgcgctcttccaactttatctgaatatatgattgagagcggatggactcagtgctacttcaatatcagcgaaattggtttttctatgtacctctgttatatggctatgtatctcatctttgtggagtttggaatttactggatgcacagggagttgcatgacataaaaccattatacaaatatctgcatgcaacccaccatatttacaacaaggagaataccttgtctccatttgctggacttgcatttcatccactggatggtattctgcaagcaataccacatgtgttcgcgctcttcctctttccaacgcacttcaggacacatattgcactcttgttcctagaggctgtgtggacaacaaacatccacgactgcattcatggcaagatatggccagtcatgggtgctggatatcacaccattcaccatacgacttaccgtcacaactatggccactacaccatctggatggactggatgtttggtacgctcaatgagccagaagatatcctcaagaaggcttgagtttctcggagctgtggtattcctatggtgctgctgctggaactgctcgatctgttcccagtgtttctaatccgttgagcctgttcagcactgtctgtttatgtaggcatcagtgtgttaattactttgctaggttcatatggctttgtgcttattctgtaatttagcgatgtttgtctcatgacgcaacggagttcaggacgaataaaactttgctagacacattctggattccagttgcttgtacaatgttggaactcaactgtcaatataggatgtaaaacggattccttcc

SEQ ID NO: 32937 - protein, 299 aa, Zea mays subsp. mays
  peptide (1)..(299): Ceres Seq. ID no. 12353397
  misc_feature (31)..(203): NCBI GI NO: 34895618 NR Description: putative sterol-C5(6)-desaturase
  misc_feature (238)..(298): NCBI GI NO: 34895618 NR Description: putative sterol-C5(6)-desaturase
  misc_feature (32)..(298): NCBI GI NO: 4426627 NR Description: sterol-C5(6)-desaturase homolog
  misc_feature (32)..(298): NCBI GI NO: 33301670 NR Description: Delta-7-sterol-C5
  misc_feature (27)..(292): NCBI GI NO: 5031219 NR Description: delta7 sterol C-5 desaturase
  misc_feature (27)..(292): NCBI GI NO: 15232935 NR Description: sterol-C5-desaturase; protein id: At3g02580
  misc_feature (27)..(292): NCBI GI NO: 21594971 NR Description: sterol-C5-desaturase [Arabidopsis thaliana]
  misc_feature (27)..(292): NCBI GI NO: 2129741 NR Description: C-5 sterol desaturase (EC 1
  misc_feature (28)..(292): NCBI GI NO: 15232937 NR Description: putative sterol-C5-desaturase
  misc_feature (73)..(292): NCBI GI NO: 25742651 NR Description: sterol-C5-desaturase
LYNSPPHPIHTHFTQRGGRRPPAMEAVAHSGDYLWRFVAETEWYNEVVLSAVAPGDWWRGLPHPVQSWMRNCVGGYLLYFISGFLWCFVIYYWKRHAYIPKDAIPTNDAMKKQIVVASKAMPFYCALPTLSEYMIESGWTQCYFNISEIGFSMYLCYMAMYLIFVEFGIYWMHRELHDIKPLYKYLHATHHIYNKENTLSPFAGLAFHPLDGILQAIPHVFALFLFPTHFRTHIALLFLEAVWTTNIHDCIHGKIWPVMGAGYHTIHHTTYRHNYGHYTIWMDWMFGTLNEPEDILKKA

SEQ ID NO: 32938 - protein, 276 aa, Zea mays subsp. mays; identical to SEQ ID NO: 28558
  peptide (1)..(276): Ceres Seq. ID no. 12353398
  misc_feature (8)..(180): NCBI GI NO: 34895618 NR Description: putative sterol-C5(6)-desaturase
  misc_feature (215)..(275): NCBI GI NO: 34895618 NR Description: putative sterol-C5(6)-desaturase
  misc_feature (9)..(275): NCBI GI NO: 4426627 NR Description: sterol-C5(6)-desaturase homolog
  misc_feature (9)..(275): NCBI GI NO: 33301670 NR Description: Delta-7-sterol-C5
  misc_feature (4)..(269): NCBI GI NO: 5031219 NR Description: delta7 sterol C-5 desaturase
  misc_feature (4)..(269): NCBI GI NO: 15232935 NR Description: sterol-C5-desaturase; protein id: At3g02580
  misc_feature (4)..(269): NCBI GI NO: 21594971 NR Description: sterol-C5-desaturase [Arabidopsis thaliana]
  misc_feature (4)..(269): NCBI GI NO: 2129741 NR Description: C-5 sterol desaturase (EC 1
  misc_feature (5)..(269): NCBI GI NO: 15232937 NR Description: putative sterol-C5-desaturase
  misc_feature (50)..(269): NCBI GI NO: 25742651 NR Description: sterol-C5-desaturase

SEQ ID NO: 32939 - protein, 231 aa, Zea mays subsp. mays; identical to SEQ ID NO: 28559
  peptide (1)..(231): Ceres Seq. ID no. 12353399
  misc_feature (1)..(135): NCBI GI NO: 34895618 NR Description: putative sterol-C5(6)-desaturase
  misc_feature (170)..(230): NCBI GI NO: 34895618 NR Description: putative sterol-C5(6)-desaturase
  misc_feature (1)..(230): NCBI GI NO: 4426627 NR Description: sterol-C5(6)-desaturase homolog
  misc_feature (1)..(230): NCBI GI NO: 33301670 NR Description: Delta-7-sterol-C5
  misc_feature (1)..(224): NCBI GI NO: 5031219 NR Description: delta7 sterol C-5 desaturase
  misc_feature (1)..(224): NCBI GI NO: 15232935 NR Description: sterol-C5-desaturase; protein id: At3g02580
  misc_feature (1)..(224): NCBI GI NO: 21594971 NR Description: sterol-C5-desaturase [Arabidopsis thaliana]
  misc_feature (1)..(224): NCBI GI NO: 2129741 NR Description: C-5 sterol desaturase (EC 1
  misc_feature (1)..(224): NCBI GI NO: 15232937 NR Description: putative sterol-C5-desaturase
  misc_feature (5)..(224): NCBI GI NO: 25742651 NR Description: sterol-C5-desaturase

SEQ ID NO: 32940 - DNA, 1921 bp, Zea mays subsp. mays
  misc_feature (1)..(1921): Ceres Seq. ID no. 12414468
  misc_feature (1519)..(1519): n is a, c, t, g, unknown, or other
  misc_feature (1518)..(1518): n is a, c, t, g, unknown, or other
gcacgagaccattacctagaacatcctaatcgaaaaattgtcatctctacattgttgccggtgtcggcctcggccgtcgccgacgccgcgcatccagcgtccatgtctacgttaccgactcctcacgctggccggaccacgtgcccccacgtctcgccgtccccggttctcatccaccccgagctcccccaacgcgttttaccacagaccaataagtggccaatccctcgctgccccccacactccagaagtccagaccaaagctccaaagtccaatccctcgctagccacttgccatctgatcaaccagccagccgatctcagcgatccgccatggccaccgcgtattacgagaggccccgtggcggcgccgtcgaggaggcggacgacttcgatgagttcgaccccacgccgtacggcggtgggtacgacctcgccgtcaccttcggtcgcccgctgccaccgaccgaggaaacctgctacccgtgctcggcgccctcgacctcctacgacgcaccgcactacgccgcctccgagccgtccccctacggtcaccacgccaagccaaagcccaactacgggttccgcccccagcaggagcaacagccgtcttacggcagcggctacggatccaggcccgagcccgctgcggaggagggcggtggctatggatctggcttcggatccgggtatgggaggaagaagcaagaggaggagagctacggctctggatatgggaggaaaccgcaggcggaggagagctacgggtccggcgggtacggctctggctacggcggtcagacccggccggaggagagctatgggtcagcagggtatggatctgccaatccgcaggctgagacatacggctctggctacgggaggaagccacaggtagaggagagctacggatcggagtatgggtctgggttcgggaggaagccgcaggttgaggagagctatggatcggggtacgggaggacgccgcaggttgaggagagctatggatctggttacgggaggaagcctcaggttgaggagagctatggatctgggtacggcagcaggccgcagggtggggaggagtatggcagtggtgggtatgggaggaaggctcaggaggagacctatggctcctcggggtatggctatggcaggaagaacgaggagcagagctatggtggttctggctatggttatgagaagaaggcatctgaggaggatgaaggtgcctttggctctagtggttaccggaagccaaaaccctatggcgaggagacacagggttcatacggttatggagaggagcagcccaagtatcagagtggcgggtatgagagaccgagctatggtgggggagaggggtactatggccgcaagaaagatgatgacgactcggatgatgagaagaagcggcgtcattctaagcaccaccaccatggccaccactcaaaaaaaaaaaaaaaaaacggcacgagaagcgcttctcgtgccgttttttttttttttttttgagtnngagtcgggaggaggacgagaagggggagaggggatttttgccgcaagaaagatgatgacgactcggatgatgagaagaagcggcgtcattctaagcaccaccaccatggccaccactacgatgactaagcaccagtgccttctgctgggcgttgccctggttcaccgctactgctactatatccattcgcttgcataaataaagacggctgtgtaccttctggacactggaccaccgttgcgacgttgcctctgcattgttacaggccgagccgtgagtgtgctgtttattatctaatgttcaaatcgttgtgatgaaccaccgtccacgcctgttgatgccgaaccgaatgtctggatttactttgcgcctgttcttgtggtgtttgtcgccttccctgtc

SEQ ID NO: 32941 - protein, 504 aa, Zea mays subsp. mays
  peptide (1)..(504): Ceres Seq. ID no. 12414469
  misc_feature (209)..(407): Pfam Name: Pfam Description:  Dehydrin
  misc_feature (127)..(479): NCBI GI NO: 24417262 NR Description: unknown [Arabidopsis thaliana]
  misc_feature (127)..(479): NCBI GI NO: 9758332 NR Description: gene_id:MIJ24
  misc_feature (201)..(455): NCBI GI NO: 10954048 NR Description: ovarian fibroin-like substance-1 [Cyprinus carpio]
  misc_feature (162)..(455): NCBI GI NO: 10954048 NR Description: ovarian fibroin-like substance-1 [Cyprinus carpio]
  misc_feature (161)..(483): NCBI GI NO: 161050 NR Description: p48 eggshell protein
  misc_feature (217)..(459): NCBI GI NO: 27881721 NR Description: Unknown (protein for MGC:52724) [Xenopus laevis]
  misc_feature (206)..(458): NCBI GI NO: 37534924 NR Description: putative glycine-rich protein
  misc_feature (192)..(468): NCBI GI NO: 26252108 NR Description: Similar to pigpen [Mus musculus]
  misc_feature (166)..(468): NCBI GI NO: 27820115 NR Description: AT02511p [Drosophila melanogaster]
  misc_feature (166)..(464): NCBI GI NO: 24654243 NR Description: CG15920-PA [Drosophila melanogaster]
ARDHYLEHPNRKIVISTLLPVSASAVADAAHPASMSTLPTPHAGRTTCPHVSPSPVLIHPELPQRVLPQTNKWPIPRCPPHSRSPDQSSKVQSLASHLPSDQPASRSQRSAMATAYYERPRGGAVEEADDFDEFDPTPYGGGYDLAVTFGRPLPPTEETCYPCSAPSTSYDAPHYAASEPSPYGHHAKPKPNYGFRPQQEQQPSYGSGYGSRPEPAAEEGGGYGSGFGSGYGRKKQEEESYGSGYGRKPQAEESYGSGGYGSGYGGQTRPEESYGSAGYGSANPQAETYGSGYGRKPQVEESYGSEYGSGFGRKPQVEESYGSGYGRTPQVEESYGSGYGRKPQVEESYGSGYGSRPQGGEEYGSGGYGRKAQEETYGSSGYGYGRKNEEQSYGGSGYGYEKKASEEDEGAFGSSGYRKPKPYGEETQGSYGYGEEQPKYQSGGYERPSYGGGEGYYGRKKDDDDSDDEKKRRHSKHHHHGHHSKKKKKNGTRSASRAVFFFFF

SEQ ID NO: 32942 - protein, 470 aa, Zea mays subsp. mays
  peptide (1)..(470): Ceres Seq. ID no. 12414470
  misc_feature (175)..(373): Pfam Name: Pfam Description:  Dehydrin
  misc_feature (93)..(445): NCBI GI NO: 24417262 NR Description: unknown [Arabidopsis thaliana]
  misc_feature (93)..(445): NCBI GI NO: 9758332 NR Description: gene_id:MIJ24
  misc_feature (167)..(421): NCBI GI NO: 10954048 NR Description: ovarian fibroin-like substance-1 [Cyprinus carpio]
  misc_feature (128)..(421): NCBI GI NO: 10954048 NR Description: ovarian fibroin-like substance-1 [Cyprinus carpio]
  misc_feature (127)..(449): NCBI GI NO: 161050 NR Description: p48 eggshell protein
  misc_feature (183)..(425): NCBI GI NO: 27881721 NR Description: Unknown (protein for MGC:52724) [Xenopus laevis]
  misc_feature (172)..(424): NCBI GI NO: 37534924 NR Description: putative glycine-rich protein
  misc_feature (158)..(434): NCBI GI NO: 26252108 NR Description: Similar to pigpen [Mus musculus]
  misc_feature (132)..(434): NCBI GI NO: 27820115 NR Description: AT02511p [Drosophila melanogaster]
  misc_feature (132)..(430): NCBI GI NO: 24654243 NR Description: CG15920-PA [Drosophila melanogaster]
MSTLPTPHAGRTTCPHVSPSPVLIHPELPQRVLPQTNKWPIPRCPPHSRSPDQSSKVQSLASHLPSDQPASRSQRSAMATAYYERPRGGAVEEADDFDEFDPTPYGGGYDLAVTFGRPLPPTEETCYPCSAPSTSYDAPHYAASEPSPYGHHAKPKPNYGFRPQQEQQPSYGSGYGSRPEPAAEEGGGYGSGFGSGYGRKKQEEESYGSGYGRKPQAEESYGSGGYGSGYGGQTRPEESYGSAGYGSANPQAETYGSGYGRKPQVEESYGSEYGSGFGRKPQVEESYGSGYGRTPQVEESYGSGYGRKPQVEESYGSGYGSRPQGGEEYGSGGYGRKAQEETYGSSGYGYGRKNEEQSYGGSGYGYEKKASEEDEGAFGSSGYRKPKPYGEETQGSYGYGEEQPKYQSGGYERPSYGGGEGYYGRKKDDDDSDDEKKRRHSKHHHHGHHSKKKKKNGTRSASRAVFFFFF

SEQ ID NO: 32943 - protein, 393 aa, Zea mays subsp. mays
  peptide (1)..(393): Ceres Seq. ID no. 12414471
  misc_feature (98)..(296): Pfam Name: Pfam Description:  Dehydrin
  misc_feature (16)..(368): NCBI GI NO: 24417262 NR Description: unknown [Arabidopsis thaliana]
  misc_feature (16)..(368): NCBI GI NO: 9758332 NR Description: gene_id:MIJ24
  misc_feature (90)..(344): NCBI GI NO: 10954048 NR Description: ovarian fibroin-like substance-1 [Cyprinus carpio]
  misc_feature (51)..(344): NCBI GI NO: 10954048 NR Description: ovarian fibroin-like substance-1 [Cyprinus carpio]
  misc_feature (50)..(372): NCBI GI NO: 161050 NR Description: p48 eggshell protein
  misc_feature (106)..(348): NCBI GI NO: 27881721 NR Description: Unknown (protein for MGC:52724) [Xenopus laevis]
  misc_feature (95)..(347): NCBI GI NO: 37534924 NR Description: putative glycine-rich protein
  misc_feature (81)..(357): NCBI GI NO: 26252108 NR Description: Similar to pigpen [Mus musculus]
  misc_feature (55)..(357): NCBI GI NO: 27820115 NR Description: AT02511p [Drosophila melanogaster]
  misc_feature (55)..(353): NCBI GI NO: 24654243 NR Description: CG15920-PA [Drosophila melanogaster]
MATAYYERPRGGAVEEADDFDEFDPTPYGGGYDLAVTFGRPLPPTEETCYPCSAPSTSYDAPHYAASEPSPYGHHAKPKPNYGFRPQQEQQPSYGSGYGSRPEPAAEEGGGYGSGFGSGYGRKKQEEESYGSGYGRKPQAEESYGSGGYGSGYGGQTRPEESYGSAGYGSANPQAETYGSGYGRKPQVEESYGSEYGSGFGRKPQVEESYGSGYGRTPQVEESYGSGYGRKPQVEESYGSGYGSRPQGGEEYGSGGYGRKAQEETYGSSGYGYGRKNEEQSYGGSGYGYEKKASEEDEGAFGSSGYRKPKPYGEETQGSYGYGEEQPKYQSGGYERPSYGGGEGYYGRKKDDDDSDDEKKRRHSKHHHHGHHSKKKKKNGTRSASRAVFFFFF

SEQ ID NO: 32944 - DNA, 1354 bp, Zea mays subsp. mays
  misc_feature (1)..(1354): Ceres Seq. ID no. 12351706
acaagcaagtggccacctttgagtggatgttggaagaaatagcagccacaagcaagtagtcacctgtgtcatcttattccgatcctagcccctcccatctccaattcctcgcttcctcctcccttctctagttctctgatcctcagcacttagcatcaagcttagcacaccggcgagatggcctccacctccaccttcctgtccaccctcgccagcaggtccgcggcagccgatagcctgcgcagcgccgtgccgtccttcgccaagatcgtcaggttcttgcccgcgcaggcgcagatcagccgcaggcggcgcgcggcggtgctgcccacgccgagggcggcggtgtcgggcaccgagaaggcgccgtcgagcaagcacgagcgcgtggtcaggggtgcacagcacccaggagttcgacgacgcgctcaaggccgccaagaaccggctggtggtggtggagttcgcggcgagcgacagcgaggacagcagccagatctacccgaccatggtgcagctcagccgcacctgcggcgacgtggacttcctgctggtcctgcgcgacgacgagtcggaggccaccgaggagctgttccgccgggagggcgtcacgaaggtgcctcacttcaacttctacaagggcgccgagaaggtgcacgaggaggaggccatcggccccgagcggctcgcgggcgacgtcctctactacggcgacagccactcggcggtggtgcagctgcactcgcgggaggacgtggaggcgctcatcgacgagcaccgcggcgacaagggcaagctcgtcgtgctggacgtgggcctcaagcactgcgggccctgcgtcaaggtgtaccccaccgtgctgaagctgtcgcggtccatggtcgacaacaccgtcttcgcgcgcatgaacggcgacgagaacgacagctgcatggagttcctcagggccatgaagatcgtggaggtgcccactttcgtcttcatcagggacgtccagatcgtcggccgctacgtcggctccggcaagggggagctcgtcggtgagatcctccgatacaacggcgtcagggtcacctactgaagtgaagtagtgaacaacaaaccagtcagagtcagagcaagcaccagccgacaagcaacgcttcgatacaaaattgaagacgatacaaaattttagattactgcgacgtccatcgacgattggtcgatgtttagactgtttattgtgtaccattaccatacttgcccgttaatcgctactattcaatagtaatagtaggcttttgtagggctagcagctgcttgctgctttgcaactttaatcttgtttggtgatctatcaggttgattgtcc

SEQ ID NO: 32945 - protein, 288 aa, Zea mays subsp. mays
  peptide (1)..(288): Ceres Seq. ID no. 12351707
  misc_feature (12)..(288): NCBI GI NO: 29828079 NR Description: putative oxidoreductase
  misc_feature (40)..(267): NCBI GI NO: 93505 NR Description: ORF5 protein - Orf virus (strain NZ2)
  misc_feature (44)..(288): NCBI GI NO: 22957039 NR Description: hypothetical protein [Rhodobacter sphaeroides]
MASTSTFLSTLASRSAAADSLRSAVPSFAKIVRFLPAQAQISRRRRAAVLPTPRAAVSGTEKAPSSKHERVVRGAQHPGVRRRAQGRQEPAGGGGVRGERQRGQQPDLPDHGAAQPHLRRRGLPAGPARRRVGGHRGAVPPGGRHEGASLQLLQGRREGARGGGHRPRAARGRRPLLRRQPLGGGAAALAGGRGGAHRRAPRRQGQARRAGRGPQALRALRQGVPHRAEAVAVHGRQHRLRAHERRRERQLHGVPQGHEDRGGAHFRLHQGRPDRRPLRRLRQGGARR

SEQ ID NO: 32946 - protein, 190 aa, Zea mays subsp. mays
  peptide (1)..(190): Ceres Seq. ID no. 12351708
  misc_feature (1)..(189): NCBI GI NO: 34901636 NR Description: putative plastid thioredoxin
  misc_feature (1)..(190): NCBI GI NO: 7489278 NR Description: thioredoxin-like protein CDSP32
  misc_feature (1)..(190): NCBI GI NO: 21554102 NR Description: chloroplast drought-induced stress protein
  misc_feature (1)..(190): NCBI GI NO: 15222954 NR Description: chloroplast drought-induced stress protein
MVQLSRTCGDVDFLLVLRDDESEATEELFRREGVTKVPHFNFYKGAEKVHEEEAIGPERLAGDVLYYGDSHSAVVQLHSREDVEALIDEHRGDKGKLVVLDVGLKHCGPCVKVYPTVLKLSRSMVDNTVFARMNGDENDSCMEFLRAMKIVEVPTFVFIRDVQIVGRYVGSGKGELVGEILRYNGVRVTY

SEQ ID NO: 32947 - DNA, 1310 bp, Zea mays subsp. mays
  misc_feature (1)..(1310): Ceres Seq. ID no. 12411905
aaaaacaccacacaacacaacacaataatacagcaaaggaggctagcagaagtgcaggattaataagctaagctagtagaaattaagcaaagcataggcacagccatggctacctcctctggttcttgccttattattagcctgttggtggtggtggtggcggcggcgctgtcggcctcaacggcgtcggcacagctgtcgtcgacgttctacgacacgtcgtgccccagcgcgatgtccaccatcagcagcggcgtgaactccgccgtggcgcagcaggctcgtgtgggggcgtcgctgctccggctccacttccacgactgcttcgtccaaggctgcgacgcgtccattctgctgaacgacacgtccggggagcagacccagccgccgaacctaactctgaacccgagggccttcgacgtcgtcaacagcatcaaggcgcaggtggaggcggcgtgcccgggcgtcgtctcctgcgccgacatcctcgccgtcgccgcccgcgacggagttgtcgcgctcggcgggccttcgtggaccgtgcttctgggcagaagggactcgaccggttcgttccctagccagacaagcgacctcccacctccgacgtcgagcctccaagcactgttagccgcgtacagcaagaagaacctcgacgcgaccgacatggtcgctctctcaggcgctcacacaatcgggcaggcccagtgctcgagcttcaacggccacatctacaacgacacgaacatcaacgcggccttcgcgacgtcgctcaaggccaactgccccatgtccggcggcagcagccctggcgccgctggacaccatgaccccgaccgtgttcgacaacgactactacaagaacctgctgtcgcagaaggggctgctgcactcggaccaggagctgttcaacaacggcagcaccgacagcacggtcagcaactttgcgtccagctcggccgccttcaccagcgccttcacggcggccatggtgaagatggggaacctcggcccgctcaccgggaccagtgggcagatcaggctcacctgctggaagctcaactcgtcctaataattaaggacggacgtccgatagacgatcctgcgcaatcgtatcgtacgtgcatgatacgcatacatctggaaactactataccaatgcaaacagagatctatacgtacgagtatgtataacgacgagtgatgtttgtatggatctacgtatgtaacaaggacctctcgtagcgcaaaggcgcgcgttgggagattaattaggtacacaagctattaccacattatatatcactcgc

SEQ ID NO: 32948 - protein, 362 aa, Zea mays subsp. mays
  peptide (1)..(362): Ceres Seq. ID no. 12411906
  misc_feature (47)..(234): Pfam Name: Pfam Description:  Peroxidase
  misc_feature (6)..(234): NCBI GI NO: 3411221 NR Description: peroxidase PXC2 precursor [Avena sativa]
  misc_feature (1)..(321): NCBI GI NO: 15011986 NR Description: putative peroxidase P7X [Zea mays]
  misc_feature (6)..(234): NCBI GI NO: 3411223 NR Description: peroxidase PXC6 precursor [Avena sativa]
  misc_feature (12)..(234): NCBI GI NO: 2117618 NR Description: peroxidase (EC 1.11.1.7) 1 precursor - wheat
  misc_feature (6)..(234): NCBI GI NO: 2117616 NR Description: peroxidase (EC 1.11.1.7) 2 precursor - wheat
  misc_feature (1)..(234): NCBI GI NO: 730298 NR Description: Peroxidase precursor (WP2)
  misc_feature (12)..(236): NCBI GI NO: 2429290 NR Description: peroxidase [Oryza sativa]
  misc_feature (24)..(236): NCBI GI NO: 520570 NR Description: peroxidase
  misc_feature (12)..(233): NCBI GI NO: 34393250 NR Description: peroxidase
  misc_feature (12)..(233): NCBI GI NO: 2429288 NR Description: peroxidase [Oryza sativa]
MATSSGSCLIISLLVVVVAAALSASTASAQLSSTFYDTSCPSAMSTISSGVNSAVAQQARVGASLLRLHFHDCFVQGCDASILLNDTSGEQTQPPNLTLNPRAFDVVNSIKAQVEAACPGVVSCADILAVAARDGVVALGGPSWTVLLGRRDSTGSFPSQTSDLPPPTSSLQALLAAYSKKNLDATDMVALSGAHTIGQAQCSSFNGHIYNDTNINAAFATSLKANCPMSGGSSPGAAGHHDPDRVRQRLLQEPAVAEGAAALGPGAVQQRQHRQHGQQLCVQLGRLHQRLHGGHGEDGEPRPAHRDQWADQAHLLEAQLVLIIKDGRPIDDPAQSYRTCMIRIHLETTIPMQTEIYTYEYV

SEQ ID NO: 32949 - protein, 319 aa, Zea mays subsp. mays
  peptide (1)..(319): Ceres Seq. ID no. 12411907
  misc_feature (4)..(191): Pfam Name: Pfam Description:  Peroxidase
  misc_feature (1)..(191): NCBI GI NO: 3411221 NR Description: peroxidase PXC2 precursor [Avena sativa]
  misc_feature (1)..(278): NCBI GI NO: 15011986 NR Description: putative peroxidase P7X [Zea mays]
  misc_feature (1)..(191): NCBI GI NO: 3411223 NR Description: peroxidase PXC6 precursor [Avena sativa]
  misc_feature (1)..(191): NCBI GI NO: 2117618 NR Description: peroxidase (EC 1.11.1.7) 1 precursor - wheat
  misc_feature (1)..(191): NCBI GI NO: 2117616 NR Description: peroxidase (EC 1.11.1.7) 2 precursor - wheat
  misc_feature (1)..(191): NCBI GI NO: 730298 NR Description: Peroxidase precursor (WP2)
  misc_feature (1)..(193): NCBI GI NO: 2429290 NR Description: peroxidase [Oryza sativa]
  misc_feature (1)..(193): NCBI GI NO: 520570 NR Description: peroxidase
  misc_feature (1)..(190): NCBI GI NO: 34393250 NR Description: peroxidase
  misc_feature (1)..(190): NCBI GI NO: 2429288 NR Description: peroxidase [Oryza sativa]
MSTISSGVNSAVAQQARVGASLLRLHFHDCFVQGCDASILLNDTSGEQTQPPNLTLNPRAFDVVNSIKAQVEAACPGVVSCADILAVAARDGVVALGGPSWTVLLGRRDSTGSFPSQTSDLPPPTSSLQALLAAYSKKNLDATDMVALSGAHTIGQAQCSSFNGHIYNDTNINAAFATSLKANCPMSGGSSPGAAGHHDPDRVRQRLLQEPAVAEGAAALGPGAVQQRQHRQHGQQLCVQLGRLHQRLHGGHGEDGEPRPAHRDQWADQAHLLEAQLVLIIKDGRPIDDPAQSYRTCMIRIHLETTIPMQTEIYTYEYV

SEQ ID NO: 32950 - DNA, 1475 bp, Zea mays subsp. mays
  misc_feature (1)..(1475): Ceres Seq. ID no. 12411901
agcagcgtttcgagcgcgtgacgcgtgacctgaaggtgacgcgggtgttctcgacgctggtggaggagatgaaggcgatcggcatcatagcggcgggcggcggcggcggcgaggcgtcgcagtgcacggacgtgatggcccccgtggcgcactcggagcgcagcccggtgctgctgctgatgggcggcgggatgggcgccggcaagagcacggtgctcaaggagctcaagcaggaggcattctggaccaacgcggaggccaacgccgtggtggtggaggcggacgcgttcaaggaggcggacgtcatctaccgcgccatcagctccatgggccaccacaacgacatgctccagacggcagagctggtccaccagtcgtcgacggatgcggcgtcgtcgctgctggtgacggcgctgaacgaggggcgggacgtcatcctggacggcacgctgtcctgggagcccttcgtggagcagaccatcgccatggcgcgcgccgtgcaccgccagcgctaccgcatgggcgtcggctacaaggtggccgacgacggcaccgtcaccgagaactactgggagcccgcgagcgacgacgccaccgagcaacccccgcggaggccctaccgcatcgaggtggtcggggtcgtctgcgacgcctacctcgccgtggcgaggggcatccggagggccatcatcacccggcgggccgtcagggtcaggtcccagctgcagtcgcacaagcgcttcgccgccgcgttccagcggtacagccgcctcgtggacggcgccaggctctacagcaccaactccatgggctctgccaagctcatcgcgtggaaggacgggatcggaaacagcctgctggtggagccccgggagttcgactgcctggagaaggtgagcgggctcaacgagcacgccacctccgtccacgacctctaccccgacggcaccaccacctgcggctcgcgttccatctgggaggacatgatcgtctcccacggcccgtgccgacacccagcgcgagctcagggaggccatccgctccgtcgagtccggcggcggccaaccggacacaccaccaacaacgccccagcgcgagctcctgggcttcatccgctccctggaggccgccaacgccgagcaagctgcagcaggtcagacaccgacagctacctgttagtggtgaaaatatgggccggatttttttagctagagcacaaccaaaaaacaatagcccacaacatgatccggcacgaaataatatgaaccacggttcgaaggcggatctagaccggaccccaaattctagcccgttgagccccggtatagctcatacatatgggtcgggtttgagccgacacggtccaatgaatcctatattatttgatttctttaatttattaagctacggattttatattgttgtgatatttggactatatatggtcaaattatgatatgattgtttatctcttt

SEQ ID NO: 32951 - protein, 401 aa, Zea mays subsp. mays
  peptide (1)..(401): Ceres Seq. ID no. 12411902
  misc_feature (1)..(352): NCBI GI NO: 99733 NR Description: hypothetical protein H1flk - Arabidopsis thaliana
  misc_feature (1)..(352): NCBI GI NO: 15219698 NR Description: unknown protein; protein id: At1g04280.1
  misc_feature (2)..(361): NCBI GI NO: 15222183 NR Description: unknown protein; protein id: At1g06750.1
  misc_feature (1)..(352): NCBI GI NO: 15224537 NR Description: unknown protein; protein id: At2g30630.1
  misc_feature (1)..(352): NCBI GI NO: 28207050 NR Description: hypothetical protein [Arabidopsis thaliana]
  misc_feature (1)..(352): NCBI GI NO: 28207052 NR Description: hypothetical protein [Arabidopsis thaliana]
  misc_feature (72)..(348): NCBI GI NO: 34909990 NR Description: P0490D09.19
  misc_feature (87)..(361): NCBI GI NO: 1076336 NR Description: hypothetical protein H1
  misc_feature (88)..(361): NCBI GI NO: 388260 NR Description: H1-1flk [Arabidopsis thaliana]
  misc_feature (122)..(352): NCBI GI NO: 99711 NR Description: hypothetical protein H1
QRFERVTRDLKVTRVFSTLVEEMKAIGIIAAGGGGGEASQCTDVMAPVAHSERSPVLLLMGGGMGAGKSTVLKELKQEAFWTNAEANAVVVEADAFKEADVIYRAISSMGHHNDMLQTAELVHQSSTDAASSLLVTALNEGRDVILDGTLSWEPFVEQTIAMARAVHRQRYRMGVGYKVADDGTVTENYWEPASDDATEQPPRRPYRIEVVGVVCDAYLAVARGIRRAIITRRAVRVRSQLQSHKRFAAAFQRYSRLVDGARLYSTNSMGSAKLIAWKDGIGNSLLVEPREFDCLEKVSGLNEHATSVHDLYPDGTTTCGSRSIWEDMIVSHGPCRHPARAQGGHPLRRVRRRPTGHTTNNAPARAPGLHPLPGGRQRRASCSRSDTDSYLLVVKIWAGFF

SEQ ID NO: 32952 - protein, 379 aa, Zea mays subsp. mays
  peptide (1)..(379): Ceres Seq. ID no. 12411903
  misc_feature (1)..(330): NCBI GI NO: 99733 NR Description: hypothetical protein H1flk - Arabidopsis thaliana
  misc_feature (1)..(330): NCBI GI NO: 15219698 NR Description: unknown protein; protein id: At1g04280.1
  misc_feature (1)..(339): NCBI GI NO: 15222183 NR Description: unknown protein; protein id: At1g06750.1
  misc_feature (1)..(330): NCBI GI NO: 15224537 NR Description: unknown protein; protein id: At2g30630.1
  misc_feature (1)..(330): NCBI GI NO: 28207050 NR Description: hypothetical protein [Arabidopsis thaliana]
  misc_feature (1)..(330): NCBI GI NO: 28207052 NR Description: hypothetical protein [Arabidopsis thaliana]
  misc_feature (50)..(326): NCBI GI NO: 34909990 NR Description: P0490D09.19
  misc_feature (65)..(339): NCBI GI NO: 1076336 NR Description: hypothetical protein H1
  misc_feature (66)..(339): NCBI GI NO: 388260 NR Description: H1-1flk [Arabidopsis thaliana]
  misc_feature (100)..(330): NCBI GI NO: 99711 NR Description: hypothetical protein H1
MKAIGIIAAGGGGGEASQCTDVMAPVAHSERSPVLLLMGGGMGAGKSTVLKELKQEAFWTNAEANAVVVEADAFKEADVIYRAISSMGHHNDMLQTAELVHQSSTDAASSLLVTALNEGRDVILDGTLSWEPFVEQTIAMARAVHRQRYRMGVGYKVADDGTVTENYWEPASDDATEQPPRRPYRIEVVGVVCDAYLAVARGIRRAIITRRAVRVRSQLQSHKRFAAAFQRYSRLVDGARLYSTNSMGSAKLIAWKDGIGNSLLVEPREFDCLEKVSGLNEHATSVHDLYPDGTTTCGSRSIWEDMIVSHGPCRHPARAQGGHPLRRVRRRPTGHTTNNAPARAPGLHPLPGGRQRRASCSRSDTDSYLLVVKIWAGFF

SEQ ID NO: 32953 - protein, 357 aa, Zea mays subsp. mays
  peptide (1)..(357): Ceres Seq. ID no. 12411904
  misc_feature (1)..(308): NCBI GI NO: 99733 NR Description: hypothetical protein H1flk - Arabidopsis thaliana
  misc_feature (1)..(308): NCBI GI NO: 15219698 NR Description: unknown protein; protein id: At1g04280.1
  misc_feature (1)..(317): NCBI GI NO: 15222183 NR Description: unknown protein; protein id: At1g06750.1
  misc_feature (1)..(308): NCBI GI NO: 15224537 NR Description: unknown protein; protein id: At2g30630.1
  misc_feature (1)..(308): NCBI GI NO: 28207050 NR Description: hypothetical protein [Arabidopsis thaliana]
  misc_feature (1)..(308): NCBI GI NO: 28207052 NR Description: hypothetical protein [Arabidopsis thaliana]
  misc_feature (28)..(304): NCBI GI NO: 34909990 NR Description: P0490D09.19
  misc_feature (43)..(317): NCBI GI NO: 1076336 NR Description: hypothetical protein H1
  misc_feature (44)..(317): NCBI GI NO: 388260 NR Description: H1-1flk [Arabidopsis thaliana]
  misc_feature (78)..(308): NCBI GI NO: 99711 NR Description: hypothetical protein H1
MAPVAHSERSPVLLLMGGGMGAGKSTVLKELKQEAFWTNAEANAVVVEADAFKEADVIYRAISSMGHHNDMLQTAELVHQSSTDAASSLLVTALNEGRDVILDGTLSWEPFVEQTIAMARAVHRQRYRMGVGYKVADDGTVTENYWEPASDDATEQPPRRPYRIEVVGVVCDAYLAVARGIRRAIITRRAVRVRSQLQSHKRFAAAFQRYSRLVDGARLYSTNSMGSAKLIAWKDGIGNSLLVEPREFDCLEKVSGLNEHATSVHDLYPDGTTTCGSRSIWEDMIVSHGPCRHPARAQGGHPLRRVRRRPTGHTTNNAPARAPGLHPLPGGRQRRASCSRSDTDSYLLVVKIWAGFF

SEQ ID NO: 32954 - DNA, 1676 bp, Zea mays subsp. mays
  misc_feature (1)..(1676): Ceres Seq. ID no. 12411898
ctgttcttccacctgctggctgctcctgcctcccctgcgccccaaacccacccgcctcgccgtccccgcaggccgcagcctgctctcggctcccgccgccgtctaccgcgtcctgcggctgcggtgttgcgtcacctcgggttcgccttaacttccacaatcctcgccgtcctggtgctccgccgcccctccctttgtactcgcgctggagctgcagatccaccgcgacctggcgaccaattcctcctcccgctgaagaattggcgaccttggcctccgcccccgcggcgcggaggagtcaactgtggtagcaaccaccgcggaggctgcaagccttcggtaagggaggaaagttgacttgttggaagccggtccagggccgcgatgacgtcgaccgccgccggcgcgtcgtcgtcggcggcgaagagcgagtcctacctgcgggccgacaagatcgacctcgagagcctggacatccagctggagaagcagctggccaagacctgggagaagcacaaggggtcgtacaaccaggggcccagggaggactgggagatcgacctcgccaagctcgagattcgctacgtcatagcgcagggcacctacggcacggtgtatcgcggcacgtatgatgggcaggacgtcgcagtaaaactattggattggggtgaagatggctttgcgtcagaaactgaaactgccacactgcgagcatcatttaagcaggaggttgctgtctggcatgagctcaaccatccgaatgttacaaagtttgttggtgcatcaatgggtactacagaccttaagattccagccaatagttctaacagtggtgggcgcactgagctgccgccaagagcatgttgtgttgtggtcgaatatctcgctggaggatcactgaagcagtatttaataaagaacaggcgaaggaagcttgcatacaaggttgttgttcagatagcactggatcttgccagaggattgaactatctacattcaagaaagatagtacatcgggatgtaaaaactgaaaatatgctgctcgatacacagcgaaaccttaagattgctgattttggtgttgctcgtgttgaggctcagaatccaaaggacatgacaggcgcgactgggacacttggctacatggccccagaggtgcttgaaggcaagccatacaacagaaagtgtgatgtctacagttttggcatatgcttatgggaaatatactgctgtgacatgccatatccagacctcagttttgcagacgtctcgtccgccgtcgttcaccagaacctgcggcctgacatccctcgctgctgcccaagcccaatggcgaacatcatgcggaagtgctgggacgcaaacccggataagcgccctgacatggacgacgtggtgcggttcctggaggccctcgacacgagcaagggcggtggcatgataccagaaggccaggcaggcgggtgcttgtgtttcttcagagcccgtggtccttagaaccaaccaaccctttccagccatcctctacttgtctctgccctactacagtattggagccagatgtaggcctttgttgttcatcggataggggattgcagataacttgatgacaatctttgtgattggttgacacttgttatacgttctatagtgatgtgaataccagtgaggagtcc

SEQ ID NO: 32955 - protein, 370 aa, Zea mays subsp. mays
  peptide (1)..(370): Ceres Seq. ID no. 12411899
  misc_feature (7)..(370): NCBI GI NO: 18403507 NR Description: expressed protein; protein id: At3g22750
  misc_feature (16)..(370): NCBI GI NO: 15233574 NR Description: kinase like protein; protein id: At4g14780.1
  misc_feature (53)..(370): NCBI GI NO: 15232131 NR Description: putative protein kinase; protein id: At3g01490
  misc_feature (18)..(51): NCBI GI NO: 15232131 NR Description: putative protein kinase; protein id: At3g01490
  misc_feature (7)..(370): NCBI GI NO: 21554375 NR Description: ATMRK1 [Arabidopsis thaliana]
  misc_feature (44)..(370): NCBI GI NO: 29367399 NR Description: putative protein kinase
  misc_feature (18)..(41): NCBI GI NO: 29367399 NR Description: putative protein kinase
  misc_feature (7)..(370): NCBI GI NO: 15229398 NR Description: ATMRK1; protein id: At3g63260
  misc_feature (42)..(370): NCBI GI NO: 34911620 NR Description: protein kinase -like
  misc_feature (53)..(370): NCBI GI NO: 15240597 NR Description: protein kinase; protein id: At5g50000
MTSTAAGASSSAAKSESYLRADKIDLESLDIQLEKQLAKTWEKHKGSYNQGPREDWEIDLAKLEIRYVIAQGTYGTVYRGTYDGQDVAVKLLDWGEDGFASETETATLRASFKQEVAVWHELNHPNVTKFVGASMGTTDLKIPANSSNSGGRTELPPRACCVVVEYLAGGSLKQYLIKNRRRKLAYKVVVQIALDLARGLNYLHSRKIVHRDVKTENMLLDTQRNLKIADFGVARVEAQNPKDMTGATGTLGYMAPEVLEGKPYNRKCDVYSFGICLWEIYCCDMPYPDLSFADVSSAVVHQNLRPDIPRCCPSPMANIMRKCWDANPDKRPDMDDVVRFLEALDTSKGGGMIPEGQAGGCLCFFRARGP

SEQ ID NO: 32956 - protein, 236 aa, Zea mays subsp. mays
  peptide (1)..(236): Ceres Seq. ID no. 12411900
  misc_feature (1)..(236): NCBI GI NO: 18403507 NR Description: expressed protein; protein id: At3g22750
  misc_feature (1)..(236): NCBI GI NO: 15233574 NR Description: kinase like protein; protein id: At4g14780.1
  misc_feature (1)..(236): NCBI GI NO: 15232131 NR Description: putative protein kinase; protein id: At3g01490
  misc_feature (1)..(236): NCBI GI NO: 21554375 NR Description: ATMRK1 [Arabidopsis thaliana]
  misc_feature (1)..(236): NCBI GI NO: 29367399 NR Description: putative protein kinase
  misc_feature (1)..(236): NCBI GI NO: 15229398 NR Description: ATMRK1; protein id: At3g63260
  misc_feature (1)..(236): NCBI GI NO: 34911620 NR Description: protein kinase -like
  misc_feature (1)..(236): NCBI GI NO: 15240597 NR Description: protein kinase; protein id: At5g50000
  misc_feature (1)..(236): NCBI GI NO: 21553402 NR Description: protein kinase [Arabidopsis thaliana]
  misc_feature (1)..(235): NCBI GI NO: 14626298 NR Description: putative protein kinase
MGTTDLKIPANSSNSGGRTELPPRACCVVVEYLAGGSLKQYLIKNRRRKLAYKVVVQIALDLARGLNYLHSRKIVHRDVKTENMLLDTQRNLKIADFGVARVEAQNPKDMTGATGTLGYMAPEVLEGKPYNRKCDVYSFGICLWEIYCCDMPYPDLSFADVSSAVVHQNLRPDIPRCCPSPMANIMRKCWDANPDKRPDMDDVVRFLEALDTSKGGGMIPEGQAGGCLCFFRARGP

SEQ ID NO: 32957 - DNA, 818 bp, Zea mays subsp. mays
  misc_feature (1)..(818): Ceres Seq. ID no. 12381267
ggactcacgaagcagcacactctgcactctcggcaacaactgacggccggaggaagaaggcgcagacgacaagcagaagcttgtgccatcgatcaatggcggcggtgacaaagatctacgtcgtgtactactcgacgtacggccacgtggcgaggctggcggaggagatcaagaagggcgccgactccgtggacggcgtcgaggcaaccatctggcaggtggcggagacgctgccggaggaggcgctggcgaagatgcgcgcgccggcgaggagcgaggagcacccggtgatctcgggcaagcagctggtggacgcggacggcatcctgttcggcttcccggcgcggttcggcatgatggcggcgcagatgaaggcgctgttcgactccacgggcggcctctggcagcggcaggcgctggcgggcaagcccgcggggttcttcttcgcgctgggcacccagggcggcgggcaggaggagacggcgctcacggccgtgtcgcagctcacgcaccacggcatggtgttcgtgcccgtgggctacacgttcggcgccggcatgttcgacatggacgaggtcaggtgctgcagcccgtacggggccggcacgttcgccggcgccgacgggaggagcaggctgcccagcgacgccgagctgcagatggccgcgcaccagggcagctatttcgccgccttcgccaagaagctcaaggcgggagcggccgtcgtggcctgagcctgcctgagtagtgctctctcctctctgcccatcgatgccagctgctcttgtctgcggaaataaaataaagctccattacgc

SEQ ID NO: 32958 - protein, 243 aa, Zea mays subsp. mays
  peptide (1)..(243): Ceres Seq. ID no. 12381268
  misc_feature (36)..(240): NCBI GI NO: 12484052 NR Description: quinone-oxidoreductase QR2
  misc_feature (37)..(239): NCBI GI NO: 34910128 NR Description: putative 1,4-benzoquinone reductase
  misc_feature (36)..(241): NCBI GI NO: 5031275 NR Description: unknown [Prunus armeniaca]
  misc_feature (36)..(240): NCBI GI NO: 15239652 NR Description: quinone reductase, putative; protein id:At5g54500
  misc_feature (34)..(236): NCBI GI NO: 21068664 NR Description: putative quinone oxidoreductase [Cicer arietinum]
  misc_feature (36)..(240): NCBI GI NO: 30687535 NR Description: quinone reductase family [Arabidopsis thaliana]
  misc_feature (32)..(239): NCBI GI NO: 38636776 NR Description: putative quinone-oxidoreductase QR2
  misc_feature (37)..(237): NCBI GI NO: 2564066 NR Description: LEDI-3 protein [Lithospermum erythrorhizon]
  misc_feature (10)..(235): NCBI GI NO: 15234512 NR Description: quinone reductase family; protein id: At4g36750
  misc_feature (12)..(235): NCBI GI NO: 21593010 NR Description: minor allergen [Arabidopsis thaliana]
THEAAHSALSATTDGRRKKAQTTSRSLCHRSMAAVTKIYVVYYSTYGHVARLAEEIKKGADSVDGVEATIWQVAETLPEEALAKMRAPARSEEHPVISGKQLVDADGILFGFPARFGMMAAQMKALFDSTGGLWQRQALAGKPAGFFFALGTQGGGQEETALTAVSQLTHHGMVFVPVGYTFGAGMFDMDEVRCCSPYGAGTFAGADGRSRLPSDAELQMAAHQGSYFAAFAKKLKAGAAVVA

SEQ ID NO: 32959 - protein, 212 aa, Zea mays subsp. mays
  peptide (1)..(212): Ceres Seq. ID no. 12381269
  misc_feature (5)..(209): NCBI GI NO: 12484052 NR Description: quinone-oxidoreductase QR2
  misc_feature (6)..(208): NCBI GI NO: 34910128 NR Description: putative 1,4-benzoquinone reductase
  misc_feature (5)..(210): NCBI GI NO: 5031275 NR Description: unknown [Prunus armeniaca]
  misc_feature (5)..(209): NCBI GI NO: 15239652 NR Description: quinone reductase, putative; protein id:At5g54500
  misc_feature (3)..(205): NCBI GI NO: 21068664 NR Description: putative quinone oxidoreductase [Cicer arietinum]
  misc_feature (5)..(209): NCBI GI NO: 30687535 NR Description: quinone reductase family [Arabidopsis thaliana]
  misc_feature (1)..(208): NCBI GI NO: 38636776 NR Description: putative quinone-oxidoreductase QR2
  misc_feature (6)..(206): NCBI GI NO: 2564066 NR Description: LEDI-3 protein [Lithospermum erythrorhizon]
  misc_feature (1)..(204): NCBI GI NO: 15234512 NR Description: quinone reductase family; protein id: At4g36750
  misc_feature (1)..(204): NCBI GI NO: 21593010 NR Description: minor allergen [Arabidopsis thaliana]
MAAVTKIYVVYYSTYGHVARLAEEIKKGADSVDGVEATIWQVAETLPEEALAKMRAPARSEEHPVISGKQLVDADGILFGFPARFGMMAAQMKALFDSTGGLWQRQALAGKPAGFFFALGTQGGGQEETALTAVSQLTHHGMVFVPVGYTFGAGMFDMDEVRCCSPYGAGTFAGADGRSRLPSDAELQMAAHQGSYFAAFAKKLKAGAAVVA

SEQ ID NO: 32960 - protein, 159 aa, Zea mays subsp. mays
  peptide (1)..(159): Ceres Seq. ID no. 12381270
  misc_feature (1)..(156): NCBI GI NO: 12484052 NR Description: quinone-oxidoreductase QR2
  misc_feature (1)..(155): NCBI GI NO: 34910128 NR Description: putative 1,4-benzoquinone reductase
  misc_feature (1)..(157): NCBI GI NO: 5031275 NR Description: unknown [Prunus armeniaca]
  misc_feature (1)..(156): NCBI GI NO: 15239652 NR Description: quinone reductase, putative; protein id:At5g54500
  misc_feature (1)..(152): NCBI GI NO: 21068664 NR Description: putative quinone oxidoreductase [Cicer arietinum]
  misc_feature (1)..(156): NCBI GI NO: 30687535 NR Description: quinone reductase family [Arabidopsis thaliana]
  misc_feature (1)..(155): NCBI GI NO: 38636776 NR Description: putative quinone-oxidoreductase QR2
  misc_feature (1)..(153): NCBI GI NO: 2564066 NR Description: LEDI-3 protein [Lithospermum erythrorhizon]
  misc_feature (1)..(151): NCBI GI NO: 15234512 NR Description: quinone reductase family; protein id: At4g36750
  misc_feature (1)..(151): NCBI GI NO: 21593010 NR Description: minor allergen [Arabidopsis thaliana]
MRAPARSEEHPVISGKQLVDADGILFGFPARFGMMAAQMKALFDSTGGLWQRQALAGKPAGFFFALGTQGGGQEETALTAVSQLTHHGMVFVPVGYTFGAGMFDMDEVRCCSPYGAGTFAGADGRSRLPSDAELQMAAHQGSYFAAFAKKLKAGAAVVA

SEQ ID NO: 32961 - DNA, 1175 bp, Zea mays subsp. mays
  misc_feature (1)..(1175): Ceres Seq. ID no. 12359591
taatcgaaaatcacactgtggcaactacggccacaactccaggacctgcgggagagaaaccatgctctgcgaagctggccgacaacggcggccatggcggcctaaggctcttcggagtgcaggtccgtatcggcggcggcggcgcaggctcggcgtccatgaagaagagctacagcatggactgcctgcagctcgcggctcctggttgttccctcgtctcgccgtcgacgtcctcctcgttgtcgtcgctgctgctgatgtcgattgaggagggatcggagaggggggcgccaaatgggtacctttctgacggacctcatggcagagctgtgcaggagaggaaaaaaggagttccatgaagcgaggaggagcacaggcagttcctttccggcctggagaagctgggcaagggcgactggcgaggcatctccaggagctacgtgccgacgaggaccccgacgcaggtcgccagccatgcacagaagttcttcctcaggcagagcagcttggggaagaagaagcgccgctccagcctctttgacatggtgccgatttgcgagaacagtgcgagcatctccgatccgctgggcagcgaaggggcctcaacctctctgtcgctgaacgtgccacgccacggcgtcacctccgtctccgagggggcggccttggacctgaattcgacggaggaagacgacagcagggcggacgcgtcgtcggcatcggcatcaggtgcagggaccagaccaccgttcccggcagcgcagacggagccgctgctgcagccttcgtcgcttggccatgggcgcggtcaccactgctctcctttggacctggagctggccatgtcgctgcctgccccatccatcggaacatgacgcgccgccgccgccgtacttatcgccatggaatcccacgcaggtcgcgccataattcgtcagcgcaggttgccaaggccgaggccgtgcgtgcctcgcacaaacgtctcacgtgtaatcagaatcgggttcctgagtatgactatgccatgttccaggttacgctagttgctagctagcttttttttttaagctctgttaatgatattgttacgaaaaatagattctaacataggttcactgttatatatgttatgtagaccatatatttactttgatattaaatttgttttttatggc

SEQ ID NO: 32962 - protein, 118 aa, Zea mays subsp. mays
  peptide (1)..(118): Ceres Seq. ID no. 12359592
  misc_feature (9)..(118): NCBI GI NO: 34912404 NR Description: putative Myb-related transcription factor
  misc_feature (25)..(118): NCBI GI NO: 12406995 NR Description: MCB2 protein [Hordeum vulgare subsp. vulgare]
  misc_feature (29)..(118): NCBI GI NO: 34906444 NR Description: P0671B11.14
  misc_feature (67)..(118): NCBI GI NO: 15241963 NR Description: putative protein; protein id: At5g56840.1
  misc_feature (19)..(118): NCBI GI NO: 34906364 NR Description: unnamed protein product
  misc_feature (33)..(118): NCBI GI NO: 24850307 NR Description: transcription factor MYBS3
  misc_feature (28)..(118): NCBI GI NO: 2062176 NR Description: Myb-related transcription activator
  misc_feature (28)..(118): NCBI GI NO: 15228185 NR Description: putative MYB family transcription factor
  misc_feature (33)..(118): NCBI GI NO: 37536856 NR Description: putative Myb-related protein
  misc_feature (35)..(118): NCBI GI NO: 37536868 NR Description: putative Myb-related protein
IENHTVATTATTPGPAGEKPCSAKLADNGGHGGLRLFGVQVRIGGGGAGSASMKKSYSMDCLQLAAPGCSLVSPSTSSSLSSLLLMSIEEGSERGAPNGYLSDGPHGRAVQERKKGVP

SEQ ID NO: 32963 - protein, 110 aa, Zea mays subsp. mays
  peptide (1)..(110): Ceres Seq. ID no. 12359593
  misc_feature (1)..(110): NCBI GI NO: 34912404 NR Description: putative Myb-related transcription factor
  misc_feature (1)..(110): NCBI GI NO: 12406995 NR Description: MCB2 protein [Hordeum vulgare subsp. vulgare]
  misc_feature (1)..(17): NCBI GI NO: 15241963 NR Description: putative protein; protein id: At5g56840.1
  misc_feature (1)..(80): NCBI GI NO: 24850307 NR Description: transcription factor MYBS3
  misc_feature (1)..(110): NCBI GI NO: 2062176 NR Description: Myb-related transcription activator
  misc_feature (1)..(110): NCBI GI NO: 15228185 NR Description: putative MYB family transcription factor
  misc_feature (1)..(80): NCBI GI NO: 37536856 NR Description: putative Myb-related protein
  misc_feature (1)..(28): NCBI GI NO: 28812130 NR Description: P0443G08.23
  misc_feature (1)..(83): NCBI GI NO: 15238083 NR Description: Myb-related transcription activator-like
  misc_feature (1)..(48): NCBI GI NO: 7705206 NR Description: MybSt1 [Solanum tuberosum]
MVPICENSASISDPLGSEGASTSLSLNVPRHGVTSVSEGAALDLNSTEEDDSRADASSASASGAGTRPPFPAAQTEPLLQPSSLGHGRGHHCSPLDLELAMSLPAPSIGT

SEQ ID NO: 32964 - protein, 108 aa, Zea mays subsp. mays
  peptide (1)..(108): Ceres Seq. ID no. 12359594
MGTFLTDLMAELCRRGKKEFHEARRSTGSSFPAWRSWARATGEASPGATCRRGPRRRSPAMHRSSSSGRAAWGRRSAAPASLTWCRFARTVRASPIRWAAKGPQPLCR

SEQ ID NO: 32965 - protein, 66 aa, Zea mays subsp. mays
  peptide (1)..(66): Ceres Seq. ID no. 12359595
  misc_feature (1)..(66): NCBI GI NO: 34912404 NR Description: putative Myb-related transcription factor
  misc_feature (1)..(66): NCBI GI NO: 12406995 NR Description: MCB2 protein [Hordeum vulgare subsp. vulgare]
  misc_feature (1)..(66): NCBI GI NO: 34906444 NR Description: P0671B11.14
  misc_feature (15)..(66): NCBI GI NO: 15241963 NR Description: putative protein; protein id: At5g56840.1
  misc_feature (1)..(66): NCBI GI NO: 34906364 NR Description: unnamed protein product
  misc_feature (1)..(66): NCBI GI NO: 24850307 NR Description: transcription factor MYBS3
  misc_feature (1)..(66): NCBI GI NO: 2062176 NR Description: Myb-related transcription activator
  misc_feature (1)..(66): NCBI GI NO: 15228185 NR Description: putative MYB family transcription factor
  misc_feature (1)..(66): NCBI GI NO: 37536856 NR Description: putative Myb-related protein
  misc_feature (1)..(66): NCBI GI NO: 37536868 NR Description: putative Myb-related protein
MKKSYSMDCLQLAAPGCSLVSPSTSSSLSSLLLMSIEEGSERGAPNGYLSDGPHGRAVQERKKGVP

SEQ ID NO: 32966 - DNA, 1413 bp, Zea mays subsp. mays
  misc_feature (1)..(1413): Ceres Seq. ID no. 12341043
aagcatttaggtcttacgacgcgcccaaagctcacgccggacctgctcctctccgacggcggcatcggcttcgtgctccgctactttcccaaggcgttcaagccccgcccccgcccaggccacgaggtggacgacctcgccaacctcatcaagctctacgcggactggcactcccgcctgatcccctactactccttcgaacagttcgtgcgcaaactcgagaaattgggtgccggcaaccgcgtcagggacgatggtgggcctctctgaaggggagaaacacttcatccgcggcggcattgcacaagaccttcgcactgatggacgtaggcggctgcagttccggtccctctccgtccaaaccggagtcattccacaggccgaatggctcagcgcgtgttaggttgggggccactgatataatcgctagtgtcaaggctgaactaggaaaaccaagcattcttcaccctgacaaaggaaaagttgccatttttgtcgactgtagtccaaccgctgagcctctgtttgagggtagaggctctgaagaattgtctgctgagctctctgtttccctgcaaagatgcttgttgggtggtaaaagtggtgctggtgctgcaattgatctgtcatccctaattgttgttgatggaaaggtctgctgggatctgtacattgatgggcttgtggtcagttctgatggtaatttgctagatgcgctagctgttgcgataaaggttgctttgagtgatacaggtataccaaaagttaatgtttctgttagtgctgcatctgatgaggaacctgaagttgatgtaagtgatgaggaatttctgcagtttgacacatccggtgtgcctgttattattacattaaccaaggtgggtcggcactacatcgttgatgccacctcagaggaagaatcccagatgagttctgcagtgtcggtgtcagtcaacaggcatggccagatatgcgggcttaccaagaggggaggggcagggctggatccaagcgtcatcttcgacatgatatctgtcgccaagcatgtgagccagcagttcatctccctcttggattcagagattgccgccgccgaagctgaagaagaggctcagtgattgatgaaaaggaaaaaggactggttgcgtaaatgctcgtgtgttccaacttcaaccaaatgctgtagaaatcttcaggaatttggttccatttttatgttattattagtagtagtaaacaccgaggatttggatcctgggaacgaacgacgtcgtgttggctttggctgggctcagaggaacgaatactgaatcttgggtctgatgatctgatcctcttgtgcccccaatccgatgataaatttggcccctctcataccaaaccaaacactatggatttcctccgtccgttttc

SEQ ID NO: 32967 - protein, 371 aa, Zea mays subsp. mays
  peptide (1)..(371): Ceres Seq. ID no. 12341044
  misc_feature (128)..(253): Pfam Name: Pfam Description:  3' exoribonuclease family, domain 1
  misc_feature (128)..(370): NCBI GI NO: 18398046 NR Description: putative 3  exoribonuclease; protein id:At3g07750
  misc_feature (128)..(370): NCBI GI NO: 6648187 NR Description: putative 3' exoribonuclease [Arabidopsis thaliana]
  misc_feature (128)..(370): NCBI GI NO: 6466958 NR Description: hypothetical protein [Arabidopsis thaliana]
  misc_feature (128)..(351): NCBI GI NO: 30962875 NR Description: Similar to Exosome complex exonuclease RRP42
  misc_feature (128)..(366): NCBI GI NO: 473949 NR Description: KIAA0116 [Homo sapiens]
  misc_feature (128)..(366): NCBI GI NO: 24307981 NR Description: KIAA0116 protein [Homo sapiens]
  misc_feature (128)..(366): NCBI GI NO: 34866707 NR Description: similar to Exosome complex exonuclease RRP42
  misc_feature (128)..(351): NCBI GI NO: 28548933 NR Description: RIKEN cDNA 2610002K22 [Mus musculus]
  misc_feature (128)..(351): NCBI GI NO: 21362905 NR Description: Exosome complex exonuclease RRP42
  misc_feature (128)..(360): NCBI GI NO: 28573444 NR Description: CG8395-PA [Drosophila melanogaster]
AFRSYDAPKAHAGPAPLRRRHRLRAPLLSQGVQAPPPPRPRGGRPRQPHQALRGLALPPDPLLLLRTVRAQTREIGCRQPRQGRWWASLKGRNTSSAAALHKTFALMDVGGCSSGPSPSKPESFHRPNGSARVRLGATDIIASVKAELGKPSILHPDKGKVAIFVDCSPTAEPLFEGRGSEELSAELSVSLQRCLLGGKSGAGAAIDLSSLIVVDGKVCWDLYIDGLVVSSDGNLLDALAVAIKVALSDTGIPKVNVSVSAASDEEPEVDVSDEEFLQFDTSGVPVIITLTKVGRHYIVDATSEEESQMSSAVSVSVNRHGQICGLTKRGGAGLDPSVIFDMISVAKHVSQQFISLLDSEIAAAEAEEEAQ

SEQ ID NO: 32968 - protein, 265 aa, Zea mays subsp. mays
  peptide (1)..(265): Ceres Seq. ID no. 12341045
  misc_feature (22)..(147): Pfam Name: Pfam Description:  3' exoribonuclease family, domain 1
  misc_feature (22)..(264): NCBI GI NO: 18398046 NR Description: putative 3  exoribonuclease; protein id:At3g07750
  misc_feature (22)..(264): NCBI GI NO: 6648187 NR Description: putative 3' exoribonuclease [Arabidopsis thaliana]
  misc_feature (22)..(264): NCBI GI NO: 6466958 NR Description: hypothetical protein [Arabidopsis thaliana]
  misc_feature (22)..(245): NCBI GI NO: 30962875 NR Description: Similar to Exosome complex exonuclease RRP42
  misc_feature (22)..(260): NCBI GI NO: 473949 NR Description: KIAA0116 [Homo sapiens]
  misc_feature (22)..(260): NCBI GI NO: 24307981 NR Description: KIAA0116 protein [Homo sapiens]
  misc_feature (22)..(260): NCBI GI NO: 34866707 NR Description: similar to Exosome complex exonuclease RRP42
  misc_feature (22)..(245): NCBI GI NO: 28548933 NR Description: RIKEN cDNA 2610002K22 [Mus musculus]
  misc_feature (22)..(245): NCBI GI NO: 21362905 NR Description: Exosome complex exonuclease RRP42
  misc_feature (22)..(254): NCBI GI NO: 28573444 NR Description: CG8395-PA [Drosophila melanogaster]
MDVGGCSSGPSPSKPESFHRPNGSARVRLGATDIIASVKAELGKPSILHPDKGKVAIFVDCSPTAEPLFEGRGSEELSAELSVSLQRCLLGGKSGAGAAIDLSSLIVVDGKVCWDLYIDGLVVSSDGNLLDALAVAIKVALSDTGIPKVNVSVSAASDEEPEVDVSDEEFLQFDTSGVPVIITLTKVGRHYIVDATSEEESQMSSAVSVSVNRHGQICGLTKRGGAGLDPSVIFDMISVAKHVSQQFISLLDSEIAAAEAEEEAQ

SEQ ID NO: 32969 - DNA, 1710 bp, Zea mays subsp. mays
  misc_feature (1)..(1710): Ceres Seq. ID no. 12374127
atatggcgacaatggcagggcgtcttgttgcccggacgtcgtcctcctcggccaagcgccagcggttcagctccgctgttctcctcctcgctctcttccagagctcgtggtgctacgacgacgcggcggcgacgacgacggtggattacggttacaacaacgagcacgaggccgaccgggtggcgttcctccccgggcagccgaggagccctccggtgtcgcagttcgccgggtacgtcaccgtgaacgagcgcaacgggagggcgctcttctactggttcttcgaggcccagacgtcgccggcgcacaagcctctcctactctggctcaatggaggacctggttgctcgtccgttgggtacggagctgcttctgagttggggcctctcagagtcaacagacacggggcagggcttgagttcaacaattttgcgtggaacaaagaggccaacttgctcttcctagagtctcctgctggggttggcttctcctacaccaacacatcatccgacctcaccaaactggatgatgctttcgtagctgaagatgcatacagcttcctagtaaattggctcaaaaggtttccgcagtataggagccacgaattttatatctccggggagagctacgcaggtcactatgtgccacaacttgctgaacttgtctatgacaggaacaagggcaacaccaacacacacatcaaccttaaaggtttcatggtcggtaatccactaactgacgactactacgactcaaaggggctggctgaatatgcttggagccactcagtagtgtcagacgaagtttacgagcgcatcaagaaggtctgcgacttcagggtctcaaactggaccgatgactgcgatacagcgatgagcgccgtgttcagccagtaccaggagatcgacatctacaacatctacgcgcccagatgcaacctccctccgtcgtcagctgcacttgcacttgctgttgacaaggcagtcgtagccaacagacaggaacatttcaggcgaaggatcaggatgttctccggatatgacccgtgctactcttcgaacgcggaaaagtacttcaacgatgcaggtgtgcagacggcattccatgcgaatgccagtggagctcggaaatgggaagtttgcagtgattcaattttgaggtcatacaatttctcggtgctttctgtcttaccaatctactctaagctcatcaaagcaggactgagagtgtggctctacagtggggatgcagatggtagggtcccggtgatcggatcgcggtattgcgtggaagccctaggcctgcctgtcaagacgcagtggcaaccatggtacctgaacaaacaggttgcgggcagatttgtggagtaccatggcatgacgatggtgacgatcagaggagcagggcatttggtgcctctcaacaaacctgcagaagggctcgcactcatcgacacattccttcagggcaaacagcttcccacacacagatgacaagagtacttagggttgtgattgtgatgagggttattgttttcaaaaaaaaaatcaaggattggacaaactatgtgccccacacacacgggctaatcagtaaggatttcatttccagtttctgcataaattgggttggctacaaatagagctgcggtctgaaatacaattttcagcttacataaaaaatattaaatgaataagtatgataaaacct

SEQ ID NO: 32970 - protein, 496 aa, Zea mays subsp. mays
  peptide (1)..(496): Ceres Seq. ID no. 12374128
  misc_feature (48)..(494): NCBI GI NO: 7670042 NR Description: serine carboxypeptidase II-like protein
  misc_feature (48)..(494): NCBI GI NO: 15228988 NR Description: putative serine carboxypeptidase II
  misc_feature (53)..(419): NCBI GI NO: 34894888 NR Description: putative serine carboxypeptidase II-like protein
  misc_feature (422)..(494): NCBI GI NO: 34894888 NR Description: putative serine carboxypeptidase II-like protein
  misc_feature (57)..(494): NCBI GI NO: 10177810 NR Description: serine carboxypeptidase II-like protein
  misc_feature (55)..(315): NCBI GI NO: 15220282 NR Description: Serine carboxypeptidase isolog
  misc_feature (341)..(496): NCBI GI NO: 15220282 NR Description: Serine carboxypeptidase isolog
  misc_feature (43)..(493): NCBI GI NO: 13877871 NR Description: putative serine carboxypeptidase II
  misc_feature (43)..(493): NCBI GI NO: 15234795 NR Description: SERINE CARBOXYPEPTIDASE II-like protein
  misc_feature (50)..(493): NCBI GI NO: 15232847 NR Description: putative serine carboxypeptidase II
MATMAGRLVARTSSSSAKRQRFSSAVLLLALFQSSWCYDDAAATTTVDYGYNNEHEADRVAFLPGQPRSPPVSQFAGYVTVNERNGRALFYWFFEAQTSPAHKPLLLWLNGGPGCSSVGYGAASELGPLRVNRHGAGLEFNNFAWNKEANLLFLESPAGVGFSYTNTSSDLTKLDDAFVAEDAYSFLVNWLKRFPQYRSHEFYISGESYAGHYVPQLAELVYDRNKGNTNTHINLKGFMVGNPLTDDYYDSKGLAEYAWSHSVVSDEVYERIKKVCDFRVSNWTDDCDTAMSAVFSQYQEIDIYNIYAPRCNLPPSSAALALAVDKAVVANRQEHFRRRIRMFSGYDPCYSSNAEKYFNDAGVQTAFHANASGARKWEVCSDSILRSYNFSVLSVLPIYSKLIKAGLRVWLYSGDADGRVPVIGSRYCVEALGLPVKTQWQPWYLNKQVAGRFVEYHGMTMVTIRGAGHLVPLNKPAEGLALIDTFLQGKQLPTHR

SEQ ID NO: 32971 - protein, 493 aa, Zea mays subsp. mays
  peptide (1)..(493): Ceres Seq. ID no. 12374129
  misc_feature (45)..(491): NCBI GI NO: 7670042 NR Description: serine carboxypeptidase II-like protein
  misc_feature (45)..(491): NCBI GI NO: 15228988 NR Description: putative serine carboxypeptidase II
  misc_feature (50)..(416): NCBI GI NO: 34894888 NR Description: putative serine carboxypeptidase II-like protein
  misc_feature (419)..(491): NCBI GI NO: 34894888 NR Description: putative serine carboxypeptidase II-like protein
  misc_feature (54)..(491): NCBI GI NO: 10177810 NR Description: serine carboxypeptidase II-like protein
  misc_feature (52)..(312): NCBI GI NO: 15220282 NR Description: Serine carboxypeptidase isolog
  misc_feature (338)..(493): NCBI GI NO: 15220282 NR Description: Serine carboxypeptidase isolog
  misc_feature (40)..(490): NCBI GI NO: 13877871 NR Description: putative serine carboxypeptidase II
  misc_feature (40)..(490): NCBI GI NO: 15234795 NR Description: SERINE CARBOXYPEPTIDASE II-like protein
  misc_feature (47)..(490): NCBI GI NO: 15232847 NR Description: putative serine carboxypeptidase II
MAGRLVARTSSSSAKRQRFSSAVLLLALFQSSWCYDDAAATTTVDYGYNNEHEADRVAFLPGQPRSPPVSQFAGYVTVNERNGRALFYWFFEAQTSPAHKPLLLWLNGGPGCSSVGYGAASELGPLRVNRHGAGLEFNNFAWNKEANLLFLESPAGVGFSYTNTSSDLTKLDDAFVAEDAYSFLVNWLKRFPQYRSHEFYISGESYAGHYVPQLAELVYDRNKGNTNTHINLKGFMVGNPLTDDYYDSKGLAEYAWSHSVVSDEVYERIKKVCDFRVSNWTDDCDTAMSAVFSQYQEIDIYNIYAPRCNLPPSSAALALAVDKAVVANRQEHFRRRIRMFSGYDPCYSSNAEKYFNDAGVQTAFHANASGARKWEVCSDSILRSYNFSVLSVLPIYSKLIKAGLRVWLYSGDADGRVPVIGSRYCVEALGLPVKTQWQPWYLNKQVAGRFVEYHGMTMVTIRGAGHLVPLNKPAEGLALIDTFLQGKQLPTHR

SEQ ID NO: 32972 - protein, 258 aa, Zea mays subsp. mays
  peptide (1)..(258): Ceres Seq. ID no. 12374130
  misc_feature (1)..(256): NCBI GI NO: 7670042 NR Description: serine carboxypeptidase II-like protein
  misc_feature (1)..(256): NCBI GI NO: 15228988 NR Description: putative serine carboxypeptidase II
  misc_feature (1)..(181): NCBI GI NO: 34894888 NR Description: putative serine carboxypeptidase II-like protein
  misc_feature (184)..(256): NCBI GI NO: 34894888 NR Description: putative serine carboxypeptidase II-like protein
  misc_feature (1)..(256): NCBI GI NO: 10177810 NR Description: serine carboxypeptidase II-like protein
  misc_feature (1)..(77): NCBI GI NO: 15220282 NR Description: Serine carboxypeptidase isolog
  misc_feature (103)..(258): NCBI GI NO: 15220282 NR Description: Serine carboxypeptidase isolog
  misc_feature (1)..(255): NCBI GI NO: 13877871 NR Description: putative serine carboxypeptidase II
  misc_feature (1)..(255): NCBI GI NO: 15234795 NR Description: SERINE CARBOXYPEPTIDASE II-like protein
  misc_feature (1)..(255): NCBI GI NO: 15232847 NR Description: putative serine carboxypeptidase II
MVGNPLTDDYYDSKGLAEYAWSHSVVSDEVYERIKKVCDFRVSNWTDDCDTAMSAVFSQYQEIDIYNIYAPRCNLPPSSAALALAVDKAVVANRQEHFRRRIRMFSGYDPCYSSNAEKYFNDAGVQTAFHANASGARKWEVCSDSILRSYNFSVLSVLPIYSKLIKAGLRVWLYSGDADGRVPVIGSRYCVEALGLPVKTQWQPWYLNKQVAGRFVEYHGMTMVTIRGAGHLVPLNKPAEGLALIDTFLQGKQLPTHR

SEQ ID NO: 32973 - DNA, 1371 bp, Zea mays subsp. mays
  misc_feature (1)..(1371): Ceres Seq. ID no. 12340997
gaaaccgtaaaccgtgaatggccatcgaggtccaaaaatccatctggattctggagagaggagaccccaaaatcgcagcgcgcgaaaacgcaggagcaacccgcccactcgccaccaccgcccgcgcgcacggcggcgaccgatggccccgctcgtgccgatgtcgcagccatgggtggagaaataccggccgaggcaggtcaaggatgtggctcaccaggaggaggtgattcgggtgctcaacaacaccctccagaccgccgacctgccgcacatgctgttctacggcccgccggggacgggaaagaccaccaccgcactagccatcgcctaccagctctacggtccagagctgtataagtcaagggttttggagctcaatgctagtgatgatcgtggaattaatgtggtgaggacgaaaatcaagaactttgctgctgttgctgttggtactgcacggaaagctggttatccctgcccaccttacaagattattatacttgacgaagcagattcaatgacagaagatgcccagaatgctttgaggcgtaccacagagacttactccaaagtgaccagattcttttttatatgcaactatatcagcaggataatagaaccacttgcatcaagatgtgcaaagtttaggttcaagcctctttcagaagaagtgatgagtagtcgcattatgcatatatgcaatgaagaaggcctcaatcttaatgctcaggcgatgtccacactgagtgtcatttctcaaggtgatcttcgtcgtgctataacctaccttcagagtgcagctcgcttatttggatcttctatctcttccagtgacctgatcagtgtttcaggggttatccctgaagatgttgtcaagtcactgcttgcagcctgcagatctggtgaatttgacgtggcaaacaaggaagttagcagcattatagcagatgggtatccggtctcacagctgatggcacagtttctagatgtgattgttagcgcggatgatattccagatgatcaaaaggcaaggatatgtaaaaagcttggggaaactgataagtgcttggttgatggggcagatgagtatctacagctgctggatgtcgccagcgagactattcgcgctcttttcaacatgccgcggacgctggtcttctaagagttcataaagaggaatggcggtttcgatccttggcgaaaactttttcctgcctcttagatgccgcccaaggttaatctgcctcccctactgctctgatgttgttagcttcgtgatgggttgaaaaagcgatgaactcagccttaaaatcccgctgaactgtgcctgtggatggatgcccaatatgacaatgaacatttctcatcgtt

SEQ ID NO: 32974 - protein, 339 aa, Zea mays subsp. mays
  peptide (1)..(339): Ceres Seq. ID no. 12340998
  misc_feature (44)..(223): Pfam Name: AAA Pfam Description: ATPase family associated with various cellular activities
  misc_feature (1)..(339): NCBI GI NO: 10798806 NR Description: OsRFC 37 kDa subunit
  misc_feature (1)..(333): NCBI GI NO: 18395021 NR Description: putative replication factor; protein id:At1g21690
  misc_feature (1)..(217): NCBI GI NO: 25301746 NR Description: hypothetical protein F8K7
  misc_feature (225)..(333): NCBI GI NO: 25301746 NR Description: hypothetical protein F8K7
  misc_feature (1)..(333): NCBI GI NO: 30687479 NR Description: replication factor -related [Arabidopsis thaliana]
  misc_feature (10)..(320): NCBI GI NO: 34097966 NR Description: replication factor C p37 subunit [Xenopus laevis]
  misc_feature (10)..(330): NCBI GI NO: 34869304 NR Description: similar to expressed sequence AU040575
  misc_feature (10)..(330): NCBI GI NO: 4506491 NR Description: replication factor C
  misc_feature (10)..(330): NCBI GI NO: 30584245 NR Description: Homo sapiens replication factor C
  misc_feature (10)..(330): NCBI GI NO: 21703948 NR Description: expressed sequence AU040575
MAPLVPMSQPWVEKYRPRQVKDVAHQEEVIRVLNNTLQTADLPHMLFYGPPGTGKTTTALAIAYQLYGPELYKSRVLELNASDDRGINVVRTKIKNFAAVAVGTARKAGYPCPPYKIIILDEADSMTEDAQNALRRTTETYSKVTRFFFICNYISRIIEPLASRCAKFRFKPLSEEVMSSRIMHICNEEGLNLNAQAMSTLSVISQGDLRRAITYLQSAARLFGSSISSSDLISVSGVIPEDVVKSLLAACRSGEFDVANKEVSSIIADGYPVSQLMAQFLDVIVSADDIPDDQKARICKKLGETDKCLVDGADEYLQLLDVASETIRALFNMPRTLVF

SEQ ID NO: 32975 - protein, 333 aa, Zea mays subsp. mays
  peptide (1)..(333): Ceres Seq. ID no. 12340999
  misc_feature (38)..(217): Pfam Name: AAA Pfam Description: ATPase family associated with various cellular activities
  misc_feature (1)..(333): NCBI GI NO: 10798806 NR Description: OsRFC 37 kDa subunit
  misc_feature (1)..(327): NCBI GI NO: 18395021 NR Description: putative replication factor; protein id:At1g21690
  misc_feature (1)..(211): NCBI GI NO: 25301746 NR Description: hypothetical protein F8K7
  misc_feature (219)..(327): NCBI GI NO: 25301746 NR Description: hypothetical protein F8K7
  misc_feature (1)..(327): NCBI GI NO: 30687479 NR Description: replication factor -related [Arabidopsis thaliana]
  misc_feature (4)..(314): NCBI GI NO: 34097966 NR Description: replication factor C p37 subunit [Xenopus laevis]
  misc_feature (4)..(324): NCBI GI NO: 34869304 NR Description: similar to expressed sequence AU040575
  misc_feature (4)..(324): NCBI GI NO: 4506491 NR Description: replication factor C
  misc_feature (4)..(324): NCBI GI NO: 30584245 NR Description: Homo sapiens replication factor C
  misc_feature (4)..(324): NCBI GI NO: 21703948 NR Description: expressed sequence AU040575
MSQPWVEKYRPRQVKDVAHQEEVIRVLNNTLQTADLPHMLFYGPPGTGKTTTALAIAYQLYGPELYKSRVLELNASDDRGINVVRTKIKNFAAVAVGTARKAGYPCPPYKIIILDEADSMTEDAQNALRRTTETYSKVTRFFFICNYISRIIEPLASRCAKFRFKPLSEEVMSSRIMHICNEEGLNLNAQAMSTLSVISQGDLRRAITYLQSAARLFGSSISSSDLISVSGVIPEDVVKSLLAACRSGEFDVANKEVSSIIADGYPVSQLMAQFLDVIVSADDIPDDQKARICKKLGETDKCLVDGADEYLQLLDVASETIRALFNMPRTLVF

SEQ ID NO: 32976 - protein, 295 aa, Zea mays subsp. mays
  peptide (1)..(295): Ceres Seq. ID no. 12341000
  misc_feature (1)..(179): Pfam Name: AAA Pfam Description: ATPase family associated with various cellular activities
  misc_feature (1)..(295): NCBI GI NO: 10798806 NR Description: OsRFC 37 kDa subunit
  misc_feature (1)..(289): NCBI GI NO: 18395021 NR Description: putative replication factor; protein id:At1g21690
  misc_feature (1)..(173): NCBI GI NO: 25301746 NR Description: hypothetical protein F8K7
  misc_feature (181)..(289): NCBI GI NO: 25301746 NR Description: hypothetical protein F8K7
  misc_feature (1)..(289): NCBI GI NO: 30687479 NR Description: replication factor -related [Arabidopsis thaliana]
  misc_feature (1)..(276): NCBI GI NO: 34097966 NR Description: replication factor C p37 subunit [Xenopus laevis]
  misc_feature (1)..(286): NCBI GI NO: 34869304 NR Description: similar to expressed sequence AU040575
  misc_feature (1)..(286): NCBI GI NO: 4506491 NR Description: replication factor C
  misc_feature (1)..(286): NCBI GI NO: 30584245 NR Description: Homo sapiens replication factor C
  misc_feature (1)..(286): NCBI GI NO: 21703948 NR Description: expressed sequence AU040575
MLFYGPPGTGKTTTALAIAYQLYGPELYKSRVLELNASDDRGINVVRTKIKNFAAVAVGTARKAGYPCPPYKIIILDEADSMTEDAQNALRRTTETYSKVTRFFFICNYISRIIEPLASRCAKFRFKPLSEEVMSSRIMHICNEEGLNLNAQAMSTLSVISQGDLRRAITYLQSAARLFGSSISSSDLISVSGVIPEDVVKSLLAACRSGEFDVANKEVSSIIADGYPVSQLMAQFLDVIVSADDIPDDQKARICKKLGETDKCLVDGADEYLQLLDVASETIRALFNMPRTLVF

SEQ ID NO: 32977 - DNA, 1665 bp, Zea mays subsp. mays
  misc_feature (1)..(1665): Ceres Seq. ID no. 13633473
attaaccgcctctccctcgctcctctcgctcgctcggctcactccctctccaaagcggcagcctcacgcagtcacgcgctccaccacgccacctccctctactcactcatgttgttttccgtccatccgcccaccggttcgtagcccgcgccgcaaaaccctagccccgggaggatcgcggggcgcctccgcggtgccagcgacgtggctcgtttgatccgattgctggtcgagccccgcccctcgctgccgcgcttcgctccggctgtgcagcggcgtgagcaccgagcacactcgcgaatggggaactgctggggtgcgcggatcaaggatgggagccctcaccctggcgcctcaggaatgttctcaaagagtagtggcaaggatgggagtaggcttagcggctgtagtagtcgagcctcttcagcttctatgccaccaagtgcgaagactgaatgtgaaatcctgcaatccgccaatgttaagatcttcaccttcaataatctcaaggcagccacaaggaatttccgtcctgatagtgttctaggtgaaggagggtttggatctgtctataaaggatggatagatgagaacacattatcaccttgcagacctggcactggaatcgctgttgctgtgaaaagactcaaccatgagggtttgcaagggcaccgagagtggttggcggaagttaattacctaggtcagttctgtcatcccaaccttgtcaagctgattggatactgcttagaggatgagcaccgactgctagtatacgagttcatgccccgtgggaacatggaaaaccatctgtttaggagaggctcatacttccaacctctgtcatggaaccttagaatgaaggttgcactgggagcagcaaaaggactagcttaccttcatagtgcagaggcaaaagttatttaccgagattttaagacttcgaacatcctccttgacacagattattctgcgaagctttctgattttggattggctaaggatggtcctgtcggtgagaagagccatgtgtccacaagagttatgggaacatatggttatgcagctcctgagtatctttcaacaggtcacctaactgcaaagagcgacatctatagctttggggtagtgcttctggagatgctgtcaggccgccgcgccatcgacaagaaccgcccccagggtgagcacaatcttgtggagtgggctcgaccttacctcacacataagcgcaagatattccggatcctggatacgaggctggaaggtcaatacaatctgaacggtgcacaaacaattgctgcccttgctctcgaatgcctatcctacgaagctaagatgaggccgactatggacgctgtggttgctattctagaagagctccagggctctggtgaagccgagaagaagcttcaagaacccaaggccggaaccaaacaggcacctgctgctgtgagtgctagcatgagcagcagccgcaagcctcgccggaaaagtctgggagacacaaaggagactgttggtggtccagatcccaaaccattggcccattctcgttagcaagggaaagcattgcctggtcattgtcgttagttagactgtagctcgcttgtgaatatgctatggtctgtgtatgtatgttcagagggtaatcgggcttttggc

SEQ ID NO: 32978 - protein, 419 aa, Zea mays subsp. mays
  peptide (1)..(419): Ceres Seq. ID no. 13633474
  misc_feature (1)..(391): NCBI GI NO: 34897424 NR Description: putative protein kinase
  misc_feature (1)..(400): NCBI GI NO: 14719339 NR Description: putative protein kinase [Oryza sativa]
  misc_feature (1)..(399): NCBI GI NO: 34906046 NR Description: putative serine/threonine-specific protein kinase
  misc_feature (1)..(367): NCBI GI NO: 15227001 NR Description: protein kinase (APK1b) [Arabidopsis thaliana]
  misc_feature (1)..(281): NCBI GI NO: 8778537 NR Description: F22G5.5 [Arabidopsis thaliana]
  misc_feature (261)..(419): NCBI GI NO: 8778537 NR Description: F22G5.5 [Arabidopsis thaliana]
  misc_feature (1)..(415): NCBI GI NO: 15222437 NR Description: protein kinase (APK1a) [Arabidopsis thaliana]
  misc_feature (1)..(375): NCBI GI NO: 15241749 NR Description: protein kinase, putative [Arabidopsis thaliana]
  misc_feature (1)..(375): NCBI GI NO: 166809 NR Description: protein kinase
  misc_feature (1)..(401): NCBI GI NO: 15225520 NR Description: protein kinase, putative [Arabidopsis thaliana]
MGNCWGARIKDGSPHPGASGMFSKSSGKDGSRLSGCSSRASSASMPPSAKTECEILQSANVKIFTFNNLKAATRNFRPDSVLGEGGFGSVYKGWIDENTLSPCRPGTGIAVAVKRLNHEGLQGHREWLAEVNYLGQFCHPNLVKLIGYCLEDEHRLLVYEFMPRGNMENHLFRRGSYFQPLSWNLRMKVALGAAKGLAYLHSAEAKVIYRDFKTSNILLDTDYSAKLSDFGLAKDGPVGEKSHVSTRVMGTYGYAAPEYLSTGHLTAKSDIYSFGVVLLEMLSGRRAIDKNRPQGEHNLVEWARPYLTHKRKIFRILDTRLEGQYNLNGAQTIAALALECLSYEAKMRPTMDAVVAILEELQGSGEAEKKLQEPKAGTKQAPAAVSASMSSSRKPRRKSLGDTKETVGGPDPKPLAHSR

SEQ ID NO: 32979 - protein, 399 aa, Zea mays subsp. mays
  peptide (1)..(399): Ceres Seq. ID no. 13633475
  misc_feature (1)..(371): NCBI GI NO: 34897424 NR Description: putative protein kinase
  misc_feature (1)..(380): NCBI GI NO: 14719339 NR Description: putative protein kinase [Oryza sativa]
  misc_feature (1)..(379): NCBI GI NO: 34906046 NR Description: putative serine/threonine-specific protein kinase
  misc_feature (1)..(347): NCBI GI NO: 15227001 NR Description: protein kinase (APK1b) [Arabidopsis thaliana]
  misc_feature (1)..(261): NCBI GI NO: 8778537 NR Description: F22G5.5 [Arabidopsis thaliana]
  misc_feature (241)..(399): NCBI GI NO: 8778537 NR Description: F22G5.5 [Arabidopsis thaliana]
  misc_feature (1)..(395): NCBI GI NO: 15222437 NR Description: protein kinase (APK1a) [Arabidopsis thaliana]
  misc_feature (1)..(355): NCBI GI NO: 15241749 NR Description: protein kinase, putative [Arabidopsis thaliana]
  misc_feature (1)..(355): NCBI GI NO: 166809 NR Description: protein kinase
  misc_feature (1)..(381): NCBI GI NO: 15225520 NR Description: protein kinase, putative [Arabidopsis thaliana]
MFSKSSGKDGSRLSGCSSRASSASMPPSAKTECEILQSANVKIFTFNNLKAATRNFRPDSVLGEGGFGSVYKGWIDENTLSPCRPGTGIAVAVKRLNHEGLQGHREWLAEVNYLGQFCHPNLVKLIGYCLEDEHRLLVYEFMPRGNMENHLFRRGSYFQPLSWNLRMKVALGAAKGLAYLHSAEAKVIYRDFKTSNILLDTDYSAKLSDFGLAKDGPVGEKSHVSTRVMGTYGYAAPEYLSTGHLTAKSDIYSFGVVLLEMLSGRRAIDKNRPQGEHNLVEWARPYLTHKRKIFRILDTRLEGQYNLNGAQTIAALALECLSYEAKMRPTMDAVVAILEELQGSGEAEKKLQEPKAGTKQAPAAVSASMSSSRKPRRKSLGDTKETVGGPDPKPLAHSR

SEQ ID NO: 32980 - protein, 375 aa, Zea mays subsp. mays
  peptide (1)..(375): Ceres Seq. ID no. 13633476
  misc_feature (1)..(347): NCBI GI NO: 34897424 NR Description: putative protein kinase
  misc_feature (1)..(356): NCBI GI NO: 14719339 NR Description: putative protein kinase [Oryza sativa]
  misc_feature (1)..(355): NCBI GI NO: 34906046 NR Description: putative serine/threonine-specific protein kinase
  misc_feature (1)..(323): NCBI GI NO: 15227001 NR Description: protein kinase (APK1b) [Arabidopsis thaliana]
  misc_feature (1)..(237): NCBI GI NO: 8778537 NR Description: F22G5.5 [Arabidopsis thaliana]
  misc_feature (217)..(375): NCBI GI NO: 8778537 NR Description: F22G5.5 [Arabidopsis thaliana]
  misc_feature (1)..(371): NCBI GI NO: 15222437 NR Description: protein kinase (APK1a) [Arabidopsis thaliana]
  misc_feature (1)..(331): NCBI GI NO: 15241749 NR Description: protein kinase, putative [Arabidopsis thaliana]
  misc_feature (1)..(331): NCBI GI NO: 166809 NR Description: protein kinase
  misc_feature (1)..(357): NCBI GI NO: 15225520 NR Description: protein kinase, putative [Arabidopsis thaliana]
MPPSAKTECEILQSANVKIFTFNNLKAATRNFRPDSVLGEGGFGSVYKGWIDENTLSPCRPGTGIAVAVKRLNHEGLQGHREWLAEVNYLGQFCHPNLVKLIGYCLEDEHRLLVYEFMPRGNMENHLFRRGSYFQPLSWNLRMKVALGAAKGLAYLHSAEAKVIYRDFKTSNILLDTDYSAKLSDFGLAKDGPVGEKSHVSTRVMGTYGYAAPEYLSTGHLTAKSDIYSFGVVLLEMLSGRRAIDKNRPQGEHNLVEWARPYLTHKRKIFRILDTRLEGQYNLNGAQTIAALALECLSYEAKMRPTMDAVVAILEELQGSGEAEKKLQEPKAGTKQAPAAVSASMSSSRKPRRKSLGDTKETVGGPDPKPLAHSR

SEQ ID NO: 32981 - DNA, 1474 bp, Zea mays subsp. mays
  misc_feature (1)..(1474): Ceres Seq. ID no. 12411879
gctttccacaaaatctgtggagattattcgaaaccatctcgtcgctcacgaacgcgtcagaggttttgcagaaacggagcgcgtgcggcgttcgtcggcaacgttggcgtccatggagagcaccgcggtccgaggaagaggcagaaggccgcctcggcctctggatccgtggccccgtacttgccccaggagctcgtacggaacatcctcctccgcctgccttccaggtccgtcctccgcttccgcgccgtttgcaaggactggctccggatcgtctccgaccgcgagttcgcgccgaccacaaccgccaccagccggcgatgcccctcgtctccttcctccgcagcgccgccggtagcaagagggggcagacggactgctgcgtcgacgcatttgacctcagcgccgacagtttccggtccgtcgtccggttcgccgacaaggggacgcggtgcagcagcttcgacatccacggctcctgcgacggtctcctccttctcagcttcgatgcccgcttctacgtttgcaacccggcaacgcaccagtggacgcgcctcccggcgcccctccgcgcctcgtggctcgccggcttctaccgccacgagcccaccggagagtaccgggccttgttctaccggggccagtggcccgggacggactactacatcatggtggcggactccaggaaagggaggggaattggcctgccgtcggagaaatatgggtacaagttcaggagacaaccgtatagcctgccggtcctgctccgcggccacctccactggatggcagccattgaaggctacgactacgagatgttggcgttcaacacgacgactgaaaagttcacggttatgtgccctcctgtggttcggtggcacatgtcgctagctgaggtgggcaacgagctcgcgttgttgagctgcggccaccaggtcccgatgctcgagctctggattctgaaggattacgagaacaagagctgggtctgcacgcactggattcggctgccggagttgaagatgagcaccttcgcgttcgatgacttctcgcgaatgattttcgtgtcagaaaagggagttctgatagccaccccggagcagaagctgttgcgctatgacctgaatgggactctgctggaaagcttcccttgcaataatggcagccatctcaagattactccgtacaccttcaaggagagcctcgttcggcatgcattctttgagacaccggattgcaatgccgatggtcatgaagatgaagatgaaccagaaccaccacctttcttcctggggctgtagacccggacccggtggtgatggatctcatgggaacccttggttggagttgatcagcggttcatgcttcagatcggtattacagcctcggtagatgaactgagagtaagctacatttttcttttgtctctcttttatacccatcattccatcaataatgtcactatgtttgtccc

SEQ ID NO: 32982 - protein, 432 aa, Zea mays subsp. mays
  peptide (1)..(432): Ceres Seq. ID no. 12411880
  misc_feature (96)..(408): NCBI GI NO: 37533944 NR Description: hypothetical protein
  misc_feature (100)..(408): NCBI GI NO: 37530720 NR Description: unknown protein
  misc_feature (100)..(407): NCBI GI NO: 38346536 NR Description: OSJNBa0040D17.11
  misc_feature (56)..(432): NCBI GI NO: 38344215 NR Description: OSJNBb0026E15.3
  misc_feature (100)..(414): NCBI GI NO: 38346527 NR Description: OSJNBa0040D17.2
  misc_feature (194)..(407): NCBI GI NO: 38346044 NR Description: OSJNBa0059D20.16
  misc_feature (252)..(407): NCBI GI NO: 38346045 NR Description: OSJNBa0059D20.17
FPQNLWRLFETISSLTNASEVLQKRSACGVRRQRWRPWRAPRSEEEAEGRLGLWIRGPVLAPGARTEHPPPPAFQVRPPLPRRLQGLAPDRLRPRVRADHNRHQPAMPLVSFLRSAAGSKRGQTDCCVDAFDLSADSFRSVVRFADKGTRCSSFDIHGSCDGLLLLSFDARFYVCNPATHQWTRLPAPLRASWLAGFYRHEPTGEYRALFYRGQWPGTDYYIMVADSRKGRGIGLPSEKYGYKFRRQPYSLPVLLRGHLHWMAAIEGYDYEMLAFNTTTEKFTVMCPPVVRWHMSLAEVGNELALLSCGHQVPMLELWILKDYENKSWVCTHWIRLPELKMSTFAFDDFSRMIFVSEKGVLIATPEQKLLRYDLNGTLLESFPCNNGSHLKITPYTFKESLVRHAFFETPDCNADGHEDEDEPEPPPFFLGL

SEQ ID NO: 32983 - protein, 326 aa, Zea mays subsp. mays
  peptide (1)..(326): Ceres Seq. ID no. 12411881
  misc_feature (1)..(302): NCBI GI NO: 37533944 NR Description: hypothetical protein
  misc_feature (1)..(302): NCBI GI NO: 37530720 NR Description: unknown protein
  misc_feature (1)..(301): NCBI GI NO: 38346536 NR Description: OSJNBa0040D17.11
  misc_feature (1)..(326): NCBI GI NO: 38344215 NR Description: OSJNBb0026E15.3
  misc_feature (1)..(308): NCBI GI NO: 38346527 NR Description: OSJNBa0040D17.2
  misc_feature (88)..(301): NCBI GI NO: 38346044 NR Description: OSJNBa0059D20.16
  misc_feature (146)..(301): NCBI GI NO: 38346045 NR Description: OSJNBa0059D20.17
MPLVSFLRSAAGSKRGQTDCCVDAFDLSADSFRSVVRFADKGTRCSSFDIHGSCDGLLLLSFDARFYVCNPATHQWTRLPAPLRASWLAGFYRHEPTGEYRALFYRGQWPGTDYYIMVADSRKGRGIGLPSEKYGYKFRRQPYSLPVLLRGHLHWMAAIEGYDYEMLAFNTTTEKFTVMCPPVVRWHMSLAEVGNELALLSCGHQVPMLELWILKDYENKSWVCTHWIRLPELKMSTFAFDDFSRMIFVSEKGVLIATPEQKLLRYDLNGTLLESFPCNNGSHLKITPYTFKESLVRHAFFETPDCNADGHEDEDEPEPPPFFLGL

SEQ ID NO: 32984 - protein, 296 aa, Zea mays subsp. mays
  peptide (1)..(296): Ceres Seq. ID no. 12411882
  misc_feature (61)..(97): NCBI GI NO: 37533944 NR Description: hypothetical protein
  misc_feature (39)..(97): NCBI GI NO: 37530720 NR Description: unknown protein
  misc_feature (61)..(112): NCBI GI NO: 38346536 NR Description: OSJNBa0040D17.11
  misc_feature (61)..(100): NCBI GI NO: 38346527 NR Description: OSJNBa0040D17.2
  misc_feature (61)..(116): NCBI GI NO: 38346045 NR Description: OSJNBa0059D20.17
  misc_feature (99)..(296): NCBI GI NO: 29250754 NR Description: GLP_49_64409_65443 [Giardia lamblia ATCC 50803]
  misc_feature (101)..(296): NCBI GI NO: 29250754 NR Description: GLP_49_64409_65443 [Giardia lamblia ATCC 50803]
  misc_feature (98)..(290): NCBI GI NO: 7248459 NR Description: arabinogalactan protein [Zea mays]
  misc_feature (101)..(223): NCBI GI NO: 32699068 NR Description: hypothetical protein FLJ35107 [Homo sapiens]
  misc_feature (45)..(203): NCBI GI NO: 37536980 NR Description: putative transposase
AFHKICGDYSKPSRRSRTRQRFCRNGARAAFVGNVGVHGEHRGPRKRQKAASASGSVAPYLPQELVRNILLRLPSRSVLRFRAVCKDWLRIVSDREFAPTTTATSRRCPSSPSSAAPPVARGGRRTAASTHLTSAPTVSGPSSGSPTRGRGAAASTSTAPATVSSFSASMPASTFATRQRTSGRASRRPSAPRGSPASTATSPPESTGPCSTGASGPGRTTTSWWRTPGKGGELACRRRNMGTSSGDNRIACRSCSAATSTGWQPLKATTTRCWRSTRRLKSSRLCALLWFGGTCR

SEQ ID NO: 32985 - DNA, 1545 bp, Zea mays subsp. mays
  misc_feature (1)..(1545): Ceres Seq. ID no. 12413819
gcaatcttccggaacatccatcgatctccccccagcggcgaggagagccggcggccacaggaaggagaaatggcttccgcacacaacgctctccgggtgtttttcatcctagccgtggtatgtgccgtatgcacagcgaaaaggacaggagccaagaaggaagaatcggcggcagcccctggtggtgctgctggaggcagcggcgggacgttcgacatctccaagctcggcgcgaccagcgacgggcaagacggactgcacaaaggcagtccaggacgcgtggacgtcagcgtgcgaagcgaccggaagcgccacggtggtgatccccaagggcgactacctggtcggccctctcaacttcactgggccatgcaagggcagcagcatcgccatccagctggatggcaacctgctgggatcaaacgacctgaacaagtacacggcgagctggatcgaattgtctcacgttaacaacatcgggatcaccggctcgggcacgctggacggccaggggaccgccgtttatagcaagagcaagaccgacaacgtgaaggcgatgcccaacacactggtgctgtttcacgtgatcaacgccactgtcgccggaatcaaactactcaactccaagttcttccacatcaacatcgacaactcagagagcatcaccgtgaaggacgtgaacgtcaccgcgcccgccgacgttgagaacacggacggcgtccacgtcggaggctcctccaagatcagcatcctcaactcgaccatcggcaccggcgacgactgcgtctcgattgggcccgggtgcaacggcgtcttggtggacagcatcacctgcggccccgggcagggcatcagcgtcggctgcctaggccgctacaaggacgagaaggacgtgagcgacatcacggtgcggaacctgctcaagaacaccaccaacggcgtgcgcatcaagtcgtacgtggacgccgagtccgtgctgacggcctcccatctcaccttcgagaacatcaggatggaggaggtggccaaccccatcgtcatcgaccagtacttctgcccgcagaaggtatgccctggcaagcggagcaactcctcgcatgtctccgtcaaggacgtcacgttccgcaacatcaccggcacgtcgtccacgcccgaggccatcagcctgctctgctcggagacgcagccatgcagcggcgtctccctcatcgatgtcaacgtggagtacgccggcaagaacaacaaaaccatggccgtctgcagcaacgccaagggcaccgccaagggaagcatcgaggcactggcttgcctggtctgatgatgaccttccttttgcatgcatgcatggtatctcatccttgatgatgatctagctcactagttctttttaatttccgcttcattcgcttttccaaattcgattgtgtttcagccaagttgtttagcgggacatctcttgtctgatcttcctgctaaatagagttggactcctatatatagaggccttccggcacatataatatacgtcggaccaatattattgtg

SEQ ID NO: 32986 - protein, 253 aa, Zea mays subsp. mays
  peptide (1)..(253): Ceres Seq. ID no. 12413820
  misc_feature (1)..(251): Pfam Name: Pfam Description:  Glycosyl hydrolases family 28
  misc_feature (1)..(251): NCBI GI NO: 4826572 NR Description: polygalacturonase [Phleum pratense]
  misc_feature (1)..(252): NCBI GI NO: 20805058 NR Description: putative exopolygalacturorase precursor
  misc_feature (1)..(251): NCBI GI NO: 548493 NR Description: Exopolygalacturonase precursor
  misc_feature (1)..(251): NCBI GI NO: 22422 NR Description: polygalacturonase [Zea mays]
  misc_feature (1)..(251): NCBI GI NO: 129940 NR Description: Exopolygalacturonase precursor
  misc_feature (1)..(251): NCBI GI NO: 548492 NR Description: Exopolygalacturonase precursor
  misc_feature (1)..(251): NCBI GI NO: 629852 NR Description: polygalacturonase - maize
  misc_feature (1)..(251): NCBI GI NO: 1360705 NR Description: polygalacturonase [Zea mays]
  misc_feature (1)..(251): NCBI GI NO: 100912 NR Description: polygalacturonase (EC 3.2.1.15) - maize
  misc_feature (1)..(146): NCBI GI NO: 283049 NR Description: polygalacturonase (EC 3
MPNTLVLFHVINATVAGIKLLNSKFFHINIDNSESITVKDVNVTAPADVENTDGVHVGGSSKISILNSTIGTGDDCVSIGPGCNGVLVDSITCGPGQGISVGCLGRYKDEKDVSDITVRNLLKNTTNGVRIKSYVDAESVLTASHLTFENIRMEEVANPIVIDQYFCPQKVCPGKRSNSSHVSVKDVTFRNITGTSSTPEAISLLCSETQPCSGVSLIDVNVEYAGKNNKTMAVCSNAKGTAKGSIEALACLV

SEQ ID NO: 32987 - protein, 156 aa, Zea mays subsp. mays
  peptide (1)..(156): Ceres Seq. ID no. 12413821
  misc_feature (8)..(156): Pfam Name: Pfam Description:  High molecular weight glutenin subunit
AIFRNIHRSPPSGEESRRPQEGEMASAHNALRVFFILAVVCAVCTAKRTGAKKEESAAAPGGAAGGSGGTFDISKLGATSDGQDGLHKGSPGRVDVSVRSDRKRHGGDPQGRLPGRPSQLHWAMQGQQHRHPAGWQPAGIKRPEQVHGELDRIVSR

SEQ ID NO: 32988 - protein, 133 aa, Zea mays subsp. mays
  peptide (1)..(133): Ceres Seq. ID no. 12413822
  misc_feature (1)..(133): Pfam Name: Pfam Description:  High molecular weight glutenin subunit
MASAHNALRVFFILAVVCAVCTAKRTGAKKEESAAAPGGAAGGSGGTFDISKLGATSDGQDGLHKGSPGRVDVSVRSDRKRHGGDPQGRLPGRPSQLHWAMQGQQHRHPAGWQPAGIKRPEQVHGELDRIVSR

SEQ ID NO: 32989 - DNA, 1101 bp, Zea mays subsp. mays
  misc_feature (1)..(1101): Ceres Seq. ID no. 12411875
  misc_feature (700)..(700): n is a, c, t, g, unknown, or other
  misc_feature (686)..(686): n is a, c, t, g, unknown, or other
aaggagaggcacccacgacggcgacgcattggattgggttgggacagaacgagcgacggcgaggagacggcgataagatttggcacacctcggactgtagctgggagactgcacggacggcggcgtccacgagtcacgaggagcccagaggcttcttcacagcagcagcggcaggtccgctgatgccagactccccccagctccaccaaccgcctccccctcccgcgccgccgccggccagcgcaacaccagccgcgccagcggcagcaaatgcgcaacccaagctgactgccgtgaagctgaggatgatcatcaagggcgtgctcgggcggtaccagcgctggaaccccgtgcacccgacggccggcaccttctggggtgtggggctcggcgtcggctgcggcgttggctggggccccggcttcgggcctgaggtgattgggtacgtaggcgccgggtgcggcgtggggttcagcgttgggttcacgctcgccggcgtcggcatcggcctgccgcagcacagcctcatcaggaaccacgaccacggtggttttgcgagcagcgtccctgttgattcagcgagattctacgccctaaccatcatcagaggtctggtatgggacgccatcagctacgtgggcaatgtagcggctatgaggaaagaatctcgacagaagcttccgagnttccaggacagccntcaggttccagggggagttgatctgccgaagctggggaaggcgtgtcgagcagcatccggtccacggtagaatgcatcagggccttcaccaactgactgatcaactccagcccaggaaccatctctgcctgccatgcctgtccctcactcgatttgtatgtttgtatggcttaggtccttcgattcgtacgttcgtgcgtggtagcaccaataaacatgcgatcgattgagttgtgtgtgcttctccattcattcacttgctctttctgcagctcgtgatcgagttgtgtgtgctccattcccaaattatgtatgatcgattagtagcgttaggggttaaccagtagccgctgtgtacttgtgtcacccttggacaaacaatgagatatttctttgtcgcc

SEQ ID NO: 32990 - protein, 255 aa, Zea mays subsp. mays
  peptide (1)..(255): Ceres Seq. ID no. 12411876
  misc_feature (32)..(246): NCBI GI NO: 34899622 NR Description: cadmium-induced protein-like
  misc_feature (102)..(176): NCBI GI NO: 15234117 NR Description: cadmium-induced protein; protein id: At4g19070
  misc_feature (228)..(228): Xaa is any aa, unknown or other
  misc_feature (233)..(233): Xaa is any aa, unknown or other
GEAPTTATHWIGLGQNERRRGDGDKIWHTSDCSWETARTAASTSHEEPRGFFTAAAAGPLMPDSPQLHQPPPPPAPPPASATPAAPAAANAQPKLTAVKLRMIIKGVLGRYQRWNPVHPTAGTFWGVGLGVGCGVGWGPGFGPEVIGYVGAGCGVGFSVGFTLAGVGIGLPQHSLIRNHDHGGFASSVPVDSARFYALTIIRGLVWDAISYVGNVAAMRKESRQKLPXFQDSXQVPGGVDLPKLGKACRAASGPR

SEQ ID NO: 32991 - protein, 195 aa, Zea mays subsp. mays
  peptide (1)..(195): Ceres Seq. ID no. 12411877
  misc_feature (1)..(186): NCBI GI NO: 34899622 NR Description: cadmium-induced protein-like
  misc_feature (42)..(116): NCBI GI NO: 15234117 NR Description: cadmium-induced protein; protein id: At4g19070
  misc_feature (168)..(168): Xaa is any aa, unknown or other
  misc_feature (173)..(173): Xaa is any aa, unknown or other
MPDSPQLHQPPPPPAPPPASATPAAPAAANAQPKLTAVKLRMIIKGVLGRYQRWNPVHPTAGTFWGVGLGVGCGVGWGPGFGPEVIGYVGAGCGVGFSVGFTLAGVGIGLPQHSLIRNHDHGGFASSVPVDSARFYALTIIRGLVWDAISYVGNVAAMRKESRQKLPXFQDSXQVPGGVDLPKLGKACRAASGPR

SEQ ID NO: 32992 - protein, 154 aa, Zea mays subsp. mays
  peptide (1)..(154): Ceres Seq. ID no. 12411878
  misc_feature (1)..(145): NCBI GI NO: 34899622 NR Description: cadmium-induced protein-like
  misc_feature (1)..(75): NCBI GI NO: 15234117 NR Description: cadmium-induced protein; protein id: At4g19070
  misc_feature (127)..(127): Xaa is any aa, unknown or other
  misc_feature (132)..(132): Xaa is any aa, unknown or other
MIIKGVLGRYQRWNPVHPTAGTFWGVGLGVGCGVGWGPGFGPEVIGYVGAGCGVGFSVGFTLAGVGIGLPQHSLIRNHDHGGFASSVPVDSARFYALTIIRGLVWDAISYVGNVAAMRKESRQKLPXFQDSXQVPGGVDLPKLGKACRAASGPR

SEQ ID NO: 32993 - DNA, 1614 bp, Zea mays subsp. mays
  misc_feature (1)..(1614): Ceres Seq. ID no. 12364958
gccgttctttctccctcagaccctcaccaaccaggcaaccaaaccttctccgatggccgcgcccgtgtcgcagccgccggtgtccgccagggcgtccacacggtttctcccccgcgggataggcgcgctcccggagtccgctcccacgtccctccggttatccgtcggccgccgtcgccgggccgccagcctagaggtgaaggcatcgggaaatgtgttcgggaactacttccaggttgcaacctatggcgaatcccatggagggggtgttggttgcgttatcagtggctgcccacccagaattcctctcactgaggcagacatgcaagtagaactcgataaagacgtccgggtcaaagtagaattacaaccccaagaaaggagactgatacatgcaaaattctatcagggacacatgatgggatgactactggtacaccaattcacgtctttgtcccaaacacagatcaaaggggtggtgattacagtgaaatgtctaaggcgtacagaccatcccatgcagatgcaacctatgacttcaagtatggagttagagctgtgcagggaggtggaaggtcatcagccagagaaaccattggcagggtggctgcaggagctcttgcaaagaaaattctaaagctcaaatcaggagtggagatcttggcatttgtttctaaagtgcaccaagtcgtacttccagaagatgcagttgattatgagactgtaaccttggaacatatagagagcaacatcgttagatgtcctgatccagaatatgcagagaagatgattgctgccattgatacggtacgagttagaggagattcaattggtggggtcgtcacatgcattgcaagaaatgttcctcgtggtcttggctctcctgtttttgacaaacttgaagctgaactggcaaaagccatgctttctcttcctgcaagcaaggggtttgagattggcagtgggttcgctggtacggactttactggaagtgagcataatgatgagttctatatggatgaggctggaaatgtgaggacacgaactaatcgctcaggcggtgttcagggagggatatcaaatggtgaaattatttacttcaaagtggcttttaagccaacagcaactatcggaaagaagcaaaatactgtgtcaagggagcatgaggatgttgaacttttggcaagggggcgccatgacccctgtgttgtccctcgagctgttcctatggtggaatccatggctgcgctggtcctgatggaccagctcatggcgcatattgcccagtgtgagatgtttccgctgaaccttgccctacaagagcccattggctctgctagcagtgcatctgaactgtcaccaaacctatcataatgtttgtcgtggaacatgtcccagctttccttctatcgaaattctggtctttgctaagcagtttgcaattcggaacccccataaaccctcgactattgtacctagagataaagtgaacggatatcaagatagaaatgcattaatgtttttgtgatgtgtagtataactgatatttaccccttttctttttttgagagaggacgcatgatgtcgtttgagcaataaagtttaatttgggag

SEQ ID NO: 32994 - protein, 316 aa, Zea mays subsp. mays
  peptide (1)..(316): Ceres Seq. ID no. 12364959
  misc_feature (1)..(283): Pfam Name: Pfam Description:  Chorismate synthase
  misc_feature (1)..(312): NCBI GI NO: 2492952 NR Description: Chorismate synthase 1, chloroplast precursor
  misc_feature (1)..(309): NCBI GI NO: 2492953 NR Description: Chorismate synthase 2, chloroplast precursor
  misc_feature (1)..(312): NCBI GI NO: 114182 NR Description: Chorismate synthase, chloroplast precursor
  misc_feature (1)..(302): NCBI GI NO: 12229700 NR Description: Chorismate synthase, chloroplast precursor
  misc_feature (1)..(302): NCBI GI NO: 18402389 NR Description: chorismate synthase, putative
  misc_feature (1)..(289): NCBI GI NO: 23039390 NR Description: hypothetical protein
  misc_feature (1)..(291): NCBI GI NO: 23126882 NR Description: hypothetical protein [Nostoc punctiforme]
  misc_feature (1)..(290): NCBI GI NO: 16330007 NR Description: chorismate synthase [Synechocystis sp. PCC 6803]
  misc_feature (1)..(291): NCBI GI NO: 17228292 NR Description: chorismate synthase [Nostoc sp. PCC 7120]
  misc_feature (1)..(291): NCBI GI NO: 22298006 NR Description: chorismate synthase
MTTGTPIHVFVPNTDQRGGDYSEMSKAYRPSHADATYDFKYGVRAVQGGGRSSARETIGRVAAGALAKKILKLKSGVEILAFVSKVHQVVLPEDAVDYETVTLEHIESNIVRCPDPEYAEKMIAAIDTVRVRGDSIGGVVTCIARNVPRGLGSPVFDKLEAELAKAMLSLPASKGFEIGSGFAGTDFTGSEHNDEFYMDEAGNVRTRTNRSGGVQGGISNGEIIYFKVAFKPTATIGKKQNTVSREHEDVELLARGRHDPCVVPRAVPMVESMAALVLMDQLMAHIAQCEMFPLNLALQEPIGSASSASELSPNLS

SEQ ID NO: 32995 - protein, 293 aa, Zea mays subsp. mays
  peptide (1)..(293): Ceres Seq. ID no. 12364960
  misc_feature (1)..(260): Pfam Name: Pfam Description:  Chorismate synthase
  misc_feature (1)..(289): NCBI GI NO: 2492952 NR Description: Chorismate synthase 1, chloroplast precursor
  misc_feature (1)..(286): NCBI GI NO: 2492953 NR Description: Chorismate synthase 2, chloroplast precursor
  misc_feature (1)..(289): NCBI GI NO: 114182 NR Description: Chorismate synthase, chloroplast precursor
  misc_feature (1)..(279): NCBI GI NO: 12229700 NR Description: Chorismate synthase, chloroplast precursor
  misc_feature (1)..(279): NCBI GI NO: 18402389 NR Description: chorismate synthase, putative
  misc_feature (1)..(266): NCBI GI NO: 23039390 NR Description: hypothetical protein
  misc_feature (1)..(268): NCBI GI NO: 23126882 NR Description: hypothetical protein [Nostoc punctiforme]
  misc_feature (1)..(267): NCBI GI NO: 16330007 NR Description: chorismate synthase [Synechocystis sp. PCC 6803]
  misc_feature (1)..(268): NCBI GI NO: 17228292 NR Description: chorismate synthase [Nostoc sp. PCC 7120]
  misc_feature (1)..(268): NCBI GI NO: 22298006 NR Description: chorismate synthase
MSKAYRPSHADATYDFKYGVRAVQGGGRSSARETIGRVAAGALAKKILKLKSGVEILAFVSKVHQVVLPEDAVDYETVTLEHIESNIVRCPDPEYAEKMIAAIDTVRVRGDSIGGVVTCIARNVPRGLGSPVFDKLEAELAKAMLSLPASKGFEIGSGFAGTDFTGSEHNDEFYMDEAGNVRTRTNRSGGVQGGISNGEIIYFKVAFKPTATIGKKQNTVSREHEDVELLARGRHDPCVVPRAVPMVESMAALVLMDQLMAHIAQCEMFPLNLALQEPIGSASSASELSPNLS

SEQ ID NO: 32996 - protein, 195 aa, Zea mays subsp. mays
  peptide (1)..(195): Ceres Seq. ID no. 12364961
  misc_feature (1)..(162): Pfam Name: Pfam Description:  Chorismate synthase
  misc_feature (1)..(191): NCBI GI NO: 2492952 NR Description: Chorismate synthase 1, chloroplast precursor
  misc_feature (1)..(188): NCBI GI NO: 2492953 NR Description: Chorismate synthase 2, chloroplast precursor
  misc_feature (1)..(191): NCBI GI NO: 114182 NR Description: Chorismate synthase, chloroplast precursor
  misc_feature (1)..(181): NCBI GI NO: 12229700 NR Description: Chorismate synthase, chloroplast precursor
  misc_feature (1)..(181): NCBI GI NO: 18402389 NR Description: chorismate synthase, putative
  misc_feature (1)..(168): NCBI GI NO: 23039390 NR Description: hypothetical protein
  misc_feature (1)..(170): NCBI GI NO: 23126882 NR Description: hypothetical protein [Nostoc punctiforme]
  misc_feature (1)..(169): NCBI GI NO: 16330007 NR Description: chorismate synthase [Synechocystis sp. PCC 6803]
  misc_feature (1)..(170): NCBI GI NO: 17228292 NR Description: chorismate synthase [Nostoc sp. PCC 7120]
  misc_feature (1)..(170): NCBI GI NO: 22298006 NR Description: chorismate synthase
MIAAIDTVRVRGDSIGGVVTCIARNVPRGLGSPVFDKLEAELAKAMLSLPASKGFEIGSGFAGTDFTGSEHNDEFYMDEAGNVRTRTNRSGGVQGGISNGEIIYFKVAFKPTATIGKKQNTVSREHEDVELLARGRHDPCVVPRAVPMVESMAALVLMDQLMAHIAQCEMFPLNLALQEPIGSASSASELSPNLS

SEQ ID NO: 32997 - DNA, 1284 bp, Zea mays subsp. mays
  misc_feature (1)..(1284): Ceres Seq. ID no. 12412345
gtttcggttcgcgtagcagaactgctcgtgcaacaagcaaacaacccaagagccgggagagttggtgactgcgaggccgagacagaggggatagattgagagagccagagaggtgggcagatggcgacaccgtcgtcgtcgctttgctccagcttcgcctccctgcggaccgcctccatcggccacccccgcggcatcgcgtcatctacacccaggaaggcgttccaagtgagggcatcagctcgggttgacaagttctcaaagagtgatatcattgtgtccccttcgattctgtctgcaaacttcgccaagcttggtgatcaggtaaaagccgtggaggtggcaggatgtgactggattcatgtcgatgtcatggacgggcgctttgtgccaaatatcacaattggacctttcgttgttgatgctctgcgtcctgtgactgatcttccattggatgtacatctgatgattgtggaacctgagcagcgagtccctgattttatcaaggcaggtgctgatattgttagtgtccactgtgaacaaacatcgaccatccatttgcacagaacagtcaatcagattaaaagtctaggagcaaaggcaggagttgttttgaatccagcgactccactcactgcaattgattacattcttgatgttgttgacctggtgttgattatgtctgtgaatcctgggtttggtggccagagctttatcgagagtcaagtaaggaaaattgcagaattgagaaggttatgtgcagagaagggagtgaacccctggattgaggttgatggtggtgttggtccgaaaaatgcctacaaggttattgaagctggggcgaatgccatcgttgctggctctgcagttttcggggctccagactacgctgaagctatcaaaggaatcaagaccagccaaaggcctgcagctgtacacgcataaggaactggacgtgtgatcgtgctctgttcaggtttagcagtgttgggattcgtatagatagatgtgtcttgttttcgagccatacgttatactggagatgaaaggagacggaggaaatatttctctacgtgggtgaatcaatcatgtggacggtaatcacatgacgacaaagcatatggacgagcgctggctcacgagacagagtaatcaacgggagaggcttctagacagctctgcatgtccattccctctataaacaggagagcagttcagtctccattgtaaaggcacccagatatagaagaaagaaataaagagctctctatttgtctctgtttc

SEQ ID NO: 32998 - protein, 274 aa, Zea mays subsp. mays
  peptide (1)..(274): Ceres Seq. ID no. 12412346
  misc_feature (52)..(254): Pfam Name: Pfam Description:  Ribulose-phosphate 3 epimerase family
  misc_feature (1)..(274): NCBI GI NO: 19071636 NR Description: ribulose-5-phosphate-3-epimerase
  misc_feature (1)..(274): NCBI GI NO: 6647761 NR Description: Ribulose-phosphate 3-epimerase
  misc_feature (1)..(272): NCBI GI NO: 20339362 NR Description: ribulose-5-phosphate-3-epimerase [Pisum sativum]
  misc_feature (15)..(272): NCBI GI NO: 2499728 NR Description: Ribulose-phosphate 3-epimerase
  misc_feature (1)..(272): NCBI GI NO: 15240250 NR Description: ribulose-5-phosphate-3-epimerase
  misc_feature (41)..(269): NCBI GI NO: 4930130 NR Description: Chain A
  misc_feature (19)..(272): NCBI GI NO: 2833386 NR Description: Ribulose-phosphate 3-epimerase
  misc_feature (19)..(272): NCBI GI NO: 3264790 NR Description: ribulose-phosphate 3-epimerase transit form
  misc_feature (39)..(272): NCBI GI NO: 3264792 NR Description: ribulose-phosphate 3-epimerase mature form
  misc_feature (47)..(269): NCBI GI NO: 17228277 NR Description: ribulose-phosphate 3-epimerase
MATPSSSLCSSFASLRTASIGHPRGIASSTPRKAFQVRASARVDKFSKSDIIVSPSILSANFAKLGDQVKAVEVAGCDWIHVDVMDGRFVPNITIGPFVVDALRPVTDLPLDVHLMIVEPEQRVPDFIKAGADIVSVHCEQTSTIHLHRTVNQIKSLGAKAGVVLNPATPLTAIDYILDVVDLVLIMSVNPGFGGQSFIESQVRKIAELRRLCAEKGVNPWIEVDGGVGPKNAYKVIEAGANAIVAGSAVFGAPDYAEAIKGIKTSQRPAAVHA

SEQ ID NO: 32999 - protein, 190 aa, Zea mays subsp. mays
  peptide (1)..(190): Ceres Seq. ID no. 12412347
  misc_feature (1)..(170): Pfam Name: Pfam Description:  Ribulose-phosphate 3 epimerase family
  misc_feature (1)..(190): NCBI GI NO: 19071636 NR Description: ribulose-5-phosphate-3-epimerase
  misc_feature (1)..(190): NCBI GI NO: 6647761 NR Description: Ribulose-phosphate 3-epimerase
  misc_feature (1)..(188): NCBI GI NO: 20339362 NR Description: ribulose-5-phosphate-3-epimerase [Pisum sativum]
  misc_feature (1)..(188): NCBI GI NO: 2499728 NR Description: Ribulose-phosphate 3-epimerase
  misc_feature (1)..(188): NCBI GI NO: 15240250 NR Description: ribulose-5-phosphate-3-epimerase
  misc_feature (1)..(185): NCBI GI NO: 4930130 NR Description: Chain A
  misc_feature (1)..(188): NCBI GI NO: 2833386 NR Description: Ribulose-phosphate 3-epimerase
  misc_feature (1)..(188): NCBI GI NO: 3264790 NR Description: ribulose-phosphate 3-epimerase transit form
  misc_feature (1)..(188): NCBI GI NO: 3264792 NR Description: ribulose-phosphate 3-epimerase mature form
  misc_feature (1)..(185): NCBI GI NO: 17228277 NR Description: ribulose-phosphate 3-epimerase
MDGRFVPNITIGPFVVDALRPVTDLPLDVHLMIVEPEQRVPDFIKAGADIVSVHCEQTSTIHLHRTVNQIKSLGAKAGVVLNPATPLTAIDYILDVVDLVLIMSVNPGFGGQSFIESQVRKIAELRRLCAEKGVNPWIEVDGGVGPKNAYKVIEAGANAIVAGSAVFGAPDYAEAIKGIKTSQRPAAVHA

SEQ ID NO: 33000 - protein, 159 aa, Zea mays subsp. mays
  peptide (1)..(159): Ceres Seq. ID no. 12412348
  misc_feature (1)..(139): Pfam Name: Pfam Description:  Ribulose-phosphate 3 epimerase family
  misc_feature (1)..(159): NCBI GI NO: 19071636 NR Description: ribulose-5-phosphate-3-epimerase
  misc_feature (1)..(159): NCBI GI NO: 6647761 NR Description: Ribulose-phosphate 3-epimerase
  misc_feature (1)..(157): NCBI GI NO: 20339362 NR Description: ribulose-5-phosphate-3-epimerase [Pisum sativum]
  misc_feature (1)..(157): NCBI GI NO: 2499728 NR Description: Ribulose-phosphate 3-epimerase
  misc_feature (1)..(157): NCBI GI NO: 15240250 NR Description: ribulose-5-phosphate-3-epimerase
  misc_feature (1)..(154): NCBI GI NO: 4930130 NR Description: Chain A
  misc_feature (1)..(157): NCBI GI NO: 2833386 NR Description: Ribulose-phosphate 3-epimerase
  misc_feature (1)..(157): NCBI GI NO: 3264790 NR Description: ribulose-phosphate 3-epimerase transit form
  misc_feature (1)..(157): NCBI GI NO: 3264792 NR Description: ribulose-phosphate 3-epimerase mature form
  misc_feature (1)..(154): NCBI GI NO: 17228277 NR Description: ribulose-phosphate 3-epimerase
MIVEPEQRVPDFIKAGADIVSVHCEQTSTIHLHRTVNQIKSLGAKAGVVLNPATPLTAIDYILDVVDLVLIMSVNPGFGGQSFIESQVRKIAELRRLCAEKGVNPWIEVDGGVGPKNAYKVIEAGANAIVAGSAVFGAPDYAEAIKGIKTSQRPAAVHA

SEQ ID NO: 33001 - DNA, 1476 bp, Zea mays subsp. mays
  misc_feature (1)..(1476): Ceres Seq. ID no. 15180582
tgtggagcctgggagaaatgagagattctctagttttaatttgaagtatgtagaagttgaataaagacctattggatcagaatattgggaaccgagatttgccggccaccaaagtctgcaagaaagagaggagtcatacaaagcccatgaccaacagttgacatgtgcttttgttaagggtccaaatggtacaagcactggttttgatatatctgatgatgatcgaaagtacatgagtaaatgccacattgctgtatcatcctgcatctttggaaattctgatcgactgaggactccatttagcaaaacgattacaagcctctcaaagaagacagtttgctttgctatgtttttggatgaagtcacattgcaaactttagaatctgaaggccagaaaatggacggcatgggtttcattggtatatggaagatcatattgattaagaatatgccgtataatgacatgcgtagagtggggaaaataccaaaatttttggcacacaggctatttccatcatcgaggttctcaatctggttagacagcaaactgagactacaaactgatcctatccttatcctagagtattttctctggcggcatggttatgaatatgctatttccaatcactatgatcgccattgtgtttgggaggaagtagcacaaaataaaaagctgaacaagttcaaccacacaataattgaccagcaatttgagttttatcaagcggatggactgacaaggttcaacccatcggatcccagcaggcttctaccaagctatgtccctgaaggctcttttatcgcaagagagcacacaccgatgtccaacttattttcctgcctgtggtacaatgaagttgatcgattcacacctcgtgaccagctcagctttgcatatacatacttaaaactgagaaggacaaatcctgacagaccattccgtctcaatatgtttaaggattgtgagagacgatcaatagcgaagctattccatcaccggacagaagagagacacaacagtgcacaattaacaagatgacacatccttcctagtgatggagggcagaagagagaggtcagggattgtattctttgatatagttcagctatccacaagactctccattgaaactttatgcccctgtctaggagtttgtactttatataatgcaagccttctttcctttgtcactccagtcctgcaggccagttcccgcctaacatttttttgcagttgacaaggcggattaggagtttctaactgtttggtttttctttgttctccgtaaatctctgtttattcttttgataatatggcccatggatgatctggggaagctatgagtgatcatggacttttcccagattgcccatgcacaatgtattattaccacaccactgtaggactgtgtagtgaggccattgttctcctgcaattctgactgaaatgtaccatacacaactagtaaattactc

SEQ ID NO: 33002 - protein, 268 aa, Zea mays subsp. mays
  peptide (1)..(268): Ceres Seq. ID no. 15180583
  misc_feature (1)..(255): Pfam Name: DUF616 Pfam Description: Protein of unknown function
  misc_feature (1)..(265): NCBI GI NO: 25403429 NR Description: protein F12K21.12
  misc_feature (1)..(265): NCBI GI NO: 15233955 NR Description: expressed protein [Arabidopsis thaliana]
  misc_feature (1)..(242): NCBI GI NO: 15218687 NR Description: hypothetical protein [Arabidopsis thaliana]
  misc_feature (1)..(258): NCBI GI NO: 15227062 NR Description: hypothetical protein [Arabidopsis thaliana]
  misc_feature (1)..(265): NCBI GI NO: 15217874 NR Description: expressed protein [Arabidopsis thaliana]
  misc_feature (1)..(265): NCBI GI NO: 17064856 NR Description: Unknown protein [Arabidopsis thaliana]
  misc_feature (84)..(256): NCBI GI NO: 34905662 NR Description: P0475H04.14
  misc_feature (1)..(89): NCBI GI NO: 34905662 NR Description: P0475H04.14
  misc_feature (1)..(256): NCBI GI NO: 25405617 NR Description: hypothetical protein F8L10.10
  misc_feature (1)..(256): NCBI GI NO: 30695403 NR Description: expressed protein [Arabidopsis thaliana]
MSKCHIAVSSCIFGNSDRLRTPFSKTITSLSKKTVCFAMFLDEVTLQTLESEGQKMDGMGFIGIWKIILIKNMPYNDMRRVGKIPKFLAHRLFPSSRFSIWLDSKLRLQTDPILILEYFLWRHGYEYAISNHYDRHCVWEEVAQNKKLNKFNHTIIDQQFEFYQADGLTRFNPSDPSRLLPSYVPEGSFIAREHTPMSNLFSCLWYNEVDRFTPRDQLSFAYTYLKLRRTNPDRPFRLNMFKDCERRSIAKLFHHRTEERHNSAQLTR

SEQ ID NO: 33003 - protein, 230 aa, Zea mays subsp. mays
  peptide (1)..(230): Ceres Seq. ID no. 15180584
  misc_feature (1)..(217): Pfam Name: DUF616 Pfam Description: Protein of unknown function
  misc_feature (1)..(227): NCBI GI NO: 25403429 NR Description: protein F12K21.12
  misc_feature (1)..(227): NCBI GI NO: 15233955 NR Description: expressed protein [Arabidopsis thaliana]
  misc_feature (1)..(204): NCBI GI NO: 15218687 NR Description: hypothetical protein [Arabidopsis thaliana]
  misc_feature (1)..(220): NCBI GI NO: 15227062 NR Description: hypothetical protein [Arabidopsis thaliana]
  misc_feature (1)..(227): NCBI GI NO: 15217874 NR Description: expressed protein [Arabidopsis thaliana]
  misc_feature (1)..(227): NCBI GI NO: 17064856 NR Description: Unknown protein [Arabidopsis thaliana]
  misc_feature (46)..(218): NCBI GI NO: 34905662 NR Description: P0475H04.14
  misc_feature (1)..(51): NCBI GI NO: 34905662 NR Description: P0475H04.14
  misc_feature (1)..(218): NCBI GI NO: 25405617 NR Description: hypothetical protein F8L10.10
  misc_feature (1)..(218): NCBI GI NO: 30695403 NR Description: expressed protein [Arabidopsis thaliana]
MFLDEVTLQTLESEGQKMDGMGFIGIWKIILIKNMPYNDMRRVGKIPKFLAHRLFPSSRFSIWLDSKLRLQTDPILILEYFLWRHGYEYAISNHYDRHCVWEEVAQNKKLNKFNHTIIDQQFEFYQADGLTRFNPSDPSRLLPSYVPEGSFIAREHTPMSNLFSCLWYNEVDRFTPRDQLSFAYTYLKLRRTNPDRPFRLNMFKDCERRSIAKLFHHRTEERHNSAQLTR

SEQ ID NO: 33004 - protein, 213 aa, Zea mays subsp. mays
  peptide (1)..(213): Ceres Seq. ID no. 15180585
  misc_feature (1)..(200): Pfam Name: DUF616 Pfam Description: Protein of unknown function
  misc_feature (1)..(210): NCBI GI NO: 25403429 NR Description: protein F12K21.12
  misc_feature (1)..(210): NCBI GI NO: 15233955 NR Description: expressed protein [Arabidopsis thaliana]
  misc_feature (1)..(187): NCBI GI NO: 15218687 NR Description: hypothetical protein [Arabidopsis thaliana]
  misc_feature (1)..(203): NCBI GI NO: 15227062 NR Description: hypothetical protein [Arabidopsis thaliana]
  misc_feature (1)..(210): NCBI GI NO: 15217874 NR Description: expressed protein [Arabidopsis thaliana]
  misc_feature (1)..(210): NCBI GI NO: 17064856 NR Description: Unknown protein [Arabidopsis thaliana]
  misc_feature (29)..(201): NCBI GI NO: 34905662 NR Description: P0475H04.14
  misc_feature (1)..(34): NCBI GI NO: 34905662 NR Description: P0475H04.14
  misc_feature (1)..(201): NCBI GI NO: 25405617 NR Description: hypothetical protein F8L10.10
  misc_feature (1)..(201): NCBI GI NO: 30695403 NR Description: expressed protein [Arabidopsis thaliana]
MDGMGFIGIWKIILIKNMPYNDMRRVGKIPKFLAHRLFPSSRFSIWLDSKLRLQTDPILILEYFLWRHGYEYAISNHYDRHCVWEEVAQNKKLNKFNHTIIDQQFEFYQADGLTRFNPSDPSRLLPSYVPEGSFIAREHTPMSNLFSCLWYNEVDRFTPRDQLSFAYTYLKLRRTNPDRPFRLNMFKDCERRSIAKLFHHRTEERHNSAQLTR

SEQ ID NO: 33005 - DNA, 1552 bp, Zea mays subsp. mays
  misc_feature (1)..(1552): Ceres Seq. ID no. 12355643
ataggccataggttgccctgcgggttttacaaaacaagaagaaaaaaaatcacctgctcaacggcggcatcatcggcaagacggcgggtttctgtaccaatctcagccttcgtgtctatctgattccaggaatcaagcgtattgtggtgaacatgaactccacatcttctcagcgtggttaccctgccaagaggtggtgtgcagcgaacatgagctccacatctatgcgtcactctgcatggaagtctgagccctggactcaccttacccacaaacagagacgaccacaatggattgcttataatccaaggacaatgaggcctccaccacttagcactgataccaattctatgaagattctgtcctggaacgttaatggactgcaagctattgtacagtcagggttttctgcagatgaattggttgccagagagaactttgacgtcttatgtcttcaagagacacacttggaggagcgcaatgttgacctttttaaaaacctggtacatgaatatgattacacctgttggtcatgcagtgttgcaaggcttggttattcaggaactgctgttatatcacgggtacaaccaatctcagttcaatatgggcttggcataccagagcatgatcaggaaggcaggcttattaccttggagtttgatgatttttacttggtcaatgcttatgtcccaaattctggccgtggtttacgtagactgaattacaggatcaatgattgggatccatgctttagcgacttcataaagaaactggaatgttctaaaccagtaattgttgctggggatctaaactgtgctcgtcaaagtattgacattcacaatcctcaagcaaaaaccgaggctgcaggtttcacaattgaagagagagagtcatttgaggtcaacttctcaagaaaaggcctcgttgatacattccgtaaacaacacccgaatgcagtggcctacactttctggggtgaaaaccagcgcattaccaacaaaggctggagactggattactttcttgcgtcagagtctattgccgacaaggtccatgattcttacactctgccagatgtagcgctcagcgatcacagtccaattggccttttgctgaagttgtaggcacttatacatctctcagctatttgacaactaaagcaggaagttttaacatcgtcctagataaaagacttgtagaaagattttgcttatgtaggctgaaaactattcaaactcgggtggtacttcgcgtggtctcctgtcgtctgtggaggttgtggatagactattcacgttgtgttcgagaagttaaaacatagcctagaacaattagctgatgttctatagcttgtgaatacatctgtttagtcggcgtaaccggcgaaagagcatctagccgaggagcatctagtcaagttagttaggtggtctaagtagcacctcttaagtgttgagtttgactctccgtggcaacaaattttaggcttggggtaaaaaaacctcttgtttatcccacgctaaagcatatgtctaagacccggtttccggtc

SEQ ID NO: 33006 - protein, 323 aa, Zea mays subsp. mays
  peptide (1)..(323): Ceres Seq. ID no. 12355644
  misc_feature (67)..(321): Pfam Name: Pfam Description:  Endonuclease/Exonuclease/phosphatase family
  misc_feature (33)..(323): NCBI GI NO: 34908950 NR Description: putative exodeoxyribonuclease
  misc_feature (33)..(323): NCBI GI NO: 34908948 NR Description: putative exodeoxyribonuclease
  misc_feature (31)..(323): NCBI GI NO: 472869 NR Description: ARP protein [Arabidopsis thaliana]
  misc_feature (31)..(323): NCBI GI NO: 15227354 NR Description: DNA-
  misc_feature (67)..(319): NCBI GI NO: 30021833 NR Description: Exodeoxyribonuclease III
  misc_feature (67)..(322): NCBI GI NO: 20808602 NR Description: Exonuclease III [Thermoanaerobacter tengcongensis]
  misc_feature (67)..(323): NCBI GI NO: 16800960 NR Description: similar to 3'-exo-deoxyribonuclease exoA
  misc_feature (11)..(323): NCBI GI NO: 28829076 NR Description: similar to Dictyostelium discoideum (Slime mold)
  misc_feature (67)..(323): NCBI GI NO: 16803822 NR Description: similar to 3'-exo-deoxyribonuclease exoA
  misc_feature (11)..(323): NCBI GI NO: 1703336 NR Description: DNA-
MNSTSSQRGYPAKRWCAANMSSTSMRHSAWKSEPWTHLTHKQRRPQWIAYNPRTMRPPPLSTDTNSMKILSWNVNGLQAIVQSGFSADELVARENFDVLCLQETHLEERNVDLFKNLVHEYDYTCWSCSVARLGYSGTAVISRVQPISVQYGLGIPEHDQEGRLITLEFDDFYLVNAYVPNSGRGLRRLNYRINDWDPCFSDFIKKLECSKPVIVAGDLNCARQSIDIHNPQAKTEAAGFTIEERESFEVNFSRKGLVDTFRKQHPNAVAYTFWGENQRITNKGWRLDYFLASESIADKVHDSYTLPDVALSDHSPIGLLLKL

SEQ ID NO: 33007 - protein, 304 aa, Zea mays subsp. mays
  peptide (1)..(304): Ceres Seq. ID no. 12355645
  misc_feature (48)..(302): Pfam Name: Pfam Description:  Endonuclease/Exonuclease/phosphatase family
  misc_feature (14)..(304): NCBI GI NO: 34908950 NR Description: putative exodeoxyribonuclease
  misc_feature (14)..(304): NCBI GI NO: 34908948 NR Description: putative exodeoxyribonuclease
  misc_feature (12)..(304): NCBI GI NO: 472869 NR Description: ARP protein [Arabidopsis thaliana]
  misc_feature (12)..(304): NCBI GI NO: 15227354 NR Description: DNA-
  misc_feature (48)..(300): NCBI GI NO: 30021833 NR Description: Exodeoxyribonuclease III
  misc_feature (48)..(303): NCBI GI NO: 20808602 NR Description: Exonuclease III [Thermoanaerobacter tengcongensis]
  misc_feature (48)..(304): NCBI GI NO: 16800960 NR Description: similar to 3'-exo-deoxyribonuclease exoA
  misc_feature (1)..(304): NCBI GI NO: 28829076 NR Description: similar to Dictyostelium discoideum (Slime mold)
  misc_feature (48)..(304): NCBI GI NO: 16803822 NR Description: similar to 3'-exo-deoxyribonuclease exoA
  misc_feature (1)..(304): NCBI GI NO: 1703336 NR Description: DNA-
MSSTSMRHSAWKSEPWTHLTHKQRRPQWIAYNPRTMRPPPLSTDTNSMKILSWNVNGLQAIVQSGFSADELVARENFDVLCLQETHLEERNVDLFKNLVHEYDYTCWSCSVARLGYSGTAVISRVQPISVQYGLGIPEHDQEGRLITLEFDDFYLVNAYVPNSGRGLRRLNYRINDWDPCFSDFIKKLECSKPVIVAGDLNCARQSIDIHNPQAKTEAAGFTIEERESFEVNFSRKGLVDTFRKQHPNAVAYTFWGENQRITNKGWRLDYFLASESIADKVHDSYTLPDVALSDHSPIGLLLKL

SEQ ID NO: 33008 - protein, 299 aa, Zea mays subsp. mays
  peptide (1)..(299): Ceres Seq. ID no. 12355646
  misc_feature (43)..(297): Pfam Name: Pfam Description:  Endonuclease/Exonuclease/phosphatase family
  misc_feature (9)..(299): NCBI GI NO: 34908950 NR Description: putative exodeoxyribonuclease
  misc_feature (9)..(299): NCBI GI NO: 34908948 NR Description: putative exodeoxyribonuclease
  misc_feature (7)..(299): NCBI GI NO: 472869 NR Description: ARP protein [Arabidopsis thaliana]
  misc_feature (7)..(299): NCBI GI NO: 15227354 NR Description: DNA-
  misc_feature (43)..(295): NCBI GI NO: 30021833 NR Description: Exodeoxyribonuclease III
  misc_feature (43)..(298): NCBI GI NO: 20808602 NR Description: Exonuclease III [Thermoanaerobacter tengcongensis]
  misc_feature (43)..(299): NCBI GI NO: 16800960 NR Description: similar to 3'-exo-deoxyribonuclease exoA
  misc_feature (1)..(299): NCBI GI NO: 28829076 NR Description: similar to Dictyostelium discoideum (Slime mold)
  misc_feature (43)..(299): NCBI GI NO: 16803822 NR Description: similar to 3'-exo-deoxyribonuclease exoA
  misc_feature (1)..(299): NCBI GI NO: 1703336 NR Description: DNA-
MRHSAWKSEPWTHLTHKQRRPQWIAYNPRTMRPPPLSTDTNSMKILSWNVNGLQAIVQSGFSADELVARENFDVLCLQETHLEERNVDLFKNLVHEYDYTCWSCSVARLGYSGTAVISRVQPISVQYGLGIPEHDQEGRLITLEFDDFYLVNAYVPNSGRGLRRLNYRINDWDPCFSDFIKKLECSKPVIVAGDLNCARQSIDIHNPQAKTEAAGFTIEERESFEVNFSRKGLVDTFRKQHPNAVAYTFWGENQRITNKGWRLDYFLASESIADKVHDSYTLPDVALSDHSPIGLLLKL

SEQ ID NO: 33009 - DNA, 1828 bp, Zea mays subsp. mays
  misc_feature (1)..(1828): Ceres Seq. ID no. 12374352
acgcgaatccgcatctccagactccaaccagcgctcgtccctccccgttctttcctcctcccttcagccatcgcagtcgcagcgcaggttcttggctggttgctggtgtcgacagcaaagtccgcaactccaatcctgcctgcgctcctcccgtcctcactcagcacccgcgcacgccgcctgcctgtcgattgagatctctttcacgcccctttctgccatcgcacaactgaggtacggttctttgcttattgcagagtatagtatggatgcccgcagtgagtcgtcgtgtcgtgccttcagtaggagccgcagctagtaacatccattttgctggtcaataagtcgtgggaggaagaagatggattatttgaaggtgcaggtggtagagtcatcatttgtagtgccgagcgagccgacggccaacgaaggcgctctggctctcttgcttggacatggttcagtccaacaaagcccacaccccaacgatccacttgtacagctccaacgatgctgcggcggctgattttttcgacctgggcagactcaagaaggctacggccaaagccttggtggccttctaccccctcgccggacgcctcgtcgacagcgacgatggtaggaaggagatcagctgcaacggcgaaggtgcactctttgttgtcgctcgcgcggatggtgatctcactatcgatgaagtcaagaaattcaagccatcaccagagttgaggaggctgtttattccactcatcgagccatcgtccatcataatggccatacaggtgactttcttgaagtgtggaggtgtggtgttaggaacagctatccaccacgccgccacagacgtttcaagcgcgttccacttttttcagacatggtcggcgttctgcaagcatggtgacagtgctgccgtggagctcccgtgccacgaccgcaccctactccgcgcacggtccccgcccacagtccaccccgacgcgctctccacattgcagcctcggctcgtcctcactgaacccgaggggcctcttgccatcgaaatcttcaccatttccagggatcatgtcgcctccctgaagcagctctgcggtggcacgagcaccttttgcgccgtcagcgctctcatctggcagtgcgcgtgcgttgcacgacggatcccaccggactctcaggtgcgcgtgatgttcccggccgacgtccgccgccggatgaggccgcccctcccgacccactacttcggcaacgcagtgatcaggctatacgccgctggcccggcaggggacattggcacggcggcgttggcatccgtcgctgcccgcatcaagggcgccgtcgagcggatggatgacgagctggtgcggtccgcgattgactactacgagatggccgagacgaacaagagacggactgggacaggcatcttaccaccgacggacctgaatattaccagctggttgggtaggccacagcacgacgcagattttggctggggaaagccgcaatccatgtcgcgggcggagtctgtccgcggcggctctatgcacttgatgaacgacgacggtggtaccggcaacgtccgcgtgctcgtgtgcttggaggctgaaaatataaaggagctaggacggctgctttatgcaaagctctagcaagctgctagtgctatgcactaaaaataatattaataataataaggtttgttactttgcttaaggggaaccatactttttccctcgcgatttattattattaattatggcagtttgaataatgaaaaccatttgtaattcctgtgacaattagtttatgcgtccacactagaaataaaaac

SEQ ID NO: 33010 - protein, 396 aa, Zea mays subsp. mays
  peptide (1)..(396): Ceres Seq. ID no. 12374353
  misc_feature (1)..(393): Pfam Name: Pfam Description:  Transferase family
  misc_feature (1)..(310): NCBI GI NO: 40253398 NR Description: putative hydroxyanthranilatehydroxycinnamoyltransferase 2
  misc_feature (1)..(393): NCBI GI NO: 6469032 NR Description: N-hydroxycinnamoyl/benzoyltransferase
  misc_feature (1)..(393): NCBI GI NO: 40644899 NR Description: hydroxycinnamoyl CoA quinate transferase
  misc_feature (1)..(393): NCBI GI NO: 27475616 NR Description: hydroxycinnamoyl transferase [Nicotiana tabacum]
  misc_feature (1)..(393): NCBI GI NO: 40644084 NR Description: hydroxycinnamoyl CoA quinate transferase
  misc_feature (1)..(393): NCBI GI NO: 15239747 NR Description: anthranilate N-benzoyltransferase
  misc_feature (1)..(393): NCBI GI NO: 21536883 NR Description: anthranilate N-benzoyltransferase
  misc_feature (1)..(310): NCBI GI NO: 38345030 NR Description: OSJNBa0029H02.14
  misc_feature (105)..(393): NCBI GI NO: 38345030 NR Description: OSJNBa0029H02.14
  misc_feature (25)..(393): NCBI GI NO: 7484692 NR Description: anthranilate N-benzoyltransferase (EC 2
MVQSNKAHTPTIHLYSSNDAAAADFFDLGRLKKATAKALVAFYPLAGRLVDSDDGRKEISCNGEGALFVVARADGDLTIDEVKKFKPSPELRRLFIPLIEPSSIIMAIQVTFLKCGGVVLGTAIHHAATDVSSAFHFFQTWSAFCKHGDSAAVELPCHDRTLLRARSPPTVHPDALSTLQPRLVLTEPEGPLAIEIFTISRDHVASLKQLCGGTSTFCAVSALIWQCACVARRIPPDSQVRVMFPADVRRRMRPPLPTHYFGNAVIRLYAAGPAGDIGTAALASVAARIKGAVERMDDELVRSAIDYYEMAETNKRRTGTGILPPTDLNITSWLGRPQHDADFGWGKPQSMSRAESVRGGSMHLMNDDGGTGNVRVLVCLEAENIKELGRLLYAKL

SEQ ID NO: 33011 - protein, 291 aa, Zea mays subsp. mays
  peptide (1)..(291): Ceres Seq. ID no. 12374354
  misc_feature (1)..(288): Pfam Name: Pfam Description:  Transferase family
  misc_feature (1)..(205): NCBI GI NO: 40253398 NR Description: putative hydroxyanthranilatehydroxycinnamoyltransferase 2
  misc_feature (1)..(288): NCBI GI NO: 6469032 NR Description: N-hydroxycinnamoyl/benzoyltransferase
  misc_feature (1)..(288): NCBI GI NO: 40644899 NR Description: hydroxycinnamoyl CoA quinate transferase
  misc_feature (1)..(288): NCBI GI NO: 27475616 NR Description: hydroxycinnamoyl transferase [Nicotiana tabacum]
  misc_feature (1)..(288): NCBI GI NO: 40644084 NR Description: hydroxycinnamoyl CoA quinate transferase
  misc_feature (1)..(288): NCBI GI NO: 15239747 NR Description: anthranilate N-benzoyltransferase
  misc_feature (1)..(288): NCBI GI NO: 21536883 NR Description: anthranilate N-benzoyltransferase
  misc_feature (1)..(205): NCBI GI NO: 38345030 NR Description: OSJNBa0029H02.14
  misc_feature (1)..(288): NCBI GI NO: 38345030 NR Description: OSJNBa0029H02.14
  misc_feature (1)..(288): NCBI GI NO: 7484692 NR Description: anthranilate N-benzoyltransferase (EC 2
MAIQVTFLKCGGVVLGTAIHHAATDVSSAFHFFQTWSAFCKHGDSAAVELPCHDRTLLRARSPPTVHPDALSTLQPRLVLTEPEGPLAIEIFTISRDHVASLKQLCGGTSTFCAVSALIWQCACVARRIPPDSQVRVMFPADVRRRMRPPLPTHYFGNAVIRLYAAGPAGDIGTAALASVAARIKGAVERMDDELVRSAIDYYEMAETNKRRTGTGILPPTDLNITSWLGRPQHDADFGWGKPQSMSRAESVRGGSMHLMNDDGGTGNVRVLVCLEAENIKELGRLLYAKL

SEQ ID NO: 33012 - DNA, 1355 bp, Zea mays subsp. mays
  misc_feature (1)..(1355): Ceres Seq. ID no. 12364918
aaaacagacacttccgtttttattgtccaccctccgccgccggcgtctctccaaaacccaaccaaaccctagatccgccgcactcagttccggtgagaccctcctttccagcgaaaatgccgaacctcgagtgccggatgtatgagcagcggttcccggaggtggacgccgcggtgatgatccaggtgaagcacatcgctgacatgggcgcgtacgtctcgttgctcgagtacaacaacatcgagggcatgatcctcttctccgagctctcccgccgtcgtatccgctccatctcctccctcatcaaggttggccgccaggagcccgccatcgtgctccgtgtcgaccgcgacaagggctacatcgacctttcgaagcgtcgcgtctccgaggaggaggcgcacgcatgcgaggacaggtacaacaagtccaagctcgtgcactccatcatgcgccacgtcgccgagacgctcgagatcgacctcgagccgctctaccagcggattggctggccgctctaccgcaagtacggccacgccttcgaggccttcaagctcatagttgccgaccctgacgccatcctcgacgcactcacctatgaggagaaggaggtcggcccggatggccaggaggtgactaaggtggtgcctgctgtcacccccgaggttaaggattctctggttaagaacataaggaggaggatgacaccacagcctctcaagatccgtgctgatatagagatgaaatgcttccagtttgatggagtgctccatattaagcaagctatgaagaaagctgaagctgcgggcaatgataactgtcctgtgaagattaagctagttgctcctccactttatgttttgaccacacagacccttgacaaggatcaaggcatttcagttctcactactgcagtcaaggcttgtacagcagagattgaaaagtacaaaggaaagttagtagtgaaggaaccaccaagagctgttagtgagcgggaagacaagctattcctcgaccagattgattccctaatggagcaaaacgcagaggtcgatggtgatgctgacagtgaagaggaggaagatacaggaatgggggacgtcgacattacaaattctggcgtcgctgcttactaaggctacactggttgatttggatgagctttgctgtacagcaccagctaagttctaagccgttctgtttggaagcagtttctttctgttaggttttggtgaattcgctgaaactcgttacctgcgttgttaatgttttgggctcagccggtgttggggtagcgtttacttctgtcgagaatcaccaattttttcttgggagtgaaaacaaagcccgttgcc

SEQ ID NO: 33013 - protein, 377 aa, Zea mays subsp. mays
  peptide (1)..(377): Ceres Seq. ID no. 12364919
  misc_feature (51)..(126): Pfam Name: Pfam Description:  S1 RNA binding domain
  misc_feature (39)..(376): NCBI GI NO: 34898218 NR Description: putative eukaryotic translation initiation factor 2 subunit 1
  misc_feature (37)..(374): NCBI GI NO: 18405334 NR Description: putative eukaryotic translation initiation factor 2alpha subunit
  misc_feature (37)..(374): NCBI GI NO: 21537411 NR Description: putative eukaryotic translation initiation factor 2alpha subunit
  misc_feature (40)..(374): NCBI GI NO: 15239135 NR Description: eukaryotic translation initiation factor 2 alpha subunit-like protein
  misc_feature (40)..(374): NCBI GI NO: 13549160 NR Description: protein synthesis initiation factor eIF2 alpha
  misc_feature (37)..(301): NCBI GI NO: 4588003 NR Description: hypothetical EIF-2-Alpha [Arabidopsis thaliana]
  misc_feature (39)..(221): NCBI GI NO: 19114993 NR Description: eukaryotic translation initiation factor 2 alpha subunit
  misc_feature (222)..(363): NCBI GI NO: 19114993 NR Description: eukaryotic translation initiation factor 2 alpha subunit
  misc_feature (44)..(195): NCBI GI NO: 40744551 NR Description: hypothetical protein AN3156.2
  misc_feature (222)..(364): NCBI GI NO: 40744551 NR Description: hypothetical protein AN3156.2
NRHFRFYCPPSAAGVSPKPNQTLDPPHSVPVRPSFPAKMPNLECRMYEQRFPEVDAAVMIQVKHIADMGAYVSLLEYNNIEGMILFSELSRRRIRSISSLIKVGRQEPAIVLRVDRDKGYIDLSKRRVSEEEAHACEDRYNKSKLVHSIMRHVAETLEIDLEPLYQRIGWPLYRKYGHAFEAFKLIVADPDAILDALTYEEKEVGPDGQEVTKVVPAVTPEVKDSLVKNIRRRMTPQPLKIRADIEMKCFQFDGVLHIKQAMKKAEAAGNDNCPVKIKLVAPPLYVLTTQTLDKDQGISVLTTAVKACTAEIEKYKGKLVVKEPPRAVSEREDKLFLDQIDSLMEQNAEVDGDADSEEEEDTGMGDVDITNSGVAAY

SEQ ID NO: 33014 - protein, 339 aa, Zea mays subsp. mays
  peptide (1)..(339): Ceres Seq. ID no. 12364920
  misc_feature (13)..(88): Pfam Name: Pfam Description:  S1 RNA binding domain
  misc_feature (1)..(338): NCBI GI NO: 34898218 NR Description: putative eukaryotic translation initiation factor 2 subunit 1
  misc_feature (1)..(336): NCBI GI NO: 18405334 NR Description: putative eukaryotic translation initiation factor 2alpha subunit
  misc_feature (1)..(336): NCBI GI NO: 21537411 NR Description: putative eukaryotic translation initiation factor 2alpha subunit
  misc_feature (2)..(336): NCBI GI NO: 15239135 NR Description: eukaryotic translation initiation factor 2 alpha subunit-like protein
  misc_feature (2)..(336): NCBI GI NO: 13549160 NR Description: protein synthesis initiation factor eIF2 alpha
  misc_feature (1)..(263): NCBI GI NO: 4588003 NR Description: hypothetical EIF-2-Alpha [Arabidopsis thaliana]
  misc_feature (1)..(183): NCBI GI NO: 19114993 NR Description: eukaryotic translation initiation factor 2 alpha subunit
  misc_feature (184)..(325): NCBI GI NO: 19114993 NR Description: eukaryotic translation initiation factor 2 alpha subunit
  misc_feature (6)..(157): NCBI GI NO: 40744551 NR Description: hypothetical protein AN3156.2
  misc_feature (184)..(326): NCBI GI NO: 40744551 NR Description: hypothetical protein AN3156.2
MPNLECRMYEQRFPEVDAAVMIQVKHIADMGAYVSLLEYNNIEGMILFSELSRRRIRSISSLIKVGRQEPAIVLRVDRDKGYIDLSKRRVSEEEAHACEDRYNKSKLVHSIMRHVAETLEIDLEPLYQRIGWPLYRKYGHAFEAFKLIVADPDAILDALTYEEKEVGPDGQEVTKVVPAVTPEVKDSLVKNIRRRMTPQPLKIRADIEMKCFQFDGVLHIKQAMKKAEAAGNDNCPVKIKLVAPPLYVLTTQTLDKDQGISVLTTAVKACTAEIEKYKGKLVVKEPPRAVSEREDKLFLDQIDSLMEQNAEVDGDADSEEEEDTGMGDVDITNSGVAAY

SEQ ID NO: 33015 - protein, 332 aa, Zea mays subsp. mays
  peptide (1)..(332): Ceres Seq. ID no. 12364921
  misc_feature (6)..(81): Pfam Name: Pfam Description:  S1 RNA binding domain
  misc_feature (1)..(331): NCBI GI NO: 34898218 NR Description: putative eukaryotic translation initiation factor 2 subunit 1
  misc_feature (1)..(329): NCBI GI NO: 18405334 NR Description: putative eukaryotic translation initiation factor 2alpha subunit
  misc_feature (1)..(329): NCBI GI NO: 21537411 NR Description: putative eukaryotic translation initiation factor 2alpha subunit
  misc_feature (1)..(329): NCBI GI NO: 15239135 NR Description: eukaryotic translation initiation factor 2 alpha subunit-like protein
  misc_feature (1)..(329): NCBI GI NO: 13549160 NR Description: protein synthesis initiation factor eIF2 alpha
  misc_feature (1)..(256): NCBI GI NO: 4588003 NR Description: hypothetical EIF-2-Alpha [Arabidopsis thaliana]
  misc_feature (1)..(176): NCBI GI NO: 19114993 NR Description: eukaryotic translation initiation factor 2 alpha subunit
  misc_feature (177)..(318): NCBI GI NO: 19114993 NR Description: eukaryotic translation initiation factor 2 alpha subunit
  misc_feature (1)..(150): NCBI GI NO: 40744551 NR Description: hypothetical protein AN3156.2
  misc_feature (177)..(319): NCBI GI NO: 40744551 NR Description: hypothetical protein AN3156.2
MYEQRFPEVDAAVMIQVKHIADMGAYVSLLEYNNIEGMILFSELSRRRIRSISSLIKVGRQEPAIVLRVDRDKGYIDLSKRRVSEEEAHACEDRYNKSKLVHSIMRHVAETLEIDLEPLYQRIGWPLYRKYGHAFEAFKLIVADPDAILDALTYEEKEVGPDGQEVTKVVPAVTPEVKDSLVKNIRRRMTPQPLKIRADIEMKCFQFDGVLHIKQAMKKAEAAGNDNCPVKIKLVAPPLYVLTTQTLDKDQGISVLTTAVKACTAEIEKYKGKLVVKEPPRAVSEREDKLFLDQIDSLMEQNAEVDGDADSEEEEDTGMGDVDITNSGVAAY

SEQ ID NO: 33016 - DNA, 1699 bp, Zea mays subsp. mays
  misc_feature (1)..(1699): Ceres Seq. ID no. 12376457
agagcagagctgcctccagacgagacgaggaggacgcggcgccgctcgggcttggcagcaaccagcgtcgagcgcagtgcccttctgtctcctatctccccgctgcccagccgggtctcactttccagtctccgagactctgagtctcgctcgcaccccgtcccccgcagcctgtgctctgggttggagggaggtgagctgcgagggagcgcggagggggcgaggagatggaggcagattcggcgaggaagagacttgcattgctggccctgcttctcctggcggcgcccgtccgcccggcctcggcggctccggtggaggatggcctgctcagcaatggtgactttgagacagcaccaagtggtggttttgtaaaatctgcgtctgttgctgagggtgcatcgtcaatccctggttggacgatcaacggcacggttgaactcatttcagcaggccaacactagggtggcatgatcctgattgttccacagggggaccatgcagtaaggctagggaatgatgctagcgttgggcaggtggtggacgttgagaagggttcggagtatgctatcacattcagtgctgcccggacatgtgcacaactggaggcactgaatgtttccgtgctaggtggcgtatctcagacagtagacttgcagacgttgtacaacatagaaggctgggatgcgtacgcgttggcttttcaggcgacggaagagcaggcacatcttcaattcatgaaccctggcatggaggatgatccaacttgtggtcctatcctagacaacgttgcagtcaagaagctcttcaccccagacaaaccaaaggataacgtggtgctgaatggagactttgaggagggtccatggatgttcccgaacacgagcttcggcgtgctgctcccaactaaccttgacgagcagacgtctgccatacctgggtggatgatcgagtcaaaccgcgccgtccgctacatagactctgatgagtacaaggttccccagggaaagcgtgccattgagcttctgtcaggcaaggagggtatcatctcccagatggttgagaccacccctcagaaggtttacagcctgacgttcacactgggcacggcgggggactcgtgccaaccaccaatggccgtcatggcgttcgcgggggatcaggcccagaacttccactactccccaatgagcaatgccaccagccaggctgcgaatgtgacgttcactgcacgcgctgagagaacacgtgtggcgttctatagcgtgtactacaacacgaggagtgacgaccacagctcgctgtgtggcccagtgattgacgatgtccgggtatgggcattgaacgccgcggctgggttgaaggcaagtattggactggttcttggcgttgttggtgtcgttggcatggtgctgttctgaaatctgaatctctcggtggcagtggtcttgggaagtatggatgtataacttcttctgttagttggaggcttactagttttggtagtaagcttgaagtttgttgagtgatatgagcttaggttaaaaagctacgagaacctacatggtattgcttgtgttacttcattggtgacatgcagttgtatggtattgtgtggcttgtttgccctagcttgtaatatgagatgtcagaattattcgagatcatctcttcaatatattagaaaagagtaaagtgc

SEQ ID NO: 33017 - protein, 316 aa, Zea mays subsp. mays
  peptide (1)..(316): Ceres Seq. ID no. 12376458
  misc_feature (1)..(292): Pfam Name: Pfam Description:  Protein of unknown function, DUF642
  misc_feature (1)..(316): NCBI GI NO: 34909656 NR Description: OJ1414_E05.5
  misc_feature (69)..(316): NCBI GI NO: 34913458 NR Description: P0702H08.18
  misc_feature (1)..(314): NCBI GI NO: 18397308 NR Description: expressed protein; protein id: At1g29980
  misc_feature (1)..(308): NCBI GI NO: 15226760 NR Description: unknown protein; protein id: At2g34510
  misc_feature (1)..(288): NCBI GI NO: 7488898 NR Description: hypothetical protein - castor bean
  misc_feature (1)..(288): NCBI GI NO: 18418018 NR Description: putative protein; protein id: At4g32460
  misc_feature (1)..(296): NCBI GI NO: 15220093 NR Description: hypothetical protein; protein id: At1g80240.1
  misc_feature (1)..(294): NCBI GI NO: 7488741 NR Description: hypothetical protein precursor - alfalfa
  misc_feature (1)..(288): NCBI GI NO: 23397043 NR Description: unknown protein [Arabidopsis thaliana]
  misc_feature (1)..(288): NCBI GI NO: 15239049 NR Description: putative protein; protein id: At5g11420
MILIVPQGDHAVRLGNDASVGQVVDVEKGSEYAITFSAARTCAQLEALNVSVLGGVSQTVDLQTLYNIEGWDAYALAFQATEEQAHLQFMNPGMEDDPTCGPILDNVAVKKLFTPDKPKDNVVLNGDFEEGPWMFPNTSFGVLLPTNLDEQTSAIPGWMIESNRAVRYIDSDEYKVPQGKRAIELLSGKEGIISQMVETTPQKVYSLTFTLGTAGDSCQPPMAVMAFAGDQAQNFHYSPMSNATSQAANVTFTARAERTRVAFYSVYYNTRSDDHSSLCGPVIDDVRVWALNAAAGLKASIGLVLGVVGVVGMVLF

SEQ ID NO: 33018 - protein, 227 aa, Zea mays subsp. mays
  peptide (1)..(227): Ceres Seq. ID no. 12376459
  misc_feature (1)..(203): Pfam Name: Pfam Description:  Protein of unknown function, DUF642
  misc_feature (1)..(227): NCBI GI NO: 34909656 NR Description: OJ1414_E05.5
  misc_feature (1)..(227): NCBI GI NO: 34913458 NR Description: P0702H08.18
  misc_feature (1)..(225): NCBI GI NO: 18397308 NR Description: expressed protein; protein id: At1g29980
  misc_feature (1)..(219): NCBI GI NO: 15226760 NR Description: unknown protein; protein id: At2g34510
  misc_feature (1)..(199): NCBI GI NO: 7488898 NR Description: hypothetical protein - castor bean
  misc_feature (1)..(199): NCBI GI NO: 18418018 NR Description: putative protein; protein id: At4g32460
  misc_feature (1)..(207): NCBI GI NO: 15220093 NR Description: hypothetical protein; protein id: At1g80240.1
  misc_feature (1)..(205): NCBI GI NO: 7488741 NR Description: hypothetical protein precursor - alfalfa
  misc_feature (1)..(199): NCBI GI NO: 23397043 NR Description: unknown protein [Arabidopsis thaliana]
  misc_feature (1)..(199): NCBI GI NO: 15239049 NR Description: putative protein; protein id: At5g11420
MNPGMEDDPTCGPILDNVAVKKLFTPDKPKDNVVLNGDFEEGPWMFPNTSFGVLLPTNLDEQTSAIPGWMIESNRAVRYIDSDEYKVPQGKRAIELLSGKEGIISQMVETTPQKVYSLTFTLGTAGDSCQPPMAVMAFAGDQAQNFHYSPMSNATSQAANVTFTARAERTRVAFYSVYYNTRSDDHSSLCGPVIDDVRVWALNAAAGLKASIGLVLGVVGVVGMVLF

SEQ ID NO: 33019 - protein, 223 aa, Zea mays subsp. mays
  peptide (1)..(223): Ceres Seq. ID no. 12376460
  misc_feature (1)..(199): Pfam Name: Pfam Description:  Protein of unknown function, DUF642
  misc_feature (1)..(223): NCBI GI NO: 34909656 NR Description: OJ1414_E05.5
  misc_feature (1)..(223): NCBI GI NO: 34913458 NR Description: P0702H08.18
  misc_feature (1)..(221): NCBI GI NO: 18397308 NR Description: expressed protein; protein id: At1g29980
  misc_feature (1)..(215): NCBI GI NO: 15226760 NR Description: unknown protein; protein id: At2g34510
  misc_feature (1)..(195): NCBI GI NO: 7488898 NR Description: hypothetical protein - castor bean
  misc_feature (1)..(195): NCBI GI NO: 18418018 NR Description: putative protein; protein id: At4g32460
  misc_feature (1)..(203): NCBI GI NO: 15220093 NR Description: hypothetical protein; protein id: At1g80240.1
  misc_feature (1)..(201): NCBI GI NO: 7488741 NR Description: hypothetical protein precursor - alfalfa
  misc_feature (1)..(195): NCBI GI NO: 23397043 NR Description: unknown protein [Arabidopsis thaliana]
  misc_feature (1)..(195): NCBI GI NO: 15239049 NR Description: putative protein; protein id: At5g11420
MEDDPTCGPILDNVAVKKLFTPDKPKDNVVLNGDFEEGPWMFPNTSFGVLLPTNLDEQTSAIPGWMIESNRAVRYIDSDEYKVPQGKRAIELLSGKEGIISQMVETTPQKVYSLTFTLGTAGDSCQPPMAVMAFAGDQAQNFHYSPMSNATSQAANVTFTARAERTRVAFYSVYYNTRSDDHSSLCGPVIDDVRVWALNAAAGLKASIGLVLGVVGVVGMVLF

SEQ ID NO: 33020 - DNA, 1778 bp, Zea mays subsp. mays
  misc_feature (1)..(1778): Ceres Seq. ID no. 12413850
aacttctttcttgttcggatcgggtcaggtcagtgctccgtgttgcgttttcttaagaacacgaaaaaaaaagaggggagagtttctttcgggtcctctttttctttgattgtcgaaaggccgctcctttaggagatttgcgcgcttctcgtcgagattagccgccggtgctcggatcgatctgtttgcggtggaggaattttgaggccaagaagagagttggaatcggatcgggagttcttgtggtcacagggtgcgaaaaaagcgagtgatttttgggaggatttcttgttgggaaaaaatcggttgttcagcggattagaggcggagatgggagccggggctgaggtcatgcatcaggtcgtgccgctgctggagccgccgctccaccggtgcgtcgttaagagcgtcgatgtcatggaggaggtggttgccgtggcgcctgggcaggtgcagccagcgacgtcgccgaaggcgctgttggaggttgccgtagaggtgcccgatctggagttgaagagatcttctaatgctgggagtagtgtatctgcagaacaactgcagtttgtccctatcattcgatctggtagctttgctgatattggacctaggcggttcatggaagatgagcatattagaattgatgatctttctggtcatcttggctcactgttgatggtctctgcgcctagcgcgttctacggggtgtttgacggtcatgggggttcagatgcagcagcctacatgaaaacacatgcaatgaggttgttctttgaagatgctgacttccctcaagcatcacaagaggataaaatatttgctgaatctgttgaggattcggtccgcagagctttcttgcgggctgaccttgcacttgctgatgattcagtcatcaaccgttcttctggcaccacagcgctgacagcattggtccttgggaggcaactgttggtagcaaacgctggggactgccgcgccgtcctgtgtaggaaagggacagcggtggaggtgtcaaaggatcacaggccgacatacgacgcagagcgtcaaagggttatcgagtgcggtggatacatcgaagatgggtacctcaacggcgtactctctgtgacccgggctttaggggactgggacatgaagctgccccaaggctctccgtcgccccttatcgcagagccagagatccactggaccaccctgacggaagacgacgagttcctcatcatcggctgcgatgggatatgggatgtgatgagcagccagcacgcggtgagcacggtccgcaagggcctccggaggcacgatgaccccgggcggagtgcccaggagctcgccatggaggcgaagaggctcgagaccttcgacaacctcaccgtgatcgttgtctgctttgtccccgacctcgccgggggcgtcggctacgccctcggagcaggtgccggctggaaggatcaggtgccgcaagagcttgtcgccagaggcactctgcaagctgaggagatggctcgagtctgaccagtagacgcttctatctgtagaggccagcgccagcctgtgtttctgtgctgtggctgtgtaaatattggcgctgatggtgttccgtctagtacggctgtgcttacacggccagcaattttgtagctgagagagagttccccccaccgccgctgccgcttttgttttcacaccgttttgtacttttgtgggatgtacataccattaccattgttgctcggttcggctcagtttggcagagagaataactactctagttcgct

SEQ ID NO: 33021 - protein, 394 aa, Zea mays subsp. mays
  peptide (1)..(394): Ceres Seq. ID no. 12413851
  misc_feature (83)..(347): Pfam Name: Pfam Description:  Protein phosphatase 2C
  misc_feature (1)..(361): NCBI GI NO: 34894410 NR Description: putative protein phosphatase
  misc_feature (47)..(354): NCBI GI NO: 25352221 NR Description: phosphoprotein phosphatase (EC 3.1.3.16) 2C
  misc_feature (77)..(355): NCBI GI NO: 15228717 NR Description: protein phosphatase 2C
  misc_feature (77)..(355): NCBI GI NO: 30695577 NR Description: protein phosphatase 2C (PP2C), putative
  misc_feature (40)..(354): NCBI GI NO: 15221047 NR Description: protein phosphatase-2C, putative
  misc_feature (56)..(354): NCBI GI NO: 30684431 NR Description: protein phosphatase 2C (PP2C) -related
  misc_feature (75)..(357): NCBI GI NO: 15226152 NR Description: protein phosphatase 2C
  misc_feature (79)..(357): NCBI GI NO: 10140768 NR Description: putative protein phosphatase-2C [Oryza sativa]
  misc_feature (79)..(357): NCBI GI NO: 37536524 NR Description: putative protein phosphatase-2C
  misc_feature (79)..(357): NCBI GI NO: 15230495 NR Description: protein phosphatase 2C
MGAGAEVMHQVVPLLEPPLHRCVVKSVDVMEEVVAVAPGQVQPATSPKALLEVAVEVPDLELKRSSNAGSSVSAEQLQFVPIIRSGSFADIGPRRFMEDEHIRIDDLSGHLGSLLMVSAPSAFYGVFDGHGGSDAAAYMKTHAMRLFFEDADFPQASQEDKIFAESVEDSVRRAFLRADLALADDSVINRSSGTTALTALVLGRQLLVANAGDCRAVLCRKGTAVEVSKDHRPTYDAERQRVIECGGYIEDGYLNGVLSVTRALGDWDMKLPQGSPSPLIAEPEIHWTTLTEDDEFLIIGCDGIWDVMSSQHAVSTVRKGLRRHDDPGRSAQELAMEAKRLETFDNLTVIVVCFVPDLAGGVGYALGAGAGWKDQVPQELVARGTLQAEEMARV

SEQ ID NO: 33022 - protein, 387 aa, Zea mays subsp. mays
  peptide (1)..(387): Ceres Seq. ID no. 12413852
  misc_feature (76)..(340): Pfam Name: Pfam Description:  Protein phosphatase 2C
  misc_feature (1)..(354): NCBI GI NO: 34894410 NR Description: putative protein phosphatase
  misc_feature (40)..(347): NCBI GI NO: 25352221 NR Description: phosphoprotein phosphatase (EC 3.1.3.16) 2C
  misc_feature (70)..(348): NCBI GI NO: 15228717 NR Description: protein phosphatase 2C
  misc_feature (70)..(348): NCBI GI NO: 30695577 NR Description: protein phosphatase 2C (PP2C), putative
  misc_feature (33)..(347): NCBI GI NO: 15221047 NR Description: protein phosphatase-2C, putative
  misc_feature (49)..(347): NCBI GI NO: 30684431 NR Description: protein phosphatase 2C (PP2C) -related
  misc_feature (68)..(350): NCBI GI NO: 15226152 NR Description: protein phosphatase 2C
  misc_feature (72)..(350): NCBI GI NO: 10140768 NR Description: putative protein phosphatase-2C [Oryza sativa]
  misc_feature (72)..(350): NCBI GI NO: 37536524 NR Description: putative protein phosphatase-2C
  misc_feature (72)..(350): NCBI GI NO: 15230495 NR Description: protein phosphatase 2C
MHQVVPLLEPPLHRCVVKSVDVMEEVVAVAPGQVQPATSPKALLEVAVEVPDLELKRSSNAGSSVSAEQLQFVPIIRSGSFADIGPRRFMEDEHIRIDDLSGHLGSLLMVSAPSAFYGVFDGHGGSDAAAYMKTHAMRLFFEDADFPQASQEDKIFAESVEDSVRRAFLRADLALADDSVINRSSGTTALTALVLGRQLLVANAGDCRAVLCRKGTAVEVSKDHRPTYDAERQRVIECGGYIEDGYLNGVLSVTRALGDWDMKLPQGSPSPLIAEPEIHWTTLTEDDEFLIIGCDGIWDVMSSQHAVSTVRKGLRRHDDPGRSAQELAMEAKRLETFDNLTVIVVCFVPDLAGGVGYALGAGAGWKDQVPQELVARGTLQAEEMARV

SEQ ID NO: 33023 - protein, 365 aa, Zea mays subsp. mays
  peptide (1)..(365): Ceres Seq. ID no. 12413853
  misc_feature (54)..(318): Pfam Name: Pfam Description:  Protein phosphatase 2C
  misc_feature (1)..(332): NCBI GI NO: 34894410 NR Description: putative protein phosphatase
  misc_feature (18)..(325): NCBI GI NO: 25352221 NR Description: phosphoprotein phosphatase (EC 3.1.3.16) 2C
  misc_feature (48)..(326): NCBI GI NO: 15228717 NR Description: protein phosphatase 2C
  misc_feature (48)..(326): NCBI GI NO: 30695577 NR Description: protein phosphatase 2C (PP2C), putative
  misc_feature (11)..(325): NCBI GI NO: 15221047 NR Description: protein phosphatase-2C, putative
  misc_feature (27)..(325): NCBI GI NO: 30684431 NR Description: protein phosphatase 2C (PP2C) -related
  misc_feature (46)..(328): NCBI GI NO: 15226152 NR Description: protein phosphatase 2C
  misc_feature (50)..(328): NCBI GI NO: 10140768 NR Description: putative protein phosphatase-2C [Oryza sativa]
  misc_feature (50)..(328): NCBI GI NO: 37536524 NR Description: putative protein phosphatase-2C
  misc_feature (50)..(328): NCBI GI NO: 15230495 NR Description: protein phosphatase 2C
MEEVVAVAPGQVQPATSPKALLEVAVEVPDLELKRSSNAGSSVSAEQLQFVPIIRSGSFADIGPRRFMEDEHIRIDDLSGHLGSLLMVSAPSAFYGVFDGHGGSDAAAYMKTHAMRLFFEDADFPQASQEDKIFAESVEDSVRRAFLRADLALADDSVINRSSGTTALTALVLGRQLLVANAGDCRAVLCRKGTAVEVSKDHRPTYDAERQRVIECGGYIEDGYLNGVLSVTRALGDWDMKLPQGSPSPLIAEPEIHWTTLTEDDEFLIIGCDGIWDVMSSQHAVSTVRKGLRRHDDPGRSAQELAMEAKRLETFDNLTVIVVCFVPDLAGGVGYALGAGAGWKDQVPQELVARGTLQAEEMARV

SEQ ID NO: 33024 - DNA, 882 bp, Zea mays subsp. mays
  misc_feature (1)..(882): Ceres Seq. ID no. 12402320
attcactcctcgcgcctcgtgatcccatccaaatcccgatcagtccccgcccaagcctagcagatccgccggcgagcgcgcgggggcaatgggtgtcgtctcggcagcggcggacgcgattgtcgcggttttctccctcaccatcgtcgtcgcggcgccgctactcgacgcgcagtccgtcctcccgcataccctctacccggcgccgctcctggaactcaagcgctggtacgccgccgagtttggcgactacctcatggcccagccccccggcttcttccgtggccttgtttgcctcgagctcgccttccaatggccgctcgccgtcgccacactctacggcatcctcacccgccgccgctggggctgccaccacctccctcatggccggcgttggcaccctcacctccatgtctgcaattcttggtgagatgttaggttcaggcaaatcaacaccaaagttgcttcagatgtatgttccttatgctgtttttgctgtcattgctattctacgtggactttgctcatgctctggacgcactactgctggttcatcacttgggccttctgcccggaagaagagggtctagatcagcagtgacacttggagaattttcggtttgagacagtggcgccagagcactaatgctggtcagaagacgattatctggatcaggtttctatccctggtatttagcacggatgttgaaaaatccagatagtgttagtggctgtttctctaggatttggtgttcgttttcccttaaatgtgatattcatcttgcctttatttccattttaccctttgattatatgtcttgctaactaagacattgatttgtttactggatgagctgattctactctggcattgttctggcc

SEQ ID NO: 33025 - protein, 195 aa, Zea mays subsp. mays
  peptide (1)..(195): Ceres Seq. ID no. 12402321
  misc_feature (122)..(194): NCBI GI NO: 28411944 NR Description: OSJNBa0027N13.37
  misc_feature (122)..(194): NCBI GI NO: 28411943 NR Description: OSJNBa0027N13.35
  misc_feature (124)..(194): NCBI GI NO: 18402955 NR Description: expressed protein; protein id: At2g32380
  misc_feature (124)..(185): NCBI GI NO: 18390494 NR Description: expressed protein; protein id: At1g05210
  misc_feature (124)..(177): NCBI GI NO: 15220447 NR Description: hypothetical protein; protein id: At1g05220.1
SLLAPRDPIQIPISPRPSLADPPASARGQWVSSRQRRTRLSRFSPSPSSSRRRYSTRSPSSRIPSTRRRSWNSSAGTPPSLATTSWPSPPASSVALFASSSPSNGRSPSPHSTASSPAAAGAATTSLMAGVGTLTSMSAILGEMLGSGKSTPKLLQMYVPYAVFAVIAILRGLCSCSGRTTAGSSLGPSARKKRV

SEQ ID NO: 33026 - protein, 113 aa, Zea mays subsp. mays
  peptide (1)..(113): Ceres Seq. ID no. 12402322
  misc_feature (1)..(92): NCBI GI NO: 28411944 NR Description: OSJNBa0027N13.37
  misc_feature (1)..(92): NCBI GI NO: 28411943 NR Description: OSJNBa0027N13.35
  misc_feature (1)..(100): NCBI GI NO: 18402955 NR Description: expressed protein; protein id: At2g32380
  misc_feature (1)..(92): NCBI GI NO: 18390494 NR Description: expressed protein; protein id: At1g05210
  misc_feature (1)..(100): NCBI GI NO: 15220447 NR Description: hypothetical protein; protein id: At1g05220.1
  misc_feature (1)..(92): NCBI GI NO: 19526880 NR Description: RIKEN cDNA 1810014L12 [Mus musculus]
  misc_feature (1)..(92): NCBI GI NO: 27688749 NR Description: similar to RIKEN cDNA 1810014L12
  misc_feature (11)..(87): NCBI GI NO: 2135212 NR Description: gene MAC30 protein - human (fragment)
MGVVSAAADAIVAVFSLTIVVAAPLLDAQSVLPHTLYPAPLLELKRWYAAEFGDYLMAQPPGFFRGLVCLELAFQWPLAVATLYGILTRRRWGCHHLPHGRRWHPHLHVCNSW

SEQ ID NO: 33027 - DNA, 1162 bp, Zea mays subsp. mays
  misc_feature (1)..(1162): Ceres Seq. ID no. 12401808
agtccgccacaagcacacgcgcacacaggggccaagcgcctacacctacagaggagagacaaggtctgccgtccgcgcgtgcgcggaagaggggacggaggaagaaggctgccagcaatcagagatggaggtggggttcttgggtctgggcatcatgggcaaggcaatggcgaccaacctcctccgccacggcttccgcgtcaccgtctggaacaggaccctcgccaagtgccaagagctcgccgcgctcggcgccaccgtcggggagacgcctgcctccgtcgtctccaagtgcagatacaccatcgccatgctctccgaccccagcgccgccctatcagtcgtcttcgacaaggatggcgtgctcgagcagatcggtagcgggaagggctatgtggacatgtccactgttgacgctgcaacttcgaccaagattagcgaggcagttaaacaaaaagggggagctttccttgaagctccagtttcagggagcaagaagccagctgaagatggccaattggtcattcttgctgcagggaacaagccattgtatgatggtatgattcctgcatttgatgtactggggaagaagtcattctttctgggagagattggaaatggggcaaagatgaagcttgtggtcaacatggtcatgggaagtatgatgaattctttgtccgagggactctgtttggccgacaaaagtgggctgagcccccaaacacttcttgatgtactggaccttggcgccatcgcaaacccaatgttcaagctgaaggggcctacaatgctgcaaggcagctacagccctgcgtttcccctgaagcatcagcagaaggacatgaggttagcgcttgctctgggagatgagaacgccgtcgccatgcccgtctcagcagctgccaatgaggcgttcaagaaggcgaggagcctggggctgggagaccaggatttttcggcggtctatgaggttgtgaagggcgcgggtggttctggatctggccagccgtgatagaaggaccatttgtgagttgtgactttgttagcccatttccatgccgatttgcaacatagcgacgtacgagtacgtgtgtattcgaaatttggaaccagaccatacgttgcaaaagaaataataaatcaaagagatggtgctagctcg

SEQ ID NO: 33028 - protein, 336 aa, Zea mays subsp. mays
  peptide (1)..(336): Ceres Seq. ID no. 12401809
  misc_feature (43)..(203): Pfam Name: Pfam Description:  NAD binding domain of 6-phosphogluconate dehydrogenase
  misc_feature (42)..(332): NCBI GI NO: 29368238 NR Description: gamma hydroxybutyrate dehydrogenase-like protein
  misc_feature (42)..(326): NCBI GI NO: 15375068 NR Description: gamma hydroxybutyrate dehydrogenase
  misc_feature (42)..(326): NCBI GI NO: 18404556 NR Description: expressed protein; protein id: At3g25530
  misc_feature (42)..(267): NCBI GI NO: 15146314 NR Description: AT3g25530/MWL2_15 [Arabidopsis thaliana]
  misc_feature (45)..(326): NCBI GI NO: 23054597 NR Description: hypothetical protein [Geobacter metallireducens]
  misc_feature (42)..(328): NCBI GI NO: 18394513 NR Description: Expressed protein; protein id: At1g17650
  misc_feature (112)..(328): NCBI GI NO: 8778467 NR Description: F1L3.35 [Arabidopsis thaliana]
  misc_feature (42)..(112): NCBI GI NO: 8778467 NR Description: F1L3.35 [Arabidopsis thaliana]
  misc_feature (45)..(326): NCBI GI NO: 39996474 NR Description: 3-hydroxyisobutyrate dehydrogenase family protein
  misc_feature (19)..(322): NCBI GI NO: 13277568 NR Description: Similar to RIKEN cDNA 3930401K13 gene
VRHKHTRTQGPSAYTYRGETRSAVRACAEEGTEEEGCQQSEMEVGFLGLGIMGKAMATNLLRHGFRVTVWNRTLAKCQELAALGATVGETPASVVSKCRYTIAMLSDPSAALSVVFDKDGVLEQIGSGKGYVDMSTVDAATSTKISEAVKQKGGAFLEAPVSGSKKPAEDGQLVILAAGNKPLYDGMIPAFDVLGKKSFFLGEIGNGAKMKLVVNMVMGSMMNSLSEGLCLADKSGLSPQTLLDVLDLGAIANPMFKLKGPTMLQGSYSPAFPLKHQQKDMRLALALGDENAVAMPVSAAANEAFKKARSLGLGDQDFSAVYEVVKGAGGSGSGQP

SEQ ID NO: 33029 - protein, 295 aa, Zea mays subsp. mays
  peptide (1)..(295): Ceres Seq. ID no. 12401810
  misc_feature (2)..(162): Pfam Name: Pfam Description:  NAD binding domain of 6-phosphogluconate dehydrogenase
  misc_feature (1)..(291): NCBI GI NO: 29368238 NR Description: gamma hydroxybutyrate dehydrogenase-like protein
  misc_feature (1)..(285): NCBI GI NO: 15375068 NR Description: gamma hydroxybutyrate dehydrogenase
  misc_feature (1)..(285): NCBI GI NO: 18404556 NR Description: expressed protein; protein id: At3g25530
  misc_feature (1)..(226): NCBI GI NO: 15146314 NR Description: AT3g25530/MWL2_15 [Arabidopsis thaliana]
  misc_feature (4)..(285): NCBI GI NO: 23054597 NR Description: hypothetical protein [Geobacter metallireducens]
  misc_feature (1)..(287): NCBI GI NO: 18394513 NR Description: Expressed protein; protein id: At1g17650
  misc_feature (71)..(287): NCBI GI NO: 8778467 NR Description: F1L3.35 [Arabidopsis thaliana]
  misc_feature (1)..(71): NCBI GI NO: 8778467 NR Description: F1L3.35 [Arabidopsis thaliana]
  misc_feature (4)..(285): NCBI GI NO: 39996474 NR Description: 3-hydroxyisobutyrate dehydrogenase family protein
  misc_feature (1)..(281): NCBI GI NO: 13277568 NR Description: Similar to RIKEN cDNA 3930401K13 gene
MEVGFLGLGIMGKAMATNLLRHGFRVTVWNRTLAKCQELAALGATVGETPASVVSKCRYTIAMLSDPSAALSVVFDKDGVLEQIGSGKGYVDMSTVDAATSTKISEAVKQKGGAFLEAPVSGSKKPAEDGQLVILAAGNKPLYDGMIPAFDVLGKKSFFLGEIGNGAKMKLVVNMVMGSMMNSLSEGLCLADKSGLSPQTLLDVLDLGAIANPMFKLKGPTMLQGSYSPAFPLKHQQKDMRLALALGDENAVAMPVSAAANEAFKKARSLGLGDQDFSAVYEVVKGAGGSGSGQP

SEQ ID NO: 33030 - protein, 285 aa, Zea mays subsp. mays
  peptide (1)..(285): Ceres Seq. ID no. 12401811
  misc_feature (1)..(152): Pfam Name: Pfam Description:  NAD binding domain of 6-phosphogluconate dehydrogenase
  misc_feature (1)..(281): NCBI GI NO: 29368238 NR Description: gamma hydroxybutyrate dehydrogenase-like protein
  misc_feature (1)..(275): NCBI GI NO: 15375068 NR Description: gamma hydroxybutyrate dehydrogenase
  misc_feature (1)..(275): NCBI GI NO: 18404556 NR Description: expressed protein; protein id: At3g25530
  misc_feature (1)..(216): NCBI GI NO: 15146314 NR Description: AT3g25530/MWL2_15 [Arabidopsis thaliana]
  misc_feature (1)..(275): NCBI GI NO: 23054597 NR Description: hypothetical protein [Geobacter metallireducens]
  misc_feature (1)..(277): NCBI GI NO: 18394513 NR Description: Expressed protein; protein id: At1g17650
  misc_feature (61)..(277): NCBI GI NO: 8778467 NR Description: F1L3.35 [Arabidopsis thaliana]
  misc_feature (1)..(61): NCBI GI NO: 8778467 NR Description: F1L3.35 [Arabidopsis thaliana]
  misc_feature (1)..(275): NCBI GI NO: 39996474 NR Description: 3-hydroxyisobutyrate dehydrogenase family protein
  misc_feature (1)..(271): NCBI GI NO: 13277568 NR Description: Similar to RIKEN cDNA 3930401K13 gene
MGKAMATNLLRHGFRVTVWNRTLAKCQELAALGATVGETPASVVSKCRYTIAMLSDPSAALSVVFDKDGVLEQIGSGKGYVDMSTVDAATSTKISEAVKQKGGAFLEAPVSGSKKPAEDGQLVILAAGNKPLYDGMIPAFDVLGKKSFFLGEIGNGAKMKLVVNMVMGSMMNSLSEGLCLADKSGLSPQTLLDVLDLGAIANPMFKLKGPTMLQGSYSPAFPLKHQQKDMRLALALGDENAVAMPVSAAANEAFKKARSLGLGDQDFSAVYEVVKGAGGSGSGQP

SEQ ID NO: 33031 - DNA, 1220 bp, Zea mays subsp. mays
  misc_feature (1)..(1220): Ceres Seq. ID no. 12404052
acaacagcatcatggcgctcaccacgagcactaacaaccaagccttgcttgacgctcagctagagctctggcacacatcctttgctttcatcaagtccatggctctcaagtctgcagtggaccttggcatagccgacgccatccacagccacggtggcaacgccaccctgccccagatagtttccagggccgcgctccacccgtccaagatcccctgcctgcgtcgcctcatgcgggtgctcacagccgccggcatcttcagcgccgcccaccgctcgccggacgacggcggcggcgagctcgtctatggactcacaccggcgtctcagctcttggttggcggctcttcaagcctggctcccttcatgtccctggtgttacaccaggtctacgtgtcgcctttccttggcctcggcacatggttacagcacgagcgctcagacccgaccctgtttgagatgacgcatgggctcactgcctgggacctgaatgaccacaagccagccttcggcgagctcttcaaccaaggtatggtctgcgacagcagcttcgtcatggacatcgtcgtcaaggagtgcggcgacgtcttccggggtctgagctcccttgtcgacgtcgccggagggcttggcgcggcggccctggctatctcgaccgcgttcccgcatgtccagtgcagtgtgctggatctcccgcatgtcgccgccaatgctcccgctaacaccagtgtcaagtatattgctggcgacatgtttgagagcattccaccggcagacgccgtcttccttaagtgggttttgcatgactggggcgatgctgattgcatcaagatacttaagaactgtaagaaagctataccttctagggatgcaggaggaaaggtgataatcgttgatatggttgttggaggccagtcgtcaaacaataagcacaaagagactcaggtcttgtttgatctcttcatcatgacgatcaatggcgccgagcgagacgaacatgagtggaaaaagataatttctgaagctgggtttagcgactacaaaatcatacctgttctaggtgttcgatccatcattgaggtctacccatgattatttggcgaatacgtgtttcgctttttttctgaataagttgtttgcttaactagcatgggacgagtgtccatgagatcatgtgtgatgaaaactttgtttgtgatgaagtaagcactttgcaatgtc

SEQ ID NO: 33032 - protein, 362 aa, Zea mays subsp. mays
  peptide (1)..(362): Ceres Seq. ID no. 12404053
  misc_feature (95)..(339): Pfam Name: Pfam Description:  O-methyltransferase
  misc_feature (9)..(362): NCBI GI NO: 1353193 NR Description: O-METHYLTRANSFERASE ZRP4 (OMT)
  misc_feature (15)..(362): NCBI GI NO: 37530606 NR Description: putative o-methyltransferase ZRP4
  misc_feature (8)..(362): NCBI GI NO: 37530600 NR Description: putative o-methyltransferase ZRP4
  misc_feature (11)..(362): NCBI GI NO: 20514369 NR Description: orcinol O-methyltransferase [Rosa hybrid cultivar]
  misc_feature (12)..(362): NCBI GI NO: 22093735 NR Description: putative o-methyltransferase
  misc_feature (11)..(362): NCBI GI NO: 20514367 NR Description: orcinol O-methyltransferase [Rosa hybrid cultivar]
  misc_feature (4)..(362): NCBI GI NO: 4098238 NR Description: o-methyltransferase [Triticum aestivum]
  misc_feature (11)..(353): NCBI GI NO: 27527926 NR Description: orcinol O-methyltransferase [Rosa hybrid cultivar]
  misc_feature (11)..(353): NCBI GI NO: 27527928 NR Description: orcinol O-methyltransferase [Rosa hybrid cultivar]
  misc_feature (15)..(362): NCBI GI NO: 2282586 NR Description: methyltransferase [Prunus armeniaca]
NSIMALTTSTNNQALLDAQLELWHTSFAFIKSMALKSAVDLGIADAIHSHGGNATLPQIVSRAALHPSKIPCLRRLMRVLTAAGIFSAAHRSPDDGGGELVYGLTPASQLLVGGSSSLAPFMSLVLHQVYVSPFLGLGTWLQHERSDPTLFEMTHGLTAWDLNDHKPAFGELFNQGMVCDSSFVMDIVVKECGDVFRGLSSLVDVAGGLGAAALAISTAFPHVQCSVLDLPHVAANAPANTSVKYIAGDMFESIPPADAVFLKWVLHDWGDADCIKILKNCKKAIPSRDAGGKVIIVDMVVGGQSSNNKHKETQVLFDLFIMTINGAERDEHEWKKIISEAGFSDYKIIPVLGVRSIIEVYP

SEQ ID NO: 33033 - protein, 359 aa, Zea mays subsp. mays
  peptide (1)..(359): Ceres Seq. ID no. 12404054
  misc_feature (92)..(336): Pfam Name: Pfam Description:  O-methyltransferase
  misc_feature (6)..(359): NCBI GI NO: 1353193 NR Description: O-METHYLTRANSFERASE ZRP4 (OMT)
  misc_feature (12)..(359): NCBI GI NO: 37530606 NR Description: putative o-methyltransferase ZRP4
  misc_feature (5)..(359): NCBI GI NO: 37530600 NR Description: putative o-methyltransferase ZRP4
  misc_feature (8)..(359): NCBI GI NO: 20514369 NR Description: orcinol O-methyltransferase [Rosa hybrid cultivar]
  misc_feature (9)..(359): NCBI GI NO: 22093735 NR Description: putative o-methyltransferase
  misc_feature (8)..(359): NCBI GI NO: 20514367 NR Description: orcinol O-methyltransferase [Rosa hybrid cultivar]
  misc_feature (1)..(359): NCBI GI NO: 4098238 NR Description: o-methyltransferase [Triticum aestivum]
  misc_feature (8)..(350): NCBI GI NO: 27527926 NR Description: orcinol O-methyltransferase [Rosa hybrid cultivar]
  misc_feature (8)..(350): NCBI GI NO: 27527928 NR Description: orcinol O-methyltransferase [Rosa hybrid cultivar]
  misc_feature (12)..(359): NCBI GI NO: 2282586 NR Description: methyltransferase [Prunus armeniaca]
MALTTSTNNQALLDAQLELWHTSFAFIKSMALKSAVDLGIADAIHSHGGNATLPQIVSRAALHPSKIPCLRRLMRVLTAAGIFSAAHRSPDDGGGELVYGLTPASQLLVGGSSSLAPFMSLVLHQVYVSPFLGLGTWLQHERSDPTLFEMTHGLTAWDLNDHKPAFGELFNQGMVCDSSFVMDIVVKECGDVFRGLSSLVDVAGGLGAAALAISTAFPHVQCSVLDLPHVAANAPANTSVKYIAGDMFESIPPADAVFLKWVLHDWGDADCIKILKNCKKAIPSRDAGGKVIIVDMVVGGQSSNNKHKETQVLFDLFIMTINGAERDEHEWKKIISEAGFSDYKIIPVLGVRSIIEVYP

SEQ ID NO: 33034 - protein, 330 aa, Zea mays subsp. mays
  peptide (1)..(330): Ceres Seq. ID no. 12404055
  misc_feature (63)..(307): Pfam Name: Pfam Description:  O-methyltransferase
  misc_feature (1)..(330): NCBI GI NO: 1353193 NR Description: O-METHYLTRANSFERASE ZRP4 (OMT)
  misc_feature (1)..(330): NCBI GI NO: 37530606 NR Description: putative o-methyltransferase ZRP4
  misc_feature (1)..(330): NCBI GI NO: 37530600 NR Description: putative o-methyltransferase ZRP4
  misc_feature (1)..(330): NCBI GI NO: 20514369 NR Description: orcinol O-methyltransferase [Rosa hybrid cultivar]
  misc_feature (1)..(330): NCBI GI NO: 22093735 NR Description: putative o-methyltransferase
  misc_feature (1)..(330): NCBI GI NO: 20514367 NR Description: orcinol O-methyltransferase [Rosa hybrid cultivar]
  misc_feature (1)..(330): NCBI GI NO: 4098238 NR Description: o-methyltransferase [Triticum aestivum]
  misc_feature (1)..(321): NCBI GI NO: 27527926 NR Description: orcinol O-methyltransferase [Rosa hybrid cultivar]
  misc_feature (1)..(321): NCBI GI NO: 27527928 NR Description: orcinol O-methyltransferase [Rosa hybrid cultivar]
  misc_feature (1)..(330): NCBI GI NO: 2282586 NR Description: methyltransferase [Prunus armeniaca]
MALKSAVDLGIADAIHSHGGNATLPQIVSRAALHPSKIPCLRRLMRVLTAAGIFSAAHRSPDDGGGELVYGLTPASQLLVGGSSSLAPFMSLVLHQVYVSPFLGLGTWLQHERSDPTLFEMTHGLTAWDLNDHKPAFGELFNQGMVCDSSFVMDIVVKECGDVFRGLSSLVDVAGGLGAAALAISTAFPHVQCSVLDLPHVAANAPANTSVKYIAGDMFESIPPADAVFLKWVLHDWGDADCIKILKNCKKAIPSRDAGGKVIIVDMVVGGQSSNNKHKETQVLFDLFIMTINGAERDEHEWKKIISEAGFSDYKIIPVLGVRSIIEVYP

SEQ ID NO: 33035 - DNA, 802 bp, Zea mays subsp. mays
  misc_feature (1)..(802): Ceres Seq. ID no. 12345607
aagatttaacaattggtccagtccttacagttactacagaagccatgatagagcacatgaacaaccttctcaaaataagaggatcaaaggttctgtttggtggtgaaccgttagcgaatcactcaattcccaaaatttatggtgccatgaagcctactgctgtatttgttcctctagaagaaattctaaaaagtgggaacttcgagcttgtgacaaaggagatatttggtccattccaggtagtcacagaatactctgaggatcagcttgagttggtcttagaagcctgcgaaaggatgaatgcgcatctgacagctgcagttgtctcaaacgacccgctattcctgcaggatgtacttgggagatccgttaacgggacaacctacgccggaattcgagcgaggaccacgggcgctccacagaaccactggtttggcccggccggtgatccgcgaggcgcagggatcgggactccggaagccatcaaacttgtctggtcctgccacagggaagtcatatatgacgtcgggcccgtgcccgagagctgggcgcttccttccgcgacctgattagctagacgaggatagactattccatgtcatcacgagaaataaaaggggaagataagcgaagccagcaggactggagcgaccgaccgagagcgagtggctgcatgcctaggcattcattctctgcacgcaactgcactttcaaccctggagaaaacataataaatgctcgttcccctgtacttgagatacatggtacttggaccggaacgtcggacaactcgtctgttcgc

SEQ ID NO: 33036 - protein, 188 aa, Zea mays subsp. mays
  peptide (1)..(188): Ceres Seq. ID no. 12345608
  misc_feature (1)..(188): NCBI GI NO: 18449341 NR Description: putative aldehyde dehydrogenase MIS1 [Zea mays]
  misc_feature (1)..(188): NCBI GI NO: 18449337 NR Description: putative aldehyde dehydrogenase BIS1
  misc_feature (1)..(188): NCBI GI NO: 18449343 NR Description: putative aldehyde dehydrogenase WIS1
  misc_feature (1)..(188): NCBI GI NO: 10178084 NR Description: dehydrogenase [Arabidopsis thaliana]
  misc_feature (1)..(188): NCBI GI NO: 18424599 NR Description: dehydrogenase; protein id: At5g62530
  misc_feature (1)..(188): NCBI GI NO: 15383744 NR Description: delta-1-pyrroline-5- carboxylate dehydrogenaseprecursor
  misc_feature (1)..(188): NCBI GI NO: 34921534 NR Description: Probable aldehyde dehydrogenase
DLTIGPVLTVTTEAMIEHMNNLLKIRGSKVLFGGEPLANHSIPKIYGAMKPTAVFVPLEEILKSGNFELVTKEIFGPFQVVTEYSEDQLELVLEACERMNAHLTAAVVSNDPLFLQDVLGRSVNGTTYAGIRARTTGAPQNHWFGPAGDPRGAGIGTPEAIKLVWSCHREVIYDVGPVPESWALPSAT

SEQ ID NO: 33037 - protein, 174 aa, Zea mays subsp. mays; identical to SEQ ID NO: 19702
  peptide (1)..(174): Ceres Seq. ID no. 12345609
  misc_feature (1)..(174): NCBI GI NO: 18449341 NR Description: putative aldehyde dehydrogenase MIS1 [Zea mays]
  misc_feature (1)..(174): NCBI GI NO: 18449337 NR Description: putative aldehyde dehydrogenase BIS1
  misc_feature (1)..(174): NCBI GI NO: 18449343 NR Description: putative aldehyde dehydrogenase WIS1
  misc_feature (1)..(174): NCBI GI NO: 10178084 NR Description: dehydrogenase [Arabidopsis thaliana]
  misc_feature (1)..(174): NCBI GI NO: 18424599 NR Description: dehydrogenase; protein id: At5g62530
  misc_feature (1)..(174): NCBI GI NO: 15383744 NR Description: delta-1-pyrroline-5- carboxylate dehydrogenaseprecursor
  misc_feature (1)..(174): NCBI GI NO: 34921534 NR Description: Probable aldehyde dehydrogenase

SEQ ID NO: 33038 - protein, 170 aa, Zea mays subsp. mays; identical to SEQ ID NO: 19703
  peptide (1)..(170): Ceres Seq. ID no. 12345610
  misc_feature (1)..(170): NCBI GI NO: 18449341 NR Description: putative aldehyde dehydrogenase MIS1 [Zea mays]
  misc_feature (1)..(170): NCBI GI NO: 18449337 NR Description: putative aldehyde dehydrogenase BIS1
  misc_feature (1)..(170): NCBI GI NO: 18449343 NR Description: putative aldehyde dehydrogenase WIS1
  misc_feature (1)..(170): NCBI GI NO: 10178084 NR Description: dehydrogenase [Arabidopsis thaliana]
  misc_feature (1)..(170): NCBI GI NO: 18424599 NR Description: dehydrogenase; protein id: At5g62530
  misc_feature (1)..(170): NCBI GI NO: 15383744 NR Description: delta-1-pyrroline-5- carboxylate dehydrogenaseprecursor
  misc_feature (1)..(170): NCBI GI NO: 34921534 NR Description: Probable aldehyde dehydrogenase

SEQ ID NO: 33039 - DNA, 844 bp, Zea mays subsp. mays
  misc_feature (1)..(844): Ceres Seq. ID no. 12341621
gcatgctaggtaaggttgagcgtgtcacagatgttgtattcactcttgatgatggtactggcaagatagatgtgaatcgctgggaaaatgaggcttccgatgctaaggagatggctgatgctaataacgagaactatgtcatagtcattggcggtttgaaaggttttcaaggaaagcgccatgtagttgcctatgctgtgcggcgtgtgacaaacttcaatgaaataacctgtcactttctgcactgcattcaggtgcatatggagctcacagggttaaagatctattcttcagctgcaacatatggaggagtagcccatgccccatcacagccaaatccggttgatggaaactacatatccaacttggtcttgagtgtttttcatgacccatctgtcatggaccaggagcatggactgcacatcaaagatgtcatagatcgtctcaaactaccagatgatgtagtcagtgcggccatccaaggtcatgttgatgtgggcaacatttacaacacaattgatgacttccactacaaatctgtccggaatggatgaccacgttgcaagtccagcgttcaggctccgtgtaggtatggagccgtttcaaggaagaagaaatgtaaaccctcttcaggatcgcctatattttgcagataggcttcatggtcaacagcttagcatatcggtttaggtgtgtattgctctcatatgtaatgatacataagatgtgagtagactaggtctacctgcaggacatcagtccgttcctacggaaatttgttatgaacgttttacattctaagacctatataaccgtgaagcacgcaaatcaagaatagaaccgc

SEQ ID NO: 33040 - protein, 183 aa, Zea mays subsp. mays
  peptide (1)..(183): Ceres Seq. ID no. 12341622
  misc_feature (7)..(69): Pfam Name: Pfam Description:  OB-fold nucleic acid binding domain
  misc_feature (3)..(109): NCBI GI NO: 9801268 NR Description: replication protein A2 [Oryza sativa]
  misc_feature (123)..(182): NCBI GI NO: 9801268 NR Description: replication protein A2 [Oryza sativa]
  misc_feature (3)..(109): NCBI GI NO: 13516746 NR Description: replication protein A 30kDa
  misc_feature (123)..(182): NCBI GI NO: 13516746 NR Description: replication protein A 30kDa
  misc_feature (4)..(101): NCBI GI NO: 31790111 NR Description: RPA 32kDa [Pisum sativum]
  misc_feature (105)..(178): NCBI GI NO: 31790111 NR Description: RPA 32kDa [Pisum sativum]
  misc_feature (7)..(180): NCBI GI NO: 25347925 NR Description: probable replication protein A1
  misc_feature (7)..(164): NCBI GI NO: 18400560 NR Description: putative replication protein A1
  misc_feature (2)..(165): NCBI GI NO: 6728969 NR Description: putative replication factor A
  misc_feature (2)..(165): NCBI GI NO: 18396383 NR Description: putative replication factor A
MLGKVERVTDVVFTLDDGTGKIDVNRWENEASDAKEMADANNENYVIVIGGLKGFQGKRHVVAYAVRRVTNFNEITCHFLHCIQVHMELTGLKIYSSAATYGGVAHAPSQPNPVDGNYISNLVLSVFHDPSVMDQEHGLHIKDVIDRLKLPDDVVSAAIQGHVDVGNIYNTIDDFHYKSVRNG

SEQ ID NO: 33041 - protein, 147 aa, Zea mays subsp. mays
  peptide (1)..(147): Ceres Seq. ID no. 12341623
  misc_feature (1)..(73): NCBI GI NO: 9801268 NR Description: replication protein A2 [Oryza sativa]
  misc_feature (87)..(146): NCBI GI NO: 9801268 NR Description: replication protein A2 [Oryza sativa]
  misc_feature (1)..(73): NCBI GI NO: 13516746 NR Description: replication protein A 30kDa
  misc_feature (87)..(146): NCBI GI NO: 13516746 NR Description: replication protein A 30kDa
  misc_feature (1)..(65): NCBI GI NO: 31790111 NR Description: RPA 32kDa [Pisum sativum]
  misc_feature (69)..(142): NCBI GI NO: 31790111 NR Description: RPA 32kDa [Pisum sativum]
  misc_feature (1)..(144): NCBI GI NO: 25347925 NR Description: probable replication protein A1
  misc_feature (1)..(128): NCBI GI NO: 18400560 NR Description: putative replication protein A1
  misc_feature (1)..(129): NCBI GI NO: 6728969 NR Description: putative replication factor A
  misc_feature (1)..(129): NCBI GI NO: 18396383 NR Description: putative replication factor A
MADANNENYVIVIGGLKGFQGKRHVVAYAVRRVTNFNEITCHFLHCIQVHMELTGLKIYSSAATYGGVAHAPSQPNPVDGNYISNLVLSVFHDPSVMDQEHGLHIKDVIDRLKLPDDVVSAAIQGHVDVGNIYNTIDDFHYKSVRNG

SEQ ID NO: 33042 - protein, 97 aa, Zea mays subsp. mays
  peptide (1)..(97): Ceres Seq. ID no. 12341624
  misc_feature (1)..(23): NCBI GI NO: 9801268 NR Description: replication protein A2 [Oryza sativa]
  misc_feature (37)..(96): NCBI GI NO: 9801268 NR Description: replication protein A2 [Oryza sativa]
  misc_feature (1)..(23): NCBI GI NO: 13516746 NR Description: replication protein A 30kDa
  misc_feature (37)..(96): NCBI GI NO: 13516746 NR Description: replication protein A 30kDa
  misc_feature (1)..(15): NCBI GI NO: 31790111 NR Description: RPA 32kDa [Pisum sativum]
  misc_feature (19)..(92): NCBI GI NO: 31790111 NR Description: RPA 32kDa [Pisum sativum]
  misc_feature (1)..(94): NCBI GI NO: 25347925 NR Description: probable replication protein A1
  misc_feature (1)..(78): NCBI GI NO: 18400560 NR Description: putative replication protein A1
  misc_feature (1)..(79): NCBI GI NO: 6728969 NR Description: putative replication factor A
  misc_feature (1)..(79): NCBI GI NO: 18396383 NR Description: putative replication factor A
MELTGLKIYSSAATYGGVAHAPSQPNPVDGNYISNLVLSVFHDPSVMDQEHGLHIKDVIDRLKLPDDVVSAAIQGHVDVGNIYNTIDDFHYKSVRNG

SEQ ID NO: 33043 - DNA, 1161 bp, Zea mays subsp. mays
  misc_feature (1)..(1161): Ceres Seq. ID no. 12404709
acagtcacatactttccgcgcctcttcttctgcgcccctctcctcccaaactgcggatagagcagcgagccatcgacacgatcgcgagcgcaagcacgtacgttgtcggaagctcaagttagaagaagcaccagtgcctgatcgatggcggcccaggctctcctctccggccggcagctgctgggccgccccgtgcagtcggccgtctctaggtcgtcggcgaggaaggcgcccttcgtcgtcagggccagctccagccctccagccaagcaaggtgccgacaggcagctgtggttcgcgtccaagcagtccctctcctacctcgatggcacgctgcccggcgactatggcttcgacccgctgggcctctcggacccggagggcaccgggggcttcatcgagcccaagtggctggcctatggcgaggtgatcaacggccgctacgccatgctgggcgcggtgggcgccatcccccggagatcttcggcaagatgggcatcatccccccggagaccgcgctgccgtggttcaagacgggcgtcatcccgcccgcgggcacctacaactactgggccgactcctacacgctcttcgtcttcaacatggcgctcatgggcttcgccgagcaccgccgcctccaggactggtacaacccgggctccatgggcaagcagtacttcctcggcctcgagaagttcctcgccggctccggcgacccgtcctaccccggcgggcccctcttcaacccgctcggcttcggcaagaccgagaaggagatgaatgagctcaagctcaaggagatcaagaacggcaggctcgccatgctcgccatcctcggttacttcatccaggggctcgtcaccggcgtcggcccgttccagaacctgctcgaccacctcgccgaccccgtcaacaacaacgtgctcaccagcctcaagttccactagaacgtggtgcatcagcatacctgctgctgccgccgccgccgccagttgtttgctgtggaaagctagatgcatgcgtgttgtaaaggaacctgaagcgttgcatcggtcatgattcatgcatggccagcctgctgcctgtaacaacaaactagtattgatcttattgagaccggaaactgtattgcacatggtaaatcaatgtacaattcctccc

SEQ ID NO: 33044 - protein, 211 aa, Zea mays subsp. mays
  peptide (1)..(211): Ceres Seq. ID no. 12404710
  misc_feature (55)..(109): Pfam Name: Pfam Description:  Chlorophyll A-B binding protein
  misc_feature (1)..(109): NCBI GI NO: 82080 NR Description: chlorophyll a/b-binding protein type III precursor
  misc_feature (1)..(109): NCBI GI NO: 115813 NR Description: Chlorophyll A-B binding protein 8
  misc_feature (1)..(109): NCBI GI NO: 15219941 NR Description: light-harvesting chlorophyll a/b binding protein
  misc_feature (1)..(109): NCBI GI NO: 430947 NR Description: PSI type III chlorophyll a/b-binding protein
  misc_feature (1)..(109): NCBI GI NO: 21554335 NR Description: PSI type III chlorophyll a/b-binding protein
  misc_feature (1)..(109): NCBI GI NO: 7443229 NR Description: probable chlorophyll a/b-binding protein type IIIprecursor
  misc_feature (66)..(109): NCBI GI NO: 7271947 NR Description: chlorophyll a/b-binding protein type III
  misc_feature (2)..(109): NCBI GI NO: 40714511 NR Description: light-harvesting chlorophyll-a/b protein ofphotosystem I
  misc_feature (46)..(109): NCBI GI NO: 21593722 NR Description: light-harvesting complex protein
  misc_feature (46)..(109): NCBI GI NO: 15220077 NR Description: light-harvesting chlorophyll a/b binding protein
MAAQALLSGRQLLGRPVQSAVSRSSARKAPFVVRASSSPPAKQGADRQLWFASKQSLSYLDGTLPGDYGFDPLGLSDPEGTGGFIEPKWLAYGEVINGRYAMLGAVGAIPRRSSARWASSPRRPRCRGSRRASSRPRAPTTTGPTPTRSSSSTWRSWASPSTAASRTGTTRAPWASSTSSASRSSSPAPATRPTPAGPSSTRSASARPRRR

SEQ ID NO: 33045 - protein, 151 aa, Zea mays subsp. mays
  peptide (1)..(151): Ceres Seq. ID no. 12404711
  misc_feature (1)..(122): Pfam Name: Pfam Description:  Chlorophyll A-B binding protein
  misc_feature (1)..(151): NCBI GI NO: 82080 NR Description: chlorophyll a/b-binding protein type III precursor
  misc_feature (1)..(151): NCBI GI NO: 115813 NR Description: Chlorophyll A-B binding protein 8
  misc_feature (1)..(151): NCBI GI NO: 15219941 NR Description: light-harvesting chlorophyll a/b binding protein
  misc_feature (1)..(151): NCBI GI NO: 430947 NR Description: PSI type III chlorophyll a/b-binding protein
  misc_feature (1)..(151): NCBI GI NO: 21554335 NR Description: PSI type III chlorophyll a/b-binding protein
  misc_feature (1)..(151): NCBI GI NO: 7443229 NR Description: probable chlorophyll a/b-binding protein type IIIprecursor
  misc_feature (1)..(142): NCBI GI NO: 7271947 NR Description: chlorophyll a/b-binding protein type III
  misc_feature (1)..(147): NCBI GI NO: 40714511 NR Description: light-harvesting chlorophyll-a/b protein ofphotosystem I
  misc_feature (1)..(151): NCBI GI NO: 37780998 NR Description: chlorophyll a/b binding protein [Vitis vinifera]
  misc_feature (1)..(151): NCBI GI NO: 99487 NR Description: chlorophyll a/b-binding protein
MGIIPPETALPWFKTGVIPPAGTYNYWADSYTLFVFNMALMGFAEHRRLQDWYNPGSMGKQYFLGLEKFLAGSGDPSYPGGPLFNPLGFGKTEKEMNELKLKEIKNGRLAMLAILGYFIQGLVTGVGPFQNLLDHLADPVNNNVLTSLKFH

SEQ ID NO: 33046 - protein, 142 aa, Zea mays subsp. mays
  peptide (1)..(142): Ceres Seq. ID no. 12404712
  misc_feature (79)..(142): NCBI GI NO: 5420387 NR Description: proteophosphoglycan [Leishmania major]
QSHTFRASSSAPLSSQTADRAASHRHDRERKHVRCRKLKLEEAPVPDRWRPRLSSPAGSCWAAPCSRPSLGRRRGRRPSSSGPAPALQPSKVPTGSCGSRPSSPSPTSMARCPATMASTRWASRTRRAPGASSSPSGWPMAR

SEQ ID NO: 33047 - DNA, 972 bp, Zea mays subsp. mays
  misc_feature (1)..(972): Ceres Seq. ID no. 12341008
accagcagcactcgcgcaatcccgcagtttgacgagtttgcccccgtcgccctccattctctcccgctccgccgcttcgtctttttatacctcctgctgacgggactgctgacttcgcacccaggccgcggccgcatcctctccccatcggcagtcttcccccaagacgtctaaaccccaatccctaaatccccgacgcagaccacacgacgcgcacctccgttcacgaggcggaagcatgagtcgccacccgatcactaagtgggcacagaggtccgacagggtgttcttgacgatagagctgcccgacgcccaggatgtgaagctgaacttgaagcctgaaggccatttcaacttctcagctaagggctcagatgacttgcgctatgagtttgacattgagctgtttgatgctgtgaatgtggaggagagcaaagcagctattgccccaaggaccatatgctacctgataaagaaagctaagagcgggtggtggccaaggctgctgaagcaggagggcaaaccacctgtgttcttgaaggttgattgggacaaatggcaggacgaggatgatgaagacgctggatttaatgactttggtggtatggacttctcgaaactggacataggaggtgctgatgacgacgatattggggatgatgaagatgatgtggttgaaagtgctaacaaagatgaagaaggaggtaagacagaagagagcaaggaggaggaagcagctcctgcggctgcagaggaagtgaagccatgaagaatcatttgactttgctccgcgccatgggtgtccacggtatctagctaggctagacgttcccttggatttttggtgtaaaatctggaggtcgaaccactcactgcctattgaagtaaaggatacaaaaacagttgtgctgtcttagtttttggctgaaccctgtgaactgctgctacaatatttggtcagagtttatatgc

SEQ ID NO: 33048 - protein, 176 aa, Zea mays subsp. mays
  peptide (1)..(176): Ceres Seq. ID no. 12341009
  misc_feature (1)..(170): NCBI GI NO: 40882701 NR Description: putative ripening regulated protein
  misc_feature (1)..(172): NCBI GI NO: 12231292 NR Description: ripening regulated protein DDTFR8
  misc_feature (1)..(173): NCBI GI NO: 11934654 NR Description: p23 [Brassica napus]
  misc_feature (1)..(132): NCBI GI NO: 38637531 NR Description: putative p23 co-chaperone
  misc_feature (1)..(132): NCBI GI NO: 11229591 NR Description: p23 co-chaperone [Arabidopsis thaliana]
  misc_feature (1)..(132): NCBI GI NO: 30679149 NR Description: glycine-rich protein [Arabidopsis thaliana]
  misc_feature (3)..(132): NCBI GI NO: 7487014 NR Description: hypothetical protein T14P8
  misc_feature (1)..(138): NCBI GI NO: 22330824 NR Description: similar to p23 {Brassica napus}
  misc_feature (1)..(162): NCBI GI NO: 17556837 NR Description: Telomerase-binding protein p23 like (19.4 kD)
  misc_feature (5)..(163): NCBI GI NO: 32398747 NR Description: p23 co-chaperone, probable
MSRHPITKWAQRSDRVFLTIELPDAQDVKLNLKPEGHFNFSAKGSDDLRYEFDIELFDAVNVEESKAAIAPRTICYLIKKAKSGWWPRLLKQEGKPPVFLKVDWDKWQDEDDEDAGFNDFGGMDFSKLDIGGADDDDIGDDEDDVVESANKDEEGGKTEESKEEEAAPAAAEEVKP

SEQ ID NO: 33049 - DNA, 1087 bp, Zea mays subsp. mays
  misc_feature (1)..(1087): Ceres Seq. ID no. 12565899
gcacgagaccattacctagaacatcctaatcgaaaaaccgcctcttctcctcttctcgattcgaaatcgagtacgtccgaatgctctagaaccttccgggcctagggatctcgatggggcccgagcaggaggaggccgtgctggagaccatctgggacctccacgacaaggtcagcgacgcgatccacgccctctcccgcgcccacttcctgcgcgccgttcgccgccgctcctcggcctccgcccccggcctcgtggacgtcaagggcgggggtctgggtctcggcgcgcgcggcggagacgaggtcgtcgccctggcggccctggctgaggaggccaggagcctgcacgccatccgcgccgcgctggaggacctcgaggaccagttcgagtgttttctcgccgtgcagacacagcaacaggccgaacgagatttcgcgatggcgaggctggagcaaagccgcatcatgctcgcgataaggctcaaagagcatcacgggagaaaccacaaggtcatagacgaggcgtctgccttcgtccgcgatgtctaccaggacgtctggccttccctgtcagctaccaaggccgagagacgcgccgacagttcaggtaacccggcgaagggtccgagcttcctcgcgcggatggtgtcctctagccttactgtagctgggagcggtttcagtctcaaaagtctggctttagctctcggcctagtcgcggtgctgcagtcttcaggggtcggtgaccgcaggtacaggaggaccaccagcgagaggagctcgtcgtggctgggatcatcatctccgagaggcggtagaacgggtcgtcttgacgtgtctctagccaggggttgaaaggggggctgcggtttgtggccttgcactgtatgcccctgtggcaagggccaagctcaggcccgctgcggtgttttttttgttgctttctcggtccagcagcaccaggcttcatcgctgaggctgctctctgcccatcatgccgggcgcagccggtgggcatgtttgatttgtgctaaatgtgacacattttatctaaggttagtcttttgaatggaagaattaaactt

SEQ ID NO: 33050 - protein, 247 aa, Zea mays subsp. mays
  peptide (1)..(247): Ceres Seq. ID no. 12565900
  misc_feature (1)..(247): NCBI GI NO: 34904152 NR Description: P0417G05.19
  misc_feature (4)..(210): NCBI GI NO: 15238704 NR Description: putative protein; protein id: At5g53280
  misc_feature (4)..(210): NCBI GI NO: 21592900 NR Description: unknown [Arabidopsis thaliana]
MGPEQEEAVLETIWDLHDKVSDAIHALSRAHFLRAVRRRSSASAPGLVDVKGGGLGLGARGGDEVVALAALAEEARSLHAIRAALEDLEDQFECFLAVQTQQQAERDFAMARLEQSRIMLAIRLKEHHGRNHKVIDEASAFVRDVYQDVWPSLSATKAERRADSSGNPAKGPSFLARMVSSSLTVAGSGFSLKSLALALGLVAVLQSSGVGDRRYRRTTSERSSSWLGSSSPRGGRTGRLDVSLARG

SEQ ID NO: 33051 - protein, 138 aa, Zea mays subsp. mays
  peptide (1)..(138): Ceres Seq. ID no. 12565901
  misc_feature (1)..(138): NCBI GI NO: 34904152 NR Description: P0417G05.19
  misc_feature (1)..(101): NCBI GI NO: 15238704 NR Description: putative protein; protein id: At5g53280
  misc_feature (1)..(101): NCBI GI NO: 21592900 NR Description: unknown [Arabidopsis thaliana]
MARLEQSRIMLAIRLKEHHGRNHKVIDEASAFVRDVYQDVWPSLSATKAERRADSSGNPAKGPSFLARMVSSSLTVAGSGFSLKSLALALGLVAVLQSSGVGDRRYRRTTSERSSSWLGSSSPRGGRTGRLDVSLARG

SEQ ID NO: 33052 - protein, 129 aa, Zea mays subsp. mays
  peptide (1)..(129): Ceres Seq. ID no. 12565902
  misc_feature (1)..(129): NCBI GI NO: 34904152 NR Description: P0417G05.19
  misc_feature (1)..(92): NCBI GI NO: 15238704 NR Description: putative protein; protein id: At5g53280
  misc_feature (1)..(92): NCBI GI NO: 21592900 NR Description: unknown [Arabidopsis thaliana]
MLAIRLKEHHGRNHKVIDEASAFVRDVYQDVWPSLSATKAERRADSSGNPAKGPSFLARMVSSSLTVAGSGFSLKSLALALGLVAVLQSSGVGDRRYRRTTSERSSSWLGSSSPRGGRTGRLDVSLARG

SEQ ID NO: 33053 - DNA, 1771 bp, Zea mays subsp. mays
  misc_feature (1)..(1771): Ceres Seq. ID no. 12359628
gatcttggccgagcgccgcgaggagggctcggagcgggagggtacgggccgtcggatgctcgcagctgccaccgccgcctacggctattttaaccccgcgctcctgccgacgccgcactcgcccccggcctcctcccgcctcccagatctcgctcgctcggcgccagttgcctcgcagtttggatcatctcatacctcggcgaagatgagggagatcctgcacatccagggagggcaatgtggcaaccagattggcgccaagttctgggaggtggtgtgcgatgaacatggcattgaccctaccgggcggtacactggcaattccgaccttcagttggagcgtgttaatgtctactacaatgaagcctcctgcggacgctttgttccccgcgctgttctcatggatcttgagcctgggacaatggacagtgtccggaccggaccctatgggcagatcttccgccctgacaactttgtgtttgggcaatctggtgctggtaacaattgggctaagggccactacaccgagggtgctgagctcattgactctgttctggatgttgtgatgaaggaagctgagaactgtgactgcttgcaaggattccaagtatgccactcccttggtggtggtactggatctggtatgggtacgctgttgatctcaaagatcagggaagagtaccctgaccgcatgatgcttacattctcagttttcccctcaccgaaagtatctgataccgtggttgagccatacaatgccactctttctgtccaccagttggtcgagaatgctgatgagtgcatggttctcgataacgaagccctctatgacatctgcttcaggactcttaagctgaccacccctagctttggtgatctgaaccatttgatctctgcaaccatgagtggagtcacctgctgcctaaggttccctggtcagctgaactccgacctcaggaagctggcagtgaacctgatccccttcccccgtctccacttcttcatggtcggcttcgcgccgctgacgtcccgtggctcccagcagtaccgggccctcacagtccccgagctcacgcagcagatgtgggatgccaagaacatgatgtgtgccgctgaccctcgccatgggcgttacctcaccgcctcggccatgttccgcgggaagatgagcaccaaggaggttgacgagcagatgatcaacgtccagaacaagaactcgtcctacttcgtggagtggatccccaacaacgtcaagtccagcgtgtgcgacatcccgcccaggggcctgtccatggcgtccaccttcatcggcaactcgacctccatccaggagatgttccggagggtgagcgagcagttcactgccatgttcaggaggaaggctttcttgcactggtacacgggcgagggcatggacgagatggagttcaccgaggccgagagcaacatgaacgacctcgtgtcggagtaccagcagtaccaggacgcgactgccgacgaggaggagtacgaggacgaggaggaggtgcaggccgatgacatgtgaggggagggctgttatcgtgtgaagccttgtggtccctagggcaagcggacctcgatgagttcggtgttccctttcgtgttgttgccatctttctactgctagcgtacccaccctcgtggcccattccgtcgctgttgacgtatgtatttttcttgtgctatggaaccttgcttttggtacggtactatcctgctagtatgcttggcgtttgaggttcctggcgtg

SEQ ID NO: 33054 - protein, 514 aa, Zea mays subsp. mays
  peptide (1)..(514): Ceres Seq. ID no. 12359629
  misc_feature (113)..(312): Pfam Name: Pfam Description:  Tubulin/FtsZ family, GTPase domain
  misc_feature (69)..(514): NCBI GI NO: 8928414 NR Description: Tubulin beta-6 chain (Beta-6 tubulin)
  misc_feature (69)..(514): NCBI GI NO: 34909054 NR Description: tubulin beta chain
  misc_feature (69)..(514): NCBI GI NO: 629791 NR Description: tubulin beta chain - rice
  misc_feature (69)..(513): NCBI GI NO: 1076737 NR Description: beta-tubulin R1623 - rice
  misc_feature (69)..(514): NCBI GI NO: 310317 NR Description: beta-tubulin
  misc_feature (69)..(514): NCBI GI NO: 2119278 NR Description: tubulin beta-1 chain - rice
  misc_feature (69)..(514): NCBI GI NO: 8928403 NR Description: Tubulin beta chain (Beta tubulin)
  misc_feature (69)..(510): NCBI GI NO: 8928421 NR Description: Tubulin beta-5 chain (Beta-5 tubulin)
  misc_feature (69)..(513): NCBI GI NO: 8928425 NR Description: Tubulin beta-2 chain (Beta-2 tubulin)
  misc_feature (69)..(514): NCBI GI NO: 267078 NR Description: TUBULIN BETA-5 CHAIN
ILAERREEGSEREGTGRRMLAAATAAYGYFNPALLPTPHSPPASSRLPDLARSAPVASQFGSSHTSAKMREILHIQGGQCGNQIGAKFWEVVCDEHGIDPTGRYTGNSDLQLERVNVYYNEASCGRFVPRAVLMDLEPGTMDSVRTGPYGQIFRPDNFVFGQSGAGNNWAKGHYTEGAELIDSVLDVVMKEAENCDCLQGFQVCHSLGGGTGSGMGTLLISKIREEYPDRMMLTFSVFPSPKVSDTVVEPYNATLSVHQLVENADECMVLDNEALYDICFRTLKLTTPSFGDLNHLISATMSGVTCCLRFPGQLNSDLRKLAVNLIPFPRLHFFMVGFAPLTSRGSQQYRALTVPELTQQMWDAKNMMCAADPRHGRYLTASAMFRGKMSTKEVDEQMINVQNKNSSYFVEWIPNNVKSSVCDIPPRGLSMASTFIGNSTSIQEMFRRVSEQFTAMFRRKAFLHWYTGEGMDEMEFTEAESNMNDLVSEYQQYQDATADEEEYEDEEEVQADDM

SEQ ID NO: 33055 - protein, 496 aa, Zea mays subsp. mays
  peptide (1)..(496): Ceres Seq. ID no. 12359630
  misc_feature (95)..(294): Pfam Name: Pfam Description:  Tubulin/FtsZ family, GTPase domain
  misc_feature (51)..(496): NCBI GI NO: 8928414 NR Description: Tubulin beta-6 chain (Beta-6 tubulin)
  misc_feature (51)..(496): NCBI GI NO: 34909054 NR Description: tubulin beta chain
  misc_feature (51)..(496): NCBI GI NO: 629791 NR Description: tubulin beta chain - rice
  misc_feature (51)..(495): NCBI GI NO: 1076737 NR Description: beta-tubulin R1623 - rice
  misc_feature (51)..(496): NCBI GI NO: 310317 NR Description: beta-tubulin
  misc_feature (51)..(496): NCBI GI NO: 2119278 NR Description: tubulin beta-1 chain - rice
  misc_feature (51)..(496): NCBI GI NO: 8928403 NR Description: Tubulin beta chain (Beta tubulin)
  misc_feature (51)..(492): NCBI GI NO: 8928421 NR Description: Tubulin beta-5 chain (Beta-5 tubulin)
  misc_feature (51)..(495): NCBI GI NO: 8928425 NR Description: Tubulin beta-2 chain (Beta-2 tubulin)
  misc_feature (51)..(496): NCBI GI NO: 267078 NR Description: TUBULIN BETA-5 CHAIN
MLAAATAAYGYFNPALLPTPHSPPASSRLPDLARSAPVASQFGSSHTSAKMREILHIQGGQCGNQIGAKFWEVVCDEHGIDPTGRYTGNSDLQLERVNVYYNEASCGRFVPRAVLMDLEPGTMDSVRTGPYGQIFRPDNFVFGQSGAGNNWAKGHYTEGAELIDSVLDVVMKEAENCDCLQGFQVCHSLGGGTGSGMGTLLISKIREEYPDRMMLTFSVFPSPKVSDTVVEPYNATLSVHQLVENADECMVLDNEALYDICFRTLKLTTPSFGDLNHLISATMSGVTCCLRFPGQLNSDLRKLAVNLIPFPRLHFFMVGFAPLTSRGSQQYRALTVPELTQQMWDAKNMMCAADPRHGRYLTASAMFRGKMSTKEVDEQMINVQNKNSSYFVEWIPNNVKSSVCDIPPRGLSMASTFIGNSTSIQEMFRRVSEQFTAMFRRKAFLHWYTGEGMDEMEFTEAESNMNDLVSEYQQYQDATADEEEYEDEEEVQADDM

SEQ ID NO: 33056 - protein, 446 aa, Zea mays subsp. mays
  peptide (1)..(446): Ceres Seq. ID no. 12359631
  misc_feature (45)..(244): Pfam Name: Pfam Description:  Tubulin/FtsZ family, GTPase domain
  misc_feature (1)..(446): NCBI GI NO: 8928414 NR Description: Tubulin beta-6 chain (Beta-6 tubulin)
  misc_feature (1)..(446): NCBI GI NO: 34909054 NR Description: tubulin beta chain
  misc_feature (1)..(446): NCBI GI NO: 629791 NR Description: tubulin beta chain - rice
  misc_feature (1)..(445): NCBI GI NO: 1076737 NR Description: beta-tubulin R1623 - rice
  misc_feature (1)..(446): NCBI GI NO: 310317 NR Description: beta-tubulin
  misc_feature (1)..(446): NCBI GI NO: 2119278 NR Description: tubulin beta-1 chain - rice
  misc_feature (1)..(446): NCBI GI NO: 8928403 NR Description: Tubulin beta chain (Beta tubulin)
  misc_feature (1)..(442): NCBI GI NO: 8928421 NR Description: Tubulin beta-5 chain (Beta-5 tubulin)
  misc_feature (1)..(445): NCBI GI NO: 8928425 NR Description: Tubulin beta-2 chain (Beta-2 tubulin)
  misc_feature (1)..(446): NCBI GI NO: 267078 NR Description: TUBULIN BETA-5 CHAIN
MREILHIQGGQCGNQIGAKFWEVVCDEHGIDPTGRYTGNSDLQLERVNVYYNEASCGRFVPRAVLMDLEPGTMDSVRTGPYGQIFRPDNFVFGQSGAGNNWAKGHYTEGAELIDSVLDVVMKEAENCDCLQGFQVCHSLGGGTGSGMGTLLISKIREEYPDRMMLTFSVFPSPKVSDTVVEPYNATLSVHQLVENADECMVLDNEALYDICFRTLKLTTPSFGDLNHLISATMSGVTCCLRFPGQLNSDLRKLAVNLIPFPRLHFFMVGFAPLTSRGSQQYRALTVPELTQQMWDAKNMMCAADPRHGRYLTASAMFRGKMSTKEVDEQMINVQNKNSSYFVEWIPNNVKSSVCDIPPRGLSMASTFIGNSTSIQEMFRRVSEQFTAMFRRKAFLHWYTGEGMDEMEFTEAESNMNDLVSEYQQYQDATADEEEYEDEEEVQADDM

SEQ ID NO: 33057 - DNA, 1857 bp, Zea mays subsp. mays
  misc_feature (1)..(1857): Ceres Seq. ID no. 12373415
gcaccaacagccaatccacacctcgcttgcgttgtcctcgccctgatccggttcccccgttcctcgcctcctctgacccaaattgagccaagcgaagccgtgcccgtgatccggtccatgcgcggagcgtggtagccggattctatcgccgtcgcctccccttcgccgccattttccagtcgccgggatcagccgagttggatctcgaggcataaagcgttgcgggcgcccggcgaggatacgatgcctgcggtgctcgccgcattcgctaccctccgagccgccgctgccatcgcctccggggactcctccttcccctgttcccatcgcctcaagcatcgttttagtagtagtaattttagtagtagtaattgtcattgacctttgcgttccctccgtcgcgcacgctcctcggctcggtcctcaccttcgcatctcggttttggtctggttgtgctcgatccgaagcttactttggctttgcagcttctctccttgtcgaagtttggtgtctggattcgacctgcagatcggaaggaaacaagaaacttctctttgtaatttgggatcaagcctgtggatggacgaaccctcggtggacttcagtgctgaaggtgttagcagcaactcaggtctctgccaaagcacctgtttaaatcctggttgcaagcatggctgtgcttgctgggaagatgattatgtcaaggccgtaatatctcatgggcaagatgatttggtggtcgatgaaattgaattggctcttactgaagtgatgcatgcatatgatgatgacaaatggtcaagtctgtatgaagattttgacgacggtgtcggcgaagaatcaattcttcctctggaatctgattcaactggtgattttgtggacattgactctgcatcacctacctttcctagtgacgatgcaatggaatcatcaattaccaattcatttgctcggaattgttcaattaatggcactccaagtttagtttctgccatgaaaggaacacgtgtgaagaagggaatcacgacaaagttgagcgtttcttgggcccctgatgtatacgaccctcctattacttctgactcgcacacggtgaaagggcaccatacgagttcaactaagagtaactacaaatacaagacctccaagagcagcaatatcactagaaggaaaaaggacaagaagcattctaggcacagtagtagcaatgggggtggcagcaaaagagacaagaagcattcttaccgcagtagtgccagcagcagcagcagagctattaccagtggttctctatattgtgacgcgtacagtggtggtggcatcagcagcagaactgttcctgaatctgccaagatatctccattggtggtagctgaaaatgtcacaccgcaagagatggttcctatactgaagacactggaaccaatcaaatgtactaccagctgcggcaaagagaagccatttgccttgctgtcgcgccagttttcccctgcaaggtacaaggggatgttcaccttttggaaccaaaaccaactgacttcttgacaatttgctatgcggaagctcacctgaaagttcccttgccaagggctgttcggatcccctccaaactttagagcttcaaaaaatttagagcattttagctcacttttgagctctaatctaaggttgaccaaagtttagatctaactgagctttacctctaaagtttagagaaggaaatctaaacatgccctaatttgattttatcaaagattgttgctattgttctcttcgttaccatgtttgtttcgcctgtctgaaacttcagagatcatgttttggaaaattgcttggcaaagtgcttgtgttgt

SEQ ID NO: 33058 - protein, 322 aa, Zea mays subsp. mays
  peptide (1)..(322): Ceres Seq. ID no. 12373416
  misc_feature (78)..(224): NCBI GI NO: 30687157 NR Description: expressed protein [Arabidopsis thaliana]
  misc_feature (113)..(232): NCBI GI NO: 15231857 NR Description: putative protein; protein id: At3g53670
MDEPSVDFSAEGVSSNSGLCQSTCLNPGCKHGCACWEDDYVKAVISHGQDDLVVDEIELALTEVMHAYDDDKWSSLYEDFDDGVGEESILPLESDSTGDFVDIDSASPTFPSDDAMESSITNSFARNCSINGTPSLVSAMKGTRVKKGITTKLSVSWAPDVYDPPITSDSHTVKGHHTSSTKSNYKYKTSKSSNITRRKKDKKHSRHSSSNGGGSKRDKKHSYRSSASSSSRAITSGSLYCDAYSGGGISSRTVPESAKISPLVVAENVTPQEMVPILKTLEPIKCTTSCGKEKPFALLSRQFSPARYKGMFTFWNQNQLTS

SEQ ID NO: 33059 - protein, 258 aa, Zea mays subsp. mays
  peptide (1)..(258): Ceres Seq. ID no. 12373417
  misc_feature (14)..(160): NCBI GI NO: 30687157 NR Description: expressed protein [Arabidopsis thaliana]
  misc_feature (49)..(168): NCBI GI NO: 15231857 NR Description: putative protein; protein id: At3g53670
MHAYDDDKWSSLYEDFDDGVGEESILPLESDSTGDFVDIDSASPTFPSDDAMESSITNSFARNCSINGTPSLVSAMKGTRVKKGITTKLSVSWAPDVYDPPITSDSHTVKGHHTSSTKSNYKYKTSKSSNITRRKKDKKHSRHSSSNGGGSKRDKKHSYRSSASSSSRAITSGSLYCDAYSGGGISSRTVPESAKISPLVVAENVTPQEMVPILKTLEPIKCTTSCGKEKPFALLSRQFSPARYKGMFTFWNQNQLTS

SEQ ID NO: 33060 - protein, 207 aa, Zea mays subsp. mays
  peptide (1)..(207): Ceres Seq. ID no. 12373418
  misc_feature (1)..(109): NCBI GI NO: 30687157 NR Description: expressed protein [Arabidopsis thaliana]
  misc_feature (1)..(117): NCBI GI NO: 15231857 NR Description: putative protein; protein id: At3g53670
MESSITNSFARNCSINGTPSLVSAMKGTRVKKGITTKLSVSWAPDVYDPPITSDSHTVKGHHTSSTKSNYKYKTSKSSNITRRKKDKKHSRHSSSNGGGSKRDKKHSYRSSASSSSRAITSGSLYCDAYSGGGISSRTVPESAKISPLVVAENVTPQEMVPILKTLEPIKCTTSCGKEKPFALLSRQFSPARYKGMFTFWNQNQLTS

SEQ ID NO: 33061 - DNA, 936 bp, Zea mays subsp. mays
  misc_feature (1)..(936): Ceres Seq. ID no. 12361858
gaagcccaagacgctaactctctccctctcgtcctcctccctcacctccatgtcctcctcctcgctgcccgcccccgtcaccgatgtctgggaggtcgtcacccccactgccccacctgttgaccacgtggacggagggcttgatgactgcgtcatcttcccgccgcggctgcatgaggggctgggcctggacggcgagcccgaggaggtcccgccgatgccagcagtggcgaaggaggagaacgaggaggatggtgaatacgagggggaggacgatgagtggctgtggggatgggagaggtgcagcttggcggcgaggcgcgcttgggcggccggtgtcgggatcgttcaggagcgggtgctcgtgcatggcgcgtgtgggtgcccggcggtgaggcccgccgtgtggtcggttgcggcggcggctgctgtggtggggacacttctgtacgcccgtcggcgggataggagggaacgggacctgctcgtgcttctctccaaagagaaggataagaggatagcacaactcctgcatcaaattgctttaatgagtgacatcagaagcggcaatgaagcagtgaaggttatcaggaagtcctaatcattttcactgttgaagggttcagttgctatgttgtagcaaactgattaggtagttagggaatcagactagtcggtttgcaggttcaatacttgtagctaaattgtagtttagctgcatgatcttcacggttctgatgtttacgtataactagatgctgaaacctgcaaggttgcaacacaatctcaagcaatcaatagtcaccaccacgtcgcggtttcttctaaaaatatgtgtatagctgaatgatttggttaattcgtagatgtgtagaattgttgttcatgtcgacaaccctggacaatgctctgtatatgtatcttccatttattgct

SEQ ID NO: 33062 - protein, 199 aa, Zea mays subsp. mays
  peptide (1)..(199): Ceres Seq. ID no. 12361859
  misc_feature (1)..(171): NCBI GI NO: 29027780 NR Description: OJ1710_H11.31
KPKTLTLSLSSSSLTSMSSSSLPAPVTDVWEVVTPTAPPVDHVDGGLDDCVIFPPRLHEGLGLDGEPEEVPPMPAVAKEENEEDGEYEGEDDEWLWGWERCSLAARRAWAAGVGIVQERVLVHGACGCPAVRPAVWSVAAAAAVVGTLLYARRRDRRERDLLVLLSKEKDKRIAQLLHQIALMSDIRSGNEAVKVIRKS

SEQ ID NO: 33063 - protein, 183 aa, Zea mays subsp. mays
  peptide (1)..(183): Ceres Seq. ID no. 12361860
  misc_feature (1)..(155): NCBI GI NO: 29027780 NR Description: OJ1710_H11.31
MSSSSLPAPVTDVWEVVTPTAPPVDHVDGGLDDCVIFPPRLHEGLGLDGEPEEVPPMPAVAKEENEEDGEYEGEDDEWLWGWERCSLAARRAWAAGVGIVQERVLVHGACGCPAVRPAVWSVAAAAAVVGTLLYARRRDRRERDLLVLLSKEKDKRIAQLLHQIALMSDIRSGNEAVKVIRKS

SEQ ID NO: 33064 - protein, 127 aa, Zea mays subsp. mays
  peptide (1)..(127): Ceres Seq. ID no. 12361861
  misc_feature (1)..(99): NCBI GI NO: 29027780 NR Description: OJ1710_H11.31
MPAVAKEENEEDGEYEGEDDEWLWGWERCSLAARRAWAAGVGIVQERVLVHGACGCPAVRPAVWSVAAAAAVVGTLLYARRRDRRERDLLVLLSKEKDKRIAQLLHQIALMSDIRSGNEAVKVIRKS

SEQ ID NO: 33065 - DNA, 1954 bp, Zea mays subsp. mays
  misc_feature (1)..(1954): Ceres Seq. ID no. 12366827
ctcttccgagtctgatccctccttccttccgtcagcgcacatctctagggttttagcgccccatttccgcatcgccattcccgatcggatcgcccccttcccacccgccgccgaccagatcccggcgcgagtgctacccaaccctccggcgccgccacccttagtctcagagggtcggtctccaccgaaagcttcgcacaaatcccctccgtttgtcggtgccatttgttgcaaagattgtgttttcctcctcatccgtgcctcgcgttctatttctgccgtccccgaaaatgccaccgctttgttgagatctctcgtttctcgatctgatctcgcctcggtatggcgtgagagttcctaggggagggcaaaatcctcggagttgagattcttgcgtccatttgctagtctcaataccgagcatccgatctcgaacagtgagacaaagtagcgacctttgtgccgttccttgtaactgagcttgcccccgcctgcgtatcggtgggtgacggcgagctctacggcgctgcccattcctatgaatggacgggagggagtccacggtggcgtcggggcccaacttctcgtcgttctacacgcagcaccggggcatcggggcgccgggtgtccccggccactcggcggtgctccatgacccgccgcccgctgggtaccggcagcatcttgatgctgtctctgctgggtacgcattccagaccccgcaggttgggggttcccacattggacaggggtaccaccatgtcgaggcctcaccccatgtggcgcaatacagctccggtggcggcaccagctccggcggtgatatggacattggcatgggttcggctgtgtgcaccaatgttaagggggagctggggagcgggcctgcccaagatgagcaggtgaagaagaagcggggtaggccaaggaagtataagcctgatggggcggtgactctcgggttatcaccctcttcatcattaacacctcactcggccagcttggggatgggaaccatggttagtgctccaggttctggatttgggtcggggggatcaggggcttcaggcttgggtgcgccatcagagaagcgtggcagggggcggccacctggctctggaaagatgcaacagttggcttcgcttggaaagtggtttcttggctctgttggaactggttttactcctcatgtgattattattcagccaggagaggacgttgctgccagaataatggccttctcacaacaagggcccaaggggcagtgtgcatcatttcagcaactggagctgtttctgcagcaacccttcaccaggattcagaatctggcagtgtggttacatatgagggtcggtttgagatcctgtgcctttctgggtcatacttggtagtagatgaaggtggcggcgcacggacccgaagtggagggctttgcatagctttgtgtggtcctgacaacagggttattggtgggagtgtaggtggagtcctgatggcagctggagcggttcaggtgatagtggggagcttcatgtacggcggaggttcgaagaagaacaaggtgaaagccgagttggatgcggggcctgaggaggcgaatgccggcgaccaagaggtggcacttgcggagcacagcagcatggcccctcatcctgccatgagtggtggtggcgggtgggcatctggcatgatgaggcagatggagtcgagaactcccaacatcgatatcaactccatccgcgagtagtttgcctgtttggttgggtggatgaggaaggctcctcctccttggatgcacacagcacagcggcatgcatatgtttggttgtaggcgttgctatgttttaggactccagagtatattgtgatgtgatgttgtacttggatgttgttgtataagatcatgggaacgcttggtcgtgttattatgttaataaaaatatataatggatgg

SEQ ID NO: 33066 - protein, 282 aa, Zea mays subsp. mays
  peptide (1)..(282): Ceres Seq. ID no. 12366828
  misc_feature (117)..(242): NCBI GI NO: 15237481 NR Description: putative protein; protein id: At5g46640.1
  misc_feature (143)..(242): NCBI GI NO: 15225902 NR Description: putative AT-hook DNA-binding protein
  misc_feature (112)..(257): NCBI GI NO: 37537056 NR Description: putative AT-Hook DNA-binding protein
  misc_feature (71)..(242): NCBI GI NO: 18414996 NR Description: putative protein; protein id: At4g17950
  misc_feature (71)..(242): NCBI GI NO: 25456045 NR Description: probable DNA-binding protein AT-hook 2
  misc_feature (153)..(257): NCBI GI NO: 38346715 NR Description: OSJNBa0086O06.13
  misc_feature (178)..(242): NCBI GI NO: 7488825 NR Description: probable DNA-binding protein - garden pea
  misc_feature (121)..(242): NCBI GI NO: 22328578 NR Description: putative DNA-binding protein; protein id:At4g12080
  misc_feature (143)..(242): NCBI GI NO: 30696854 NR Description: DNA-binding protein -related
  misc_feature (160)..(242): NCBI GI NO: 2213534 NR Description: DNA-binding PD1-like protein [Pisum sativum]
MDGRESTVASGPNFSSFYTQHRGIGAPGVPGHSAVLHDPPPAGYRQHLDAVSAGYAFQTPQVGGSHIGQGYHHVEASPHVAQYSSGGGTSSGGDMDIGMGSAVCTNVKGELGSGPAQDEQVKKKRGRPRKYKPDGAVTLGLSPSSSLTPHSASLGMGTMVSAPGSGFGSGGSGASGLGAPSEKRGRGRPPGSGKMQQLASLGKWFLGSVGTGFTPHVIIIQPGEDVAARIMAFSQQGPKGQCASFQQLELFLQQPFTRIQNLAVWLHMRVGLRSCAFLGHTW

SEQ ID NO: 33067 - protein, 188 aa, Zea mays subsp. mays
  peptide (1)..(188): Ceres Seq. ID no. 12366829
  misc_feature (23)..(148): NCBI GI NO: 15237481 NR Description: putative protein; protein id: At5g46640.1
  misc_feature (49)..(148): NCBI GI NO: 15225902 NR Description: putative AT-hook DNA-binding protein
  misc_feature (18)..(163): NCBI GI NO: 37537056 NR Description: putative AT-Hook DNA-binding protein
  misc_feature (1)..(148): NCBI GI NO: 18414996 NR Description: putative protein; protein id: At4g17950
  misc_feature (1)..(148): NCBI GI NO: 25456045 NR Description: probable DNA-binding protein AT-hook 2
  misc_feature (59)..(163): NCBI GI NO: 38346715 NR Description: OSJNBa0086O06.13
  misc_feature (84)..(148): NCBI GI NO: 7488825 NR Description: probable DNA-binding protein - garden pea
  misc_feature (27)..(148): NCBI GI NO: 22328578 NR Description: putative DNA-binding protein; protein id:At4g12080
  misc_feature (49)..(148): NCBI GI NO: 30696854 NR Description: DNA-binding protein -related
  misc_feature (66)..(148): NCBI GI NO: 2213534 NR Description: DNA-binding PD1-like protein [Pisum sativum]
MDIGMGSAVCTNVKGELGSGPAQDEQVKKKRGRPRKYKPDGAVTLGLSPSSSLTPHSASLGMGTMVSAPGSGFGSGGSGASGLGAPSEKRGRGRPPGSGKMQQLASLGKWFLGSVGTGFTPHVIIIQPGEDVAARIMAFSQQGPKGQCASFQQLELFLQQPFTRIQNLAVWLHMRVGLRSCAFLGHTW

SEQ ID NO: 33068 - protein, 184 aa, Zea mays subsp. mays
  peptide (1)..(184): Ceres Seq. ID no. 12366830
  misc_feature (19)..(144): NCBI GI NO: 15237481 NR Description: putative protein; protein id: At5g46640.1
  misc_feature (45)..(144): NCBI GI NO: 15225902 NR Description: putative AT-hook DNA-binding protein
  misc_feature (14)..(159): NCBI GI NO: 37537056 NR Description: putative AT-Hook DNA-binding protein
  misc_feature (1)..(144): NCBI GI NO: 18414996 NR Description: putative protein; protein id: At4g17950
  misc_feature (1)..(144): NCBI GI NO: 25456045 NR Description: probable DNA-binding protein AT-hook 2
  misc_feature (55)..(159): NCBI GI NO: 38346715 NR Description: OSJNBa0086O06.13
  misc_feature (80)..(144): NCBI GI NO: 7488825 NR Description: probable DNA-binding protein - garden pea
  misc_feature (23)..(144): NCBI GI NO: 22328578 NR Description: putative DNA-binding protein; protein id:At4g12080
  misc_feature (45)..(144): NCBI GI NO: 30696854 NR Description: DNA-binding protein -related
  misc_feature (62)..(144): NCBI GI NO: 2213534 NR Description: DNA-binding PD1-like protein [Pisum sativum]
MGSAVCTNVKGELGSGPAQDEQVKKKRGRPRKYKPDGAVTLGLSPSSSLTPHSASLGMGTMVSAPGSGFGSGGSGASGLGAPSEKRGRGRPPGSGKMQQLASLGKWFLGSVGTGFTPHVIIIQPGEDVAARIMAFSQQGPKGQCASFQQLELFLQQPFTRIQNLAVWLHMRVGLRSCAFLGHTW

SEQ ID NO: 33069 - DNA, 1097 bp, Zea mays subsp. mays
  misc_feature (1)..(1097): Ceres Seq. ID no. 12353369
ctatcagcccaaaaccgaacccacacctctgcccttcccatggcggccacgctattctccacctccctcttgccccagttcctctccctctccgctaagcccgccgccgccgccgccgccccgtccgccgccgccttcccatcggggatgccgcagctccacgcgctgtccgccgcggcggtgggctttaggccgctcgagcccgtgcgagcagccgcgaccgcggccgtgacggaggagctcgaggcggaggggcgttcgggcggggacgagttttcagatgatctcagggtcttcgtcggtaaccttccgttcagcgtcgacagcgcccagctcgcgggacttttcgagcaggccggctccgtcgagatggtcgaggttatctatgacaaattgacgggaagaagccgtggattcgggtttgtgaccatgtcttcggtcgaagaagttgaggtggctgttgaccaatttaatggctatgtgcttgatggaagaagtttgagggtgaactctgggccgccaccacccagagatcggtcatcaccgtcaccgcaaagacccaggggtgatgccaacagggtctacgtgggtaacctttcctggggagttgacaattcagctctcgcaaacctgttcagtgagcaaggtgaggtactggaagcaaggatcatctatgacagggagagtggaaggtcaagggggtttggttttgtcacgtacggttctgccgaagaggttgagaatgcaatatctaatctcgatggcgctgacttggacggcagacagatccgtgttacggtagcagagtcgaagccacctaggcagcaatactgaaattcctcttgagatttttgtaggtgtaccggtagcccaaactctggattatagtgacgccagtcctggatttggtctcgagattcattgaagttaaaaagccctcatgtatatggctcactatttatatacatgtaatattggattcccgtgttcagtgtccttttgtatcaatttggctgcatagtgtcttgtggcacttcaaaggacatagattgttgacgggcaaccaaacctcaagaaagtatcttgtattgtttctt

SEQ ID NO: 33070 - protein, 277 aa, Zea mays subsp. mays
  peptide (1)..(277): Ceres Seq. ID no. 12353370
  misc_feature (98)..(169): Pfam Name: a.k.a. RRM, RBD, or RNP domain Pfam Description: RNA recognition motif.
  misc_feature (14)..(277): NCBI GI NO: 18921322 NR Description: putative ribonucleoprotein [Oryza sativa]
  misc_feature (14)..(275): NCBI GI NO: 34913270 NR Description: putative ribonucleoprotein
  misc_feature (10)..(197): NCBI GI NO: 15228102 NR Description: chloroplast RNA-binding protein cp29, putative
  misc_feature (189)..(277): NCBI GI NO: 15228102 NR Description: chloroplast RNA-binding protein cp29, putative
  misc_feature (10)..(197): NCBI GI NO: 21617920 NR Description: putative RNA-binding protein
  misc_feature (189)..(277): NCBI GI NO: 21617920 NR Description: putative RNA-binding protein
  misc_feature (15)..(277): NCBI GI NO: 12230584 NR Description: 29 kDa ribonucleoprotein A, chloroplast precursor
  misc_feature (14)..(188): NCBI GI NO: 15231817 NR Description: 29 kDa ribonucleoprotein, chloroplast precursor
  misc_feature (189)..(277): NCBI GI NO: 15231817 NR Description: 29 kDa ribonucleoprotein, chloroplast precursor
  misc_feature (14)..(188): NCBI GI NO: 30693824 NR Description: 29 kDa ribonucleoprotein, chloroplast
LSAQNRTHTSALPMAATLFSTSLLPQFLSLSAKPAAAAAAPSAAAFPSGMPQLHALSAAAVGFRPLEPVRAAATAAVTEELEAEGRSGGDEFSDDLRVFVGNLPFSVDSAQLAGLFEQAGSVEMVEVIYDKLTGRSRGFGFVTMSSVEEVEVAVDQFNGYVLDGRSLRVNSGPPPPRDRSSPSPQRPRGDANRVYVGNLSWGVDNSALANLFSEQGEVLEARIIYDRESGRSRGFGFVTYGSAEEVENAISNLDGADLDGRQIRVTVAESKPPRQQY

SEQ ID NO: 33071 - protein, 264 aa, Zea mays subsp. mays
  peptide (1)..(264): Ceres Seq. ID no. 12353371
  misc_feature (85)..(156): Pfam Name: a.k.a. RRM, RBD, or RNP domain Pfam Description: RNA recognition motif.
  misc_feature (1)..(264): NCBI GI NO: 18921322 NR Description: putative ribonucleoprotein [Oryza sativa]
  misc_feature (1)..(262): NCBI GI NO: 34913270 NR Description: putative ribonucleoprotein
  misc_feature (1)..(184): NCBI GI NO: 15228102 NR Description: chloroplast RNA-binding protein cp29, putative
  misc_feature (176)..(264): NCBI GI NO: 15228102 NR Description: chloroplast RNA-binding protein cp29, putative
  misc_feature (1)..(184): NCBI GI NO: 21617920 NR Description: putative RNA-binding protein
  misc_feature (176)..(264): NCBI GI NO: 21617920 NR Description: putative RNA-binding protein
  misc_feature (2)..(264): NCBI GI NO: 12230584 NR Description: 29 kDa ribonucleoprotein A, chloroplast precursor
  misc_feature (1)..(175): NCBI GI NO: 15231817 NR Description: 29 kDa ribonucleoprotein, chloroplast precursor
  misc_feature (176)..(264): NCBI GI NO: 15231817 NR Description: 29 kDa ribonucleoprotein, chloroplast precursor
  misc_feature (1)..(175): NCBI GI NO: 30693824 NR Description: 29 kDa ribonucleoprotein, chloroplast
MAATLFSTSLLPQFLSLSAKPAAAAAAPSAAAFPSGMPQLHALSAAAVGFRPLEPVRAAATAAVTEELEAEGRSGGDEFSDDLRVFVGNLPFSVDSAQLAGLFEQAGSVEMVEVIYDKLTGRSRGFGFVTMSSVEEVEVAVDQFNGYVLDGRSLRVNSGPPPPRDRSSPSPQRPRGDANRVYVGNLSWGVDNSALANLFSEQGEVLEARIIYDRESGRSRGFGFVTYGSAEEVENAISNLDGADLDGRQIRVTVAESKPPRQQY

SEQ ID NO: 33072 - protein, 228 aa, Zea mays subsp. mays
  peptide (1)..(228): Ceres Seq. ID no. 12353372
  misc_feature (49)..(120): Pfam Name: a.k.a. RRM, RBD, or RNP domain Pfam Description: RNA recognition motif.
  misc_feature (1)..(228): NCBI GI NO: 18921322 NR Description: putative ribonucleoprotein [Oryza sativa]
  misc_feature (1)..(226): NCBI GI NO: 34913270 NR Description: putative ribonucleoprotein
  misc_feature (1)..(148): NCBI GI NO: 15228102 NR Description: chloroplast RNA-binding protein cp29, putative
  misc_feature (140)..(228): NCBI GI NO: 15228102 NR Description: chloroplast RNA-binding protein cp29, putative
  misc_feature (1)..(148): NCBI GI NO: 21617920 NR Description: putative RNA-binding protein
  misc_feature (140)..(228): NCBI GI NO: 21617920 NR Description: putative RNA-binding protein
  misc_feature (1)..(228): NCBI GI NO: 12230584 NR Description: 29 kDa ribonucleoprotein A, chloroplast precursor
  misc_feature (1)..(139): NCBI GI NO: 15231817 NR Description: 29 kDa ribonucleoprotein, chloroplast precursor
  misc_feature (140)..(228): NCBI GI NO: 15231817 NR Description: 29 kDa ribonucleoprotein, chloroplast precursor
  misc_feature (1)..(139): NCBI GI NO: 30693824 NR Description: 29 kDa ribonucleoprotein, chloroplast
MPQLHALSAAAVGFRPLEPVRAAATAAVTEELEAEGRSGGDEFSDDLRVFVGNLPFSVDSAQLAGLFEQAGSVEMVEVIYDKLTGRSRGFGFVTMSSVEEVEVAVDQFNGYVLDGRSLRVNSGPPPPRDRSSPSPQRPRGDANRVYVGNLSWGVDNSALANLFSEQGEVLEARIIYDRESGRSRGFGFVTYGSAEEVENAISNLDGADLDGRQIRVTVAESKPPRQQY

SEQ ID NO: 33073 - DNA, 685 bp, Zea mays subsp. mays
  misc_feature (1)..(685): Ceres Seq. ID no. 12403937
aaatatccctccattctcctaccaaaaatcgcagcgccgcccgcaccaatctcgaagtgttcgaaagtttccagacccccaaaaggcgaagcggcgatgagttccaccggaggcggcggccgcgggaaggcgaagccagcgaccaagtcggtgtcgcggtcctccaaggctgggcttcagttccccgtcggtcgcatcgcgcggtacctcaaggccgggaagtatgcggagcgcgtcggcgccggggcccccgtgtacctctccgccgttctcggagtatctcgccgccgaggtgctggagctggccgggaacgctgctcgggacaacaagaagaaccgtatcgtgccgcgccacatccagctggcggtgcggaacgacgaggagctgagcaagctgctgggcactgtgacgatcgcggccggcggcgtgatgccgaacatccatcagaccctgctgcccaagaaagctggtcagaagggggacatcggctctgcctcccaggagttctaagcgtttcggcggaatgaggagagggaccgccccctgtttctgtctcgtccgcgtggttgtgtttcagctctgcggtttttgggggagtgctgtcgatgagttgggattgatatgggttgtggggatgtaaacaaacgcagcgcgttgtttcatgaatgaatgatggatagaagg

SEQ ID NO: 33074 - protein, 175 aa, Zea mays subsp. mays
  peptide (1)..(175): Ceres Seq. ID no. 12403938
  misc_feature (35)..(91): Pfam Name: Pfam Description:  Core histone H2A/H2B/H3/H4
  misc_feature (34)..(91): NCBI GI NO: 685035 NR Description: histone H2A homolog
  misc_feature (33)..(91): NCBI GI NO: 462229 NR Description: Histone H2A.1
  misc_feature (30)..(91): NCBI GI NO: 27529852 NR Description: H2A histone [Nicotiana tabacum]
  misc_feature (34)..(91): NCBI GI NO: 121964 NR Description: Histone H2A.1
  misc_feature (30)..(91): NCBI GI NO: 122003 NR Description: HISTONE H2A
  misc_feature (31)..(91): NCBI GI NO: 122007 NR Description: Histone H2A
  misc_feature (33)..(91): NCBI GI NO: 462230 NR Description: Histone H2A.2
  misc_feature (37)..(91): NCBI GI NO: 7649159 NR Description: histone H2A [Euphorbia esula]
  misc_feature (33)..(91): NCBI GI NO: 15238549 NR Description: histone H2A - like protein; protein id:At5g59870
  misc_feature (34)..(91): NCBI GI NO: 121973 NR Description: Histone H2A.2
KYPSILLPKIAAPPAPISKCSKVSRPPKGEAAMSSTGGGGRGKAKPATKSVSRSSKAGLQFPVGRIARYLKAGKYAERVGAGAPVYLSAVLGVSRRRGAGAGRERCSGQQEEPYRAAPHPAGGAERRGAEQAAGHCDDRGRRRDAEHPSDPAAQESWSEGGHRLCLPGVLSVSAE

SEQ ID NO: 33075 - protein, 143 aa, Zea mays subsp. mays
  peptide (1)..(143): Ceres Seq. ID no. 12403939
  misc_feature (3)..(59): Pfam Name: Pfam Description:  Core histone H2A/H2B/H3/H4
  misc_feature (2)..(59): NCBI GI NO: 685035 NR Description: histone H2A homolog
  misc_feature (1)..(59): NCBI GI NO: 462229 NR Description: Histone H2A.1
  misc_feature (1)..(59): NCBI GI NO: 27529852 NR Description: H2A histone [Nicotiana tabacum]
  misc_feature (2)..(59): NCBI GI NO: 121964 NR Description: Histone H2A.1
  misc_feature (1)..(59): NCBI GI NO: 122003 NR Description: HISTONE H2A
  misc_feature (1)..(59): NCBI GI NO: 122007 NR Description: Histone H2A
  misc_feature (1)..(59): NCBI GI NO: 462230 NR Description: Histone H2A.2
  misc_feature (5)..(59): NCBI GI NO: 7649159 NR Description: histone H2A [Euphorbia esula]
  misc_feature (1)..(59): NCBI GI NO: 15238549 NR Description: histone H2A - like protein; protein id:At5g59870
  misc_feature (2)..(59): NCBI GI NO: 121973 NR Description: Histone H2A.2
MSSTGGGGRGKAKPATKSVSRSSKAGLQFPVGRIARYLKAGKYAERVGAGAPVYLSAVLGVSRRRGAGAGRERCSGQQEEPYRAAPHPAGGAERRGAEQAAGHCDDRGRRRDAEHPSDPAAQESWSEGGHRLCLPGVLSVSAE

SEQ ID NO: 33076 - protein, 128 aa, Zea mays subsp. mays
  peptide (1)..(128): Ceres Seq. ID no. 12403940
ISLHSPTKNRSAARTNLEVFESFQTPKRRSGDEFHRRRRPREGEASDQVGVAVLQGWASVPRRSHRAVPQGREVCGARRRRGPRVPLRRSRSISPPRCWSWPGTLLGTTRRTVSCRATSSWRCGTTRS

SEQ ID NO: 33077 - DNA, 827 bp, Zea mays subsp. mays
  misc_feature (1)..(827): Ceres Seq. ID no. 12343201
atctccgaaaaaaaaacgcgaacgcagaacgccgccggcccgtcgtgcactcgtgtttcccttcctccacttgccttcgtgttcgtgattcgtgatttcgccgccggaaagccgagggagagggagcgatatggggttcgtcggagacacgatggagtcgatccgctccatgcagatccgccaagtgctcatgcagatcatcagcctcggtatgattgttacctctgcattaatcatatggaagggtttgatagttttcacggggagcgagtcaccagttgtagtggtgctctcgggtagcatggagcctggatttaaaaggggtgatatcctgtttttgcatatgagcaaagatcctattcgcacaggagaaatagttgttttcaatatcgatggtcgtgagattccaattgtccaccgagtgattaaggtccatgaacgtcaggacactgcagaagtggacatcctcaccaaaggtgacaataattttggggatgaccgactattatatgcacatggccagctttggctccagcaacaccacattatggggcgtgcggtgggctaccttccatatgttggctgggttacaattatcatgactgagaaaccatttattaagtacctgctgattggcgcactgggcttgctggtcataacgtcgaaagattagtgatgtcaaacttcagggccatgtagattttgctcttatggcgcaacagcagagatcactggctttgtggcgtttgagagatgccgctatgttgcgccatgtatcaaacgagaagatttctttatctactgcgagggcacctgcccattgatcg

SEQ ID NO: 33078 - protein, 180 aa, Zea mays subsp. mays
  peptide (1)..(180): Ceres Seq. ID no. 12343202
  misc_feature (1)..(157): Pfam Name: Pfam Description:  Signal peptidase I
  misc_feature (1)..(180): NCBI GI NO: 15219044 NR Description: signal peptidase subunit, putative
  misc_feature (1)..(180): NCBI GI NO: 18400874 NR Description: putative signal peptidase 21kDa subunit
  misc_feature (6)..(180): NCBI GI NO: 9910550 NR Description: signal peptidase complex
  misc_feature (6)..(180): NCBI GI NO: 34784421 NR Description: Spc18-pending protein [Mus musculus]
  misc_feature (6)..(180): NCBI GI NO: 24025634 NR Description: signal peptidase 21kDa subunit [Rattus norvegicus]
  misc_feature (6)..(180): NCBI GI NO: 134792 NR Description: Microsomal signal peptidase 21 kDa subunit
  misc_feature (6)..(180): NCBI GI NO: 21313554 NR Description: RIKEN cDNA 1810029G24 [Mus musculus]
  misc_feature (6)..(180): NCBI GI NO: 7657609 NR Description: signal peptidase complex (18kD) [Homo sapiens]
  misc_feature (1)..(180): NCBI GI NO: 31195617 NR Description: ENSANGP00000013674 [Anopheles gambiae]
  misc_feature (1)..(180): NCBI GI NO: 31207577 NR Description: ENSANGP00000020448 [Anopheles gambiae]
MGFVGDTMESIRSMQIRQVLMQIISLGMIVTSALIIWKGLIVFTGSESPVVVVLSGSMEPGFKRGDILFLHMSKDPIRTGEIVVFNIDGREIPIVHRVIKVHERQDTAEVDILTKGDNNFGDDRLLYAHGQLWLQQHHIMGRAVGYLPYVGWVTIIMTEKPFIKYLLIGALGLLVITSKD

SEQ ID NO: 33079 - protein, 173 aa, Zea mays subsp. mays
  peptide (1)..(173): Ceres Seq. ID no. 12343203
  misc_feature (1)..(150): Pfam Name: Pfam Description:  Signal peptidase I
  misc_feature (1)..(173): NCBI GI NO: 15219044 NR Description: signal peptidase subunit, putative
  misc_feature (1)..(173): NCBI GI NO: 18400874 NR Description: putative signal peptidase 21kDa subunit
  misc_feature (1)..(173): NCBI GI NO: 9910550 NR Description: signal peptidase complex
  misc_feature (1)..(173): NCBI GI NO: 34784421 NR Description: Spc18-pending protein [Mus musculus]
  misc_feature (1)..(173): NCBI GI NO: 24025634 NR Description: signal peptidase 21kDa subunit [Rattus norvegicus]
  misc_feature (1)..(173): NCBI GI NO: 134792 NR Description: Microsomal signal peptidase 21 kDa subunit
  misc_feature (1)..(173): NCBI GI NO: 21313554 NR Description: RIKEN cDNA 1810029G24 [Mus musculus]
  misc_feature (1)..(173): NCBI GI NO: 7657609 NR Description: signal peptidase complex (18kD) [Homo sapiens]
  misc_feature (1)..(173): NCBI GI NO: 31195617 NR Description: ENSANGP00000013674 [Anopheles gambiae]
  misc_feature (1)..(173): NCBI GI NO: 31207577 NR Description: ENSANGP00000020448 [Anopheles gambiae]
MESIRSMQIRQVLMQIISLGMIVTSALIIWKGLIVFTGSESPVVVVLSGSMEPGFKRGDILFLHMSKDPIRTGEIVVFNIDGREIPIVHRVIKVHERQDTAEVDILTKGDNNFGDDRLLYAHGQLWLQQHHIMGRAVGYLPYVGWVTIIMTEKPFIKYLLIGALGLLVITSKD

SEQ ID NO: 33080 - protein, 167 aa, Zea mays subsp. mays
  peptide (1)..(167): Ceres Seq. ID no. 12343204
  misc_feature (1)..(144): Pfam Name: Pfam Description:  Signal peptidase I
  misc_feature (1)..(167): NCBI GI NO: 15219044 NR Description: signal peptidase subunit, putative
  misc_feature (1)..(167): NCBI GI NO: 18400874 NR Description: putative signal peptidase 21kDa subunit
  misc_feature (1)..(167): NCBI GI NO: 9910550 NR Description: signal peptidase complex
  misc_feature (1)..(167): NCBI GI NO: 34784421 NR Description: Spc18-pending protein [Mus musculus]
  misc_feature (1)..(167): NCBI GI NO: 24025634 NR Description: signal peptidase 21kDa subunit [Rattus norvegicus]
  misc_feature (1)..(167): NCBI GI NO: 134792 NR Description: Microsomal signal peptidase 21 kDa subunit
  misc_feature (1)..(167): NCBI GI NO: 21313554 NR Description: RIKEN cDNA 1810029G24 [Mus musculus]
  misc_feature (1)..(167): NCBI GI NO: 7657609 NR Description: signal peptidase complex (18kD) [Homo sapiens]
  misc_feature (1)..(167): NCBI GI NO: 31195617 NR Description: ENSANGP00000013674 [Anopheles gambiae]
  misc_feature (1)..(167): NCBI GI NO: 31207577 NR Description: ENSANGP00000020448 [Anopheles gambiae]
MQIRQVLMQIISLGMIVTSALIIWKGLIVFTGSESPVVVVLSGSMEPGFKRGDILFLHMSKDPIRTGEIVVFNIDGREIPIVHRVIKVHERQDTAEVDILTKGDNNFGDDRLLYAHGQLWLQQHHIMGRAVGYLPYVGWVTIIMTEKPFIKYLLIGALGLLVITSKD

SEQ ID NO: 33081 - DNA, 1092 bp, Zea mays subsp. mays
  misc_feature (1)..(1092): Ceres Seq. ID no. 12404178
aaaaagaaaagagagggagaggaagcgagcggctgggcgccccaagccccacatggtgcagcgaggtccacgctaacaacttctcgaccttggcctcccacggctctgccgcattgccgcgcgccgccggccggcactcgccgtcctgacgcgagaaggaagatgctctaggaagttgggggcctggctagggacagcctgtgtcccgccgtgggatcggtgggagagggggaggcaggcatgtgtgatctggtggcccgcacgggccggcacctgcagcgctacgagaacggccgtcgccttgtggccgggtgcataccattcagatatagggatattaatgatggagcttctgatgatgaacaaaagaaacttgttgaagttctcatgatcagctcccaaagtggaccgggtcttctatttccaaagggaggctgggagaatgatgaaactgttgaagaggcagctgcaagggaagctatcgaagaagctggagtgcgaggagatttagtgcaactgctggggttctacgatttcaagagcaagcagcccgaagcaacgtgcagagccgcaatcttcgccctgcacgtgaaggaagagctagcctcctggccagaacagagcacccggcagaggagctggctcaccgttcccgaggcggcggagcggagccgctacccgtggatgcaggaggccctcgtgacaggcttctccgcctggctcgagaactggagaaacggtggtggcggcggcggcggctgcgtggaccgaactgagagatgacaccaccttaaagcatcaggggggcccccggcggagaagccatctgctagctatttcttggcgttgtatcttgcttggactagaattttcttccagaggctgactgcctggcatacatgcatgagggctctctgatgctcggtagcttttgtttactttgtcgctttattacaccgtcgtcttcaggatgacagtctcctcagctgatgatggcccgaggtttgttaaattgtaagcttgctgattctcgcggtcgccagctatatttaactgtcttgtattgagccttgagacaaagcaagctttgtg

SEQ ID NO: 33082 - protein, 180 aa, Zea mays subsp. mays
  peptide (1)..(180): Ceres Seq. ID no. 12404179
  misc_feature (19)..(158): Pfam Name: Pfam Description:  NUDIX domain
  misc_feature (1)..(167): NCBI GI NO: 38175436 NR Description: MutT-like protein
  misc_feature (1)..(167): NCBI GI NO: 34900054 NR Description: MutT-like protein~contains ESTsAU085960
  misc_feature (1)..(160): NCBI GI NO: 18399682 NR Description: expressed protein; protein id: At3g12600.1
  misc_feature (1)..(153): NCBI GI NO: 15231598 NR Description: MutT-like protein; protein id: At3g26690.1
  misc_feature (1)..(153): NCBI GI NO: 18379275 NR Description: expressed protein; protein id: At2g01670
  misc_feature (1)..(153): NCBI GI NO: 21595695 NR Description: unknown [Arabidopsis thaliana]
  misc_feature (1)..(153): NCBI GI NO: 15223919 NR Description: hypothetical protein; protein id: At1g14860.1
  misc_feature (1)..(153): NCBI GI NO: 18391450 NR Description: expressed protein; protein id: At1g12880
  misc_feature (1)..(153): NCBI GI NO: 25518008 NR Description: F13K23.14 protein - Arabidopsis thaliana
  misc_feature (4)..(153): NCBI GI NO: 15221055 NR Description: unknown protein; protein id: At1g18300.1
MCDLVARTGRHLQRYENGRRLVAGCIPFRYRDINDGASDDEQKKLVEVLMISSQSGPGLLFPKGGWENDETVEEAAAREAIEEAGVRGDLVQLLGFYDFKSKQPEATCRAAIFALHVKEELASWPEQSTRQRSWLTVPEAAERSRYPWMQEALVTGFSAWLENWRNGGGGGGGCVDRTER

SEQ ID NO: 33083 - protein, 131 aa, Zea mays subsp. mays
  peptide (1)..(131): Ceres Seq. ID no. 12404180
  misc_feature (1)..(109): Pfam Name: Pfam Description:  NUDIX domain
  misc_feature (1)..(118): NCBI GI NO: 38175436 NR Description: MutT-like protein
  misc_feature (1)..(118): NCBI GI NO: 34900054 NR Description: MutT-like protein~contains ESTsAU085960
  misc_feature (1)..(111): NCBI GI NO: 18399682 NR Description: expressed protein; protein id: At3g12600.1
  misc_feature (1)..(104): NCBI GI NO: 15231598 NR Description: MutT-like protein; protein id: At3g26690.1
  misc_feature (1)..(104): NCBI GI NO: 18379275 NR Description: expressed protein; protein id: At2g01670
  misc_feature (1)..(104): NCBI GI NO: 21595695 NR Description: unknown [Arabidopsis thaliana]
  misc_feature (1)..(104): NCBI GI NO: 15223919 NR Description: hypothetical protein; protein id: At1g14860.1
  misc_feature (1)..(104): NCBI GI NO: 18391450 NR Description: expressed protein; protein id: At1g12880
  misc_feature (1)..(104): NCBI GI NO: 25518008 NR Description: F13K23.14 protein - Arabidopsis thaliana
  misc_feature (1)..(104): NCBI GI NO: 15221055 NR Description: unknown protein; protein id: At1g18300.1
MISSQSGPGLLFPKGGWENDETVEEAAAREAIEEAGVRGDLVQLLGFYDFKSKQPEATCRAAIFALHVKEELASWPEQSTRQRSWLTVPEAAERSRYPWMQEALVTGFSAWLENWRNGGGGGGGCVDRTER

SEQ ID NO: 33084 - DNA, 1635 bp, Zea mays subsp. mays
  misc_feature (1)..(1635): Ceres Seq. ID no. 12364926
acgcagcggaaaaatcccatcaaaaaacaaggggaaaaaacaacacagcatgaactgcttgaagaactcgcgttctgtcctctcgcgactccttcgccacaggccccacgtagccgcgccaccgccgccgacgccggcgacggcgccgcagccaccggcttcacggtactactactacgcctcccgcgtcaagccagccgtctcccgaccgccgcctcagttgccgagatctaggcactactacacatccccgcggcgtcagcaggtcgtccacttcaaccgccgccgcggcgggtcccggtggtaccacgaccagcggaagctcacggcggcggtcttaatcagcggcggcggggcggtcgcgttctacttcggccatttggagaccgtgccctacaccaaccgctcccacctcgtcgtcctctcgccgaagttcgagcgccagctcggcgagtcccagtttgcccagctcaagaaggagttcgggcccaagatcctgccaccgcttcaccccgacagcatccgtgtccgcctcatcgcctcggagatcgtccgcgccgtccaccgtggcatctccgtccaacagcgccacgacgccttctacggagaggacgcctcgtatgggtatggcggcatcgccgacgacctctccatcaagaaccgcgacgccgacgctgctgcagcgctgcttggtgcttcccccggcaagaacgccagtgctgccgtggccgctcagcgagatgacgagctcctggatgacaggtgggtgaccgagagtcggagccgaggtaaggcacgtggggcgcaaccgcagacgggtcacctggacggggttaactgggaggtgatcgttgtcaaagatgacctcgtcaatgcattttgcctgcctggtggcaagattgtagtcttcactggattgcttaacaaattcagggccgatgctgaggttgccactgttgttgggcatgaggttgggcatgctattgcgaggcactccgctgagcagatcactaagaacctctgggtggcaatcctgcagattgtcatcctgcagtttatttacatgccggacttgataaatacggtgtcaacactactcctcaggctacccttctcacgaagaatggagatagaggctgaccacatcgggctcctgctgctcgctgctgctggttacgatccgcgtgtggccccttcggtctatgagaagctaggaaagatcggaggagattcagcactgaataactacctctcgactcacccgtccagcaagaagagggcgcagcttctgtcgcaggccagtgtcatgaacgaggcgctgaaactgtacagggaggttagtgccggccaaggcaccgaaggtttcctctagattctgggacctgctcctctgcttgtttcaaacgcctcacaaagaggttggtggtcttgttagctgcagtagtgacggcctgtggcgatcggcgttctgagtggttcagaagcctggaagattaaacctcgttatttccagtcgttctgatgtcgaacggggccctcgtcgcttcccctagcagaagcaggatagctgctttgcatttgtcattaggaaaaaagaaattaagcaccgtatattgtcaataattgttggttgac

SEQ ID NO: 33085 - protein, 456 aa, Zea mays subsp. mays
  peptide (1)..(456): Ceres Seq. ID no. 12364927
  misc_feature (78)..(456): NCBI GI NO: 10177873 NR Description: contains similarity to peptidase~gene_id:MIO24.13
  misc_feature (78)..(456): NCBI GI NO: 30696099 NR Description: expressed protein [Arabidopsis thaliana]
  misc_feature (275)..(445): NCBI GI NO: 19114452 NR Description: hypothetical peptidase 48 family protein
  misc_feature (113)..(184): NCBI GI NO: 19114452 NR Description: hypothetical peptidase 48 family protein
  misc_feature (275)..(432): NCBI GI NO: 6322940 NR Description: Hypothetical ORF; Ykr087cp
  misc_feature (117)..(193): NCBI GI NO: 6322940 NR Description: Hypothetical ORF; Ykr087cp
  misc_feature (275)..(430): NCBI GI NO: 40745859 NR Description: hypothetical protein AN1850.2
  misc_feature (50)..(184): NCBI GI NO: 40745859 NR Description: hypothetical protein AN1850.2
  misc_feature (235)..(453): NCBI GI NO: 33601095 NR Description: putative lipoprotein [Bordetella bronchiseptica]
  misc_feature (235)..(453): NCBI GI NO: 33596542 NR Description: putative lipoprotein [Bordetella parapertussis]
RSGKIPSKNKGKKQHSMNCLKNSRSVLSRLLRHRPHVAAPPPPTPATAPQPPASRYYYYASRVKPAVSRPPPQLPRSRHYYTSPRRQQVVHFNRRRGGSRWYHDQRKLTAAVLISGGGAVAFYFGHLETVPYTNRSHLVVLSPKFERQLGESQFAQLKKEFGPKILPPLHPDSIRVRLIASEIVRAVHRGISVQQRHDAFYGEDASYGYGGIADDLSIKNRDADAAAALLGASPGKNASAAVAAQRDDELLDDRWVTESRSRGKARGAQPQTGHLDGVNWEVIVVKDDLVNAFCLPGGKIVVFTGLLNKFRADAEVATVVGHEVGHAIARHSAEQITKNLWVAILQIVILQFIYMPDLINTVSTLLLRLPFSRRMEIEADHIGLLLLAAAGYDPRVAPSVYEKLGKIGGDSALNNYLSTHPSSKKRAQLLSQASVMNEALKLYREVSAGQGTEGFL

SEQ ID NO: 33086 - protein, 440 aa, Zea mays subsp. mays
  peptide (1)..(440): Ceres Seq. ID no. 12364928
  misc_feature (62)..(440): NCBI GI NO: 10177873 NR Description: contains similarity to peptidase~gene_id:MIO24.13
  misc_feature (62)..(440): NCBI GI NO: 30696099 NR Description: expressed protein [Arabidopsis thaliana]
  misc_feature (259)..(429): NCBI GI NO: 19114452 NR Description: hypothetical peptidase 48 family protein
  misc_feature (97)..(168): NCBI GI NO: 19114452 NR Description: hypothetical peptidase 48 family protein
  misc_feature (259)..(416): NCBI GI NO: 6322940 NR Description: Hypothetical ORF; Ykr087cp
  misc_feature (101)..(177): NCBI GI NO: 6322940 NR Description: Hypothetical ORF; Ykr087cp
  misc_feature (259)..(414): NCBI GI NO: 40745859 NR Description: hypothetical protein AN1850.2
  misc_feature (34)..(168): NCBI GI NO: 40745859 NR Description: hypothetical protein AN1850.2
  misc_feature (219)..(437): NCBI GI NO: 33601095 NR Description: putative lipoprotein [Bordetella bronchiseptica]
  misc_feature (219)..(437): NCBI GI NO: 33596542 NR Description: putative lipoprotein [Bordetella parapertussis]
MNCLKNSRSVLSRLLRHRPHVAAPPPPTPATAPQPPASRYYYYASRVKPAVSRPPPQLPRSRHYYTSPRRQQVVHFNRRRGGSRWYHDQRKLTAAVLISGGGAVAFYFGHLETVPYTNRSHLVVLSPKFERQLGESQFAQLKKEFGPKILPPLHPDSIRVRLIASEIVRAVHRGISVQQRHDAFYGEDASYGYGGIADDLSIKNRDADAAAALLGASPGKNASAAVAAQRDDELLDDRWVTESRSRGKARGAQPQTGHLDGVNWEVIVVKDDLVNAFCLPGGKIVVFTGLLNKFRADAEVATVVGHEVGHAIARHSAEQITKNLWVAILQIVILQFIYMPDLINTVSTLLLRLPFSRRMEIEADHIGLLLLAAAGYDPRVAPSVYEKLGKIGGDSALNNYLSTHPSSKKRAQLLSQASVMNEALKLYREVSAGQGTEGFL

SEQ ID NO: 33087 - DNA, 1332 bp, Zea mays subsp. mays
  misc_feature (1)..(1332): Ceres Seq. ID no. 13498636
actacgtagctgcctgtgcctctttctggctccctgctgtctgcctggccggtgctcacagacacgcgcaagatggccggacgcacggaggaggctcgcaggagcggggagagggagacggtgtgcgtgacgggcgccggcgggtacatcgcctcatggctcgtcaagctcctcctctcccgcggctacgccgtgcacgccaccgtccgtgacccgcgtgatcccaagaacgcccacctggggcagctggaatgggccgcggagaatctccggctgttcaaggccgacgtgctcgacagcgacgcgctggctgccgcagtctccgggtgccggggggtcttccatgttgcctgtccggtgcccacggatagggttcttgatccggagtcagaagtactggctcctgctgtgcaaggtaccttaaacattcttcaggcttgctcagctaataatattcagaaggttgttgtggtttcgtctaccgccgctgttcatttcgacccaaattggcctccacatagacctaaagacgaggattgctggtcggacataaacttttgcaaaaagaacgaggactggtatatggttgccaaggttattgctgaaaagacagccctagaatacggagagagaaatggattaaatgttgttacagtttgccctactatggctttaggaccgctcttgcggcctatgctcaatgtcagccatgaattcctcatgtacattattaaaggaggtcctactatgatgaagaacattccatggcacatagttgatgtccgagatgtggttgatgctttgcttatggtatacaagaaagaggaatcgacagggagatacatctgtgcaccaaattgcatcagtgcaaaagatctggtgaacatgctgaagagggattatcctaattacaattatgtaaactgcgacaatgatatggtgcttaactctatagttacaccacttatgtcggagaaactgaagaatttgggctggaaaccaatgaagacactagaggaaacattattggatagtgttgaatgctataagaagatggggcttctaaaagatgctgagggatgcccttgtcgtcttcctcacctttttcatatggctatagaaaaatgaagaatactcaccattgcttcttgtgttacctaattactctttgaacattgttgggtatgtgttctaatcacacaccaataatgttgacattcaatgggttgtggttgatttgaaataaatgtttggtttcttatgtaatctatatggaacaaagtgcacctttcactttttttgtatggaagttgtcatgcatcttttttctcg

SEQ ID NO: 33088 - protein, 351 aa, Zea mays subsp. mays
  peptide (1)..(351): Ceres Seq. ID no. 13498637
  misc_feature (19)..(227): Pfam Name: Pfam Description:  NAD dependent epimerase/dehydratase family
  misc_feature (17)..(331): NCBI GI NO: 15226134 NR Description: cinnamoyl-CoA reductase family
  misc_feature (14)..(334): NCBI GI NO: 15223068 NR Description: cinnamoyl-CoA reductase family
  misc_feature (14)..(334): NCBI GI NO: 6554472 NR Description: putative cinnamoyl-CoA reductase; 14056-15506
  misc_feature (13)..(331): NCBI GI NO: 15226135 NR Description: cinnamoyl-CoA reductase family
  misc_feature (12)..(338): NCBI GI NO: 9964087 NR Description: cinnamoyl CoA reductase [Lolium perenne]
  misc_feature (12)..(331): NCBI GI NO: 25140432 NR Description: cinnamoyl CoA reductase [Hordeum vulgare]
  misc_feature (2)..(331): NCBI GI NO: 3341511 NR Description: cinnamoyl-CoA reductase [Saccharum officinarum]
  misc_feature (2)..(331): NCBI GI NO: 17978549 NR Description: cinnamoyl-CoA reductase [Lolium perenne]
  misc_feature (11)..(331): NCBI GI NO: 3242328 NR Description: cinnamoyl-CoA reductase [Zea mays]
  misc_feature (11)..(331): NCBI GI NO: 7431410 NR Description: cinnamoyl CoA reductase - maize
MAGRTEEARRSGERETVCVTGAGGYIASWLVKLLLSRGYAVHATVRDPRDPKNAHLGQLEWAAENLRLFKADVLDSDALAAAVSGCRGVFHVACPVPTDRVLDPESEVLAPAVQGTLNILQACSANNIQKVVVVSSTAAVHFDPNWPPHRPKDEDCWSDINFCKKNEDWYMVAKVIAEKTALEYGERNGLNVVTVCPTMALGPLLRPMLNVSHEFLMYIIKGGPTMMKNIPWHIVDVRDVVDALLMVYKKEESTGRYICAPNCISAKDLVNMLKRDYPNYNYVNCDNDMVLNSIVTPLMSEKLKNLGWKPMKTLEETLLDSVECYKKMGLLKDAEGCPCRLPHLFHMAIEK

SEQ ID NO: 33089 - protein, 181 aa, Zea mays subsp. mays
  peptide (1)..(181): Ceres Seq. ID no. 13498638
  misc_feature (1)..(57): Pfam Name: Pfam Description:  NAD dependent epimerase/dehydratase family
  misc_feature (1)..(161): NCBI GI NO: 15226134 NR Description: cinnamoyl-CoA reductase family
  misc_feature (1)..(164): NCBI GI NO: 15223068 NR Description: cinnamoyl-CoA reductase family
  misc_feature (1)..(164): NCBI GI NO: 6554472 NR Description: putative cinnamoyl-CoA reductase; 14056-15506
  misc_feature (1)..(161): NCBI GI NO: 15226135 NR Description: cinnamoyl-CoA reductase family
  misc_feature (1)..(168): NCBI GI NO: 9964087 NR Description: cinnamoyl CoA reductase [Lolium perenne]
  misc_feature (1)..(161): NCBI GI NO: 25140432 NR Description: cinnamoyl CoA reductase [Hordeum vulgare]
  misc_feature (1)..(161): NCBI GI NO: 3341511 NR Description: cinnamoyl-CoA reductase [Saccharum officinarum]
  misc_feature (1)..(161): NCBI GI NO: 17978549 NR Description: cinnamoyl-CoA reductase [Lolium perenne]
  misc_feature (1)..(161): NCBI GI NO: 3242328 NR Description: cinnamoyl-CoA reductase [Zea mays]
  misc_feature (1)..(161): NCBI GI NO: 7431410 NR Description: cinnamoyl CoA reductase - maize
MVAKVIAEKTALEYGERNGLNVVTVCPTMALGPLLRPMLNVSHEFLMYIIKGGPTMMKNIPWHIVDVRDVVDALLMVYKKEESTGRYICAPNCISAKDLVNMLKRDYPNYNYVNCDNDMVLNSIVTPLMSEKLKNLGWKPMKTLEETLLDSVECYKKMGLLKDAEGCPCRLPHLFHMAIEK

SEQ ID NO: 33090 - DNA, 1368 bp, Zea mays subsp. mays
  misc_feature (1)..(1368): Ceres Seq. ID no. 12373411
atgtttgcaggatttgcaacccatttctctcctcgactcccacaacagggtccgtacgggaaagagagagaaggtgggagtggaatcgacaggggaaaaccaagcctgtgtttcagagacaactcaggcgacgcgatggcgatggcggcgctgcgacgcgaggggaggcgcctcctcctcgcccccaccgtccccaacccgtcttcggcggccgcttccgctgcggtgacgcgatcctccgccatgtcgcaaccggagatggctccacttggtgcacgttctatttcaactcaagttgtgaggaaccggatgaagagtatcaaaaacatccagaagatcacaaaggctatgaagatggttgcagcatcaaagcttcgggctgttcagacgaggactgaaaattcacgcggcttgtggcagtcgttcaccgcccttcttggggacgctcctagtgttgacgtcaagaagaatgtgattgtggccattacctctgataagggactctgtggtggtatcaattcaacctcggtgaaagttagcagggcccttcacaaactgacatctggtccagaaaaagaaagcaagtatgttatattaggagaaaaaggcaaagttcagctgttgcgtgactcgaagaacagcattgaaatgaccgcaagtgaactacagaagaaccctatcaactatacacagattgctgtgctcgcggatgacatattgaaaaatgtggaatatgatgctctaagggttattttcaacaagttccattctgtcatatcgtttaagcccacaatggtaacgatactgtcccctgaggttgcagaaaaagaagcagaagctggtgggaagatgggtgacctagattcttatgagattgaaggcggtgagacaaaagcagagatattgcaaaacctagctgagttccagttttcttgtgtcatgtacaatggtgccctagagaatgcatgcagtgagcttggagcccgtatgtctgccatggacagctctagcagaaatgctggcgatatgcttgatcgtctcacgcttacttacaacaggacacgccaagcatccatcaccacagagcttactgagattatatctggtgcatcagcccttgaaggataggtgaagagactatgtggacttttccctttttccccatttgcgttcctctcacatgaaggcttcttttcttccggaggctcagtttcaacccttctcgtttcacttttccttgataaacgtattcttatgctttattgcaataattaggccaacgacagtgatgatgccgtgcgcctttgcatattccaaaaagaatgttctacatctatggtgaatggctggttttcataaatggtgatg

SEQ ID NO: 33091 - protein, 375 aa, Zea mays subsp. mays
  peptide (1)..(375): Ceres Seq. ID no. 12373412
  misc_feature (98)..(231): Pfam Name: Pfam Description:  ATP synthase
  misc_feature (46)..(375): NCBI GI NO: 543867 NR Description: ATP synthase gamma chain, mitochondrial precursor
  misc_feature (232)..(375): NCBI GI NO: 37532654 NR Description: putative ATP SYNTHASE GAMMA CHAIN
  misc_feature (98)..(231): NCBI GI NO: 37532654 NR Description: putative ATP SYNTHASE GAMMA CHAIN
  misc_feature (46)..(374): NCBI GI NO: 15227257 NR Description: mitochondrial F1-ATPase, gamma subunit
  misc_feature (46)..(374): NCBI GI NO: 22530902 NR Description: mitochondrial F1-ATPase, gamma subunit
  misc_feature (48)..(374): NCBI GI NO: 7436158 NR Description: probable H+-transporting two-sector ATPase (EC3
  misc_feature (212)..(375): NCBI GI NO: 7436157 NR Description: probable H+-transporting two-sector ATPase (EC3
  misc_feature (96)..(373): NCBI GI NO: 11466530 NR Description: ATP synthase F1 subunit alpha
  misc_feature (70)..(374): NCBI GI NO: 31224910 NR Description: ENSANGP00000010167 [Anopheles gambiae]
  misc_feature (78)..(373): NCBI GI NO: 23490546 NR Description: ATP synthase F1, gamma subunit
MFAGFATHFSPRLPQQGPYGKEREGGSGIDRGKPSLCFRDNSGDAMAMAALRREGRRLLLAPTVPNPSSAAASAAVTRSSAMSQPEMAPLGARSISTQVVRNRMKSIKNIQKITKAMKMVAASKLRAVQTRTENSRGLWQSFTALLGDAPSVDVKKNVIVAITSDKGLCGGINSTSVKVSRALHKLTSGPEKESKYVILGEKGKVQLLRDSKNSIEMTASELQKNPINYTQIAVLADDILKNVEYDALRVIFNKFHSVISFKPTMVTILSPEVAEKEAEAGGKMGDLDSYEIEGGETKAEILQNLAEFQFSCVMYNGALENACSELGARMSAMDSSSRNAGDMLDRLTLTYNRTRQASITTELTEIISGASALEG

SEQ ID NO: 33092 - protein, 330 aa, Zea mays subsp. mays
  peptide (1)..(330): Ceres Seq. ID no. 12373413
  misc_feature (53)..(186): Pfam Name: Pfam Description:  ATP synthase
  misc_feature (1)..(330): NCBI GI NO: 543867 NR Description: ATP synthase gamma chain, mitochondrial precursor
  misc_feature (187)..(330): NCBI GI NO: 37532654 NR Description: putative ATP SYNTHASE GAMMA CHAIN
  misc_feature (53)..(186): NCBI GI NO: 37532654 NR Description: putative ATP SYNTHASE GAMMA CHAIN
  misc_feature (1)..(329): NCBI GI NO: 15227257 NR Description: mitochondrial F1-ATPase, gamma subunit
  misc_feature (1)..(329): NCBI GI NO: 22530902 NR Description: mitochondrial F1-ATPase, gamma subunit
  misc_feature (3)..(329): NCBI GI NO: 7436158 NR Description: probable H+-transporting two-sector ATPase (EC3
  misc_feature (167)..(330): NCBI GI NO: 7436157 NR Description: probable H+-transporting two-sector ATPase (EC3
  misc_feature (51)..(328): NCBI GI NO: 11466530 NR Description: ATP synthase F1 subunit alpha
  misc_feature (25)..(329): NCBI GI NO: 31224910 NR Description: ENSANGP00000010167 [Anopheles gambiae]
  misc_feature (33)..(328): NCBI GI NO: 23490546 NR Description: ATP synthase F1, gamma subunit
MAMAALRREGRRLLLAPTVPNPSSAAASAAVTRSSAMSQPEMAPLGARSISTQVVRNRMKSIKNIQKITKAMKMVAASKLRAVQTRTENSRGLWQSFTALLGDAPSVDVKKNVIVAITSDKGLCGGINSTSVKVSRALHKLTSGPEKESKYVILGEKGKVQLLRDSKNSIEMTASELQKNPINYTQIAVLADDILKNVEYDALRVIFNKFHSVISFKPTMVTILSPEVAEKEAEAGGKMGDLDSYEIEGGETKAEILQNLAEFQFSCVMYNGALENACSELGARMSAMDSSSRNAGDMLDRLTLTYNRTRQASITTELTEIISGASALEG

SEQ ID NO: 33093 - protein, 328 aa, Zea mays subsp. mays
  peptide (1)..(328): Ceres Seq. ID no. 12373414
  misc_feature (51)..(184): Pfam Name: Pfam Description:  ATP synthase
  misc_feature (1)..(328): NCBI GI NO: 543867 NR Description: ATP synthase gamma chain, mitochondrial precursor
  misc_feature (185)..(328): NCBI GI NO: 37532654 NR Description: putative ATP SYNTHASE GAMMA CHAIN
  misc_feature (51)..(184): NCBI GI NO: 37532654 NR Description: putative ATP SYNTHASE GAMMA CHAIN
  misc_feature (1)..(327): NCBI GI NO: 15227257 NR Description: mitochondrial F1-ATPase, gamma subunit
  misc_feature (1)..(327): NCBI GI NO: 22530902 NR Description: mitochondrial F1-ATPase, gamma subunit
  misc_feature (1)..(327): NCBI GI NO: 7436158 NR Description: probable H+-transporting two-sector ATPase (EC3
  misc_feature (165)..(328): NCBI GI NO: 7436157 NR Description: probable H+-transporting two-sector ATPase (EC3
  misc_feature (49)..(326): NCBI GI NO: 11466530 NR Description: ATP synthase F1 subunit alpha
  misc_feature (23)..(327): NCBI GI NO: 31224910 NR Description: ENSANGP00000010167 [Anopheles gambiae]
  misc_feature (31)..(326): NCBI GI NO: 23490546 NR Description: ATP synthase F1, gamma subunit
MAALRREGRRLLLAPTVPNPSSAAASAAVTRSSAMSQPEMAPLGARSISTQVVRNRMKSIKNIQKITKAMKMVAASKLRAVQTRTENSRGLWQSFTALLGDAPSVDVKKNVIVAITSDKGLCGGINSTSVKVSRALHKLTSGPEKESKYVILGEKGKVQLLRDSKNSIEMTASELQKNPINYTQIAVLADDILKNVEYDALRVIFNKFHSVISFKPTMVTILSPEVAEKEAEAGGKMGDLDSYEIEGGETKAEILQNLAEFQFSCVMYNGALENACSELGARMSAMDSSSRNAGDMLDRLTLTYNRTRQASITTELTEIISGASALEG

SEQ ID NO: 33094 - DNA, 1638 bp, Zea mays subsp. mays
  misc_feature (1)..(1638): Ceres Seq. ID no. 12341014
aacccagtgtgcgcacttcaccccccctctcggtctcaccctcctggcgacgactgggcggccgaccggccgtcgccgccgccccacgccaggtttcaaagtcttcgtcaggcccttctccggcgacttgagcaccacagggtgacaaggatagctttctcgggtcactgaaggaagacatcttctcgacgcgttagaccttctgacggttggctggttgtgctttaagtgttcaaggggtggattaggaccgggaaactctgtactgaagggaaggtcaaaagtgtcaagagagcttgttccaagatggatgaaggtcagggagttaggtattggtgccacatgtgtcaggaggtgatagatcccatgcccgagatgaagtgcccaggctgcgagggcgggtttgtggaggagatggactctgaagactttgagccagctgcgaacgcgaggtctgatcgctccgtctctctcttggctccactgctgcttggtatgatggggggttcgtcgcgcagatcaagactcaggagggaggccatggttgaagctgatgccgaccaggatgacgaagaggatgattcagatcatgagcttgaactttccaggaggaggcggaggaggaggcgctcatcagcgcttttcagtgtgcttgaggctatgcgtgaccgtgatgaagtaaggggctcggatgacaccgacagtgatacagagagagacctggagagagggagaagggagaggatggagaggcagagggagaggttaaggcagatcgagagggtgagtgctcgtggcagagagaggacggaaagcttaatactgatcaactccaacaacgaggctattattctgcagggaacattcggatctgatgacaaccaagaggactcaagcaacacaagttctggtgtatcacttggggattactttcttggtcctgccttagatactctcttgcagcgtttggcggagagtgacctcagtcgttctggcacaccgcctgccaagaaggaagcagtcgccgcgctaccaactgtgaacatcgaggaagcgttgggctgttcagtctgtcttgaggatttcgagatgggaggagaagcgaagcagatgccctgtcagcataagttccactcgcactgcatactcccgtggctggagctccacagctcttgcccaatctgccggtttcagttgcctactgaggagacgaagaacaacccatgcgaatcagccagcaccgcaggggccgtgaacggcgatggagacaacgctgctgcaagcggcagcgatacagaaagtactaaccacaatgaagatgaccattccgatagccctatcttctctgctctgagcacactcttctctgatccgttctcatccgacgatgatgaaagtgttccacactcttacgagaactgaagatagcgtcggacgcaggcttgcgatatggtgaagccgttctgaggctggcatctttatattgtagcttctgtacatatctctctgaacggtcgctcccccccataagacaaactattacctctccgttttactgaaaactatgtggcttgtaatctgctagtgcttgctatgttcacttgcctcgaataaatgttatcctttagcgtgcttatt

SEQ ID NO: 33095 - protein, 371 aa, Zea mays subsp. mays
  peptide (1)..(371): Ceres Seq. ID no. 12341015
  misc_feature (253)..(293): Pfam Name: RING finger Pfam Description: Zinc finger, C3HC4 type
  misc_feature (1)..(371): NCBI GI NO: 32129334 NR Description: unknown protein
  misc_feature (1)..(371): NCBI GI NO: 15241188 NR Description: putative protein; protein id: At5g56340
  misc_feature (97)..(366): NCBI GI NO: 18405411 NR Description: expressed protein; protein id: At1g55530
  misc_feature (8)..(371): NCBI GI NO: 22328949 NR Description: putative protein; protein id: At4g26400
  misc_feature (17)..(371): NCBI GI NO: 7486783 NR Description: hypothetical protein M3E9
  misc_feature (114)..(336): NCBI GI NO: 15231238 NR Description: unknown protein; protein id: At3g13430.1
  misc_feature (114)..(336): NCBI GI NO: 38454178 NR Description: At3g13430 [Arabidopsis thaliana]
  misc_feature (196)..(320): NCBI GI NO: 34903272 NR Description: unnamed protein product
  misc_feature (187)..(330): NCBI GI NO: 11994207 NR Description: gene_id:MPN9.20~unknown protein
  misc_feature (187)..(330): NCBI GI NO: 15231003 NR Description: unknown protein; protein id: At3g19950
MDEGQGVRYWCHMCQEVIDPMPEMKCPGCEGGFVEEMDSEDFEPAANARSDRSVSLLAPLLLGMMGGSSRRSRLRREAMVEADADQDDEEDDSDHELELSRRRRRRRRSSALFSVLEAMRDRDEVRGSDDTDSDTERDLERGRRERMERQRERLRQIERVSARGRERTESLILINSNNEAIILQGTFGSDDNQEDSSNTSSGVSLGDYFLGPALDTLLQRLAESDLSRSGTPPAKKEAVAALPTVNIEEALGCSVCLEDFEMGGEAKQMPCQHKFHSHCILPWLELHSSCPICRFQLPTEETKNNPCESASTAGAVNGDGDNAAASGSDTESTNHNEDDHSDSPIFSALSTLFSDPFSSDDDESVPHSYEN

SEQ ID NO: 33096 - protein, 359 aa, Zea mays subsp. mays
  peptide (1)..(359): Ceres Seq. ID no. 12341016
  misc_feature (241)..(281): Pfam Name: RING finger Pfam Description: Zinc finger, C3HC4 type
  misc_feature (1)..(359): NCBI GI NO: 32129334 NR Description: unknown protein
  misc_feature (1)..(359): NCBI GI NO: 15241188 NR Description: putative protein; protein id: At5g56340
  misc_feature (85)..(354): NCBI GI NO: 18405411 NR Description: expressed protein; protein id: At1g55530
  misc_feature (1)..(359): NCBI GI NO: 22328949 NR Description: putative protein; protein id: At4g26400
  misc_feature (5)..(359): NCBI GI NO: 7486783 NR Description: hypothetical protein M3E9
  misc_feature (102)..(324): NCBI GI NO: 15231238 NR Description: unknown protein; protein id: At3g13430.1
  misc_feature (102)..(324): NCBI GI NO: 38454178 NR Description: At3g13430 [Arabidopsis thaliana]
  misc_feature (184)..(308): NCBI GI NO: 34903272 NR Description: unnamed protein product
  misc_feature (175)..(318): NCBI GI NO: 11994207 NR Description: gene_id:MPN9.20~unknown protein
  misc_feature (175)..(318): NCBI GI NO: 15231003 NR Description: unknown protein; protein id: At3g19950
MCQEVIDPMPEMKCPGCEGGFVEEMDSEDFEPAANARSDRSVSLLAPLLLGMMGGSSRRSRLRREAMVEADADQDDEEDDSDHELELSRRRRRRRRSSALFSVLEAMRDRDEVRGSDDTDSDTERDLERGRRERMERQRERLRQIERVSARGRERTESLILINSNNEAIILQGTFGSDDNQEDSSNTSSGVSLGDYFLGPALDTLLQRLAESDLSRSGTPPAKKEAVAALPTVNIEEALGCSVCLEDFEMGGEAKQMPCQHKFHSHCILPWLELHSSCPICRFQLPTEETKNNPCESASTAGAVNGDGDNAAASGSDTESTNHNEDDHSDSPIFSALSTLFSDPFSSDDDESVPHSYEN

SEQ ID NO: 33097 - protein, 351 aa, Zea mays subsp. mays
  peptide (1)..(351): Ceres Seq. ID no. 12341017
  misc_feature (233)..(273): Pfam Name: RING finger Pfam Description: Zinc finger, C3HC4 type
  misc_feature (1)..(351): NCBI GI NO: 32129334 NR Description: unknown protein
  misc_feature (1)..(351): NCBI GI NO: 15241188 NR Description: putative protein; protein id: At5g56340
  misc_feature (77)..(346): NCBI GI NO: 18405411 NR Description: expressed protein; protein id: At1g55530
  misc_feature (1)..(351): NCBI GI NO: 22328949 NR Description: putative protein; protein id: At4g26400
  misc_feature (1)..(351): NCBI GI NO: 7486783 NR Description: hypothetical protein M3E9
  misc_feature (94)..(316): NCBI GI NO: 15231238 NR Description: unknown protein; protein id: At3g13430.1
  misc_feature (94)..(316): NCBI GI NO: 38454178 NR Description: At3g13430 [Arabidopsis thaliana]
  misc_feature (176)..(300): NCBI GI NO: 34903272 NR Description: unnamed protein product
  misc_feature (167)..(310): NCBI GI NO: 11994207 NR Description: gene_id:MPN9.20~unknown protein
  misc_feature (167)..(310): NCBI GI NO: 15231003 NR Description: unknown protein; protein id: At3g19950
MPEMKCPGCEGGFVEEMDSEDFEPAANARSDRSVSLLAPLLLGMMGGSSRRSRLRREAMVEADADQDDEEDDSDHELELSRRRRRRRRSSALFSVLEAMRDRDEVRGSDDTDSDTERDLERGRRERMERQRERLRQIERVSARGRERTESLILINSNNEAIILQGTFGSDDNQEDSSNTSSGVSLGDYFLGPALDTLLQRLAESDLSRSGTPPAKKEAVAALPTVNIEEALGCSVCLEDFEMGGEAKQMPCQHKFHSHCILPWLELHSSCPICRFQLPTEETKNNPCESASTAGAVNGDGDNAAASGSDTESTNHNEDDHSDSPIFSALSTLFSDPFSSDDDESVPHSYEN

SEQ ID NO: 33098 - DNA, 1567 bp, Zea mays subsp. mays
  misc_feature (1)..(1567): Ceres Seq. ID no. 12341078
gaccctttctttcccaaagccgagcagcgaccagcgagggtgccactgccaccgcccgccccccagtcccccactcactcactagctagcttgctagctgcgcactacgggctacgccgagctagagtccggcgatcacagcccggcaggccggccatggccaccgcgcccgtcgtcgtcctagtcctgcacgttctgctaggcgctgcagcggccgcctgcgccgcggcggcagggagtagcagcaaggtgccggcgatgtacgtgttcggcgactccacggcggacgtgggcaccaacaactacttgccgggcggcgccgaagtgccgcgtgccaacttcccccacaacggcgtcgacttccccacggcgcgccccaccggcaggttcagcaacgggttcaacggcgtcgacttcttggccgtgaacatgggcttcaagcgcagccccccgccgttcctcgccgtggccaacaagaccaacaggcaggtcttccgaggtctcctgggagtgaacttcgcctctgcaggatcaggcatcctcgacacgacggggagctccatcatcccgctgagcaagcaggtggagcagttcgccgccgtgcggcgcaacatctcgtcgcgcgtcggcaacgggtctgctgctgccgacgccctgctgtcgcggtccctgttcctcgtcagcaccggcggcaacgacctgttcgccttcttcgcgcggaacagcacgccgtcggacgccgacaagcggcggttcgtcgccaacctcgtcacgctgtaccagaaccatgtgaaggctctgtacgtgctcggggctcggaagttcgccgtgatcgacgtcccgccggtcgggtgctgcccctacccgaggagcctgcacccgctgggcgcctgcatcgacgtgctcaacgagctggcgcgcgggttcaacgagggcgtcagggcggccatgcacggcctcggcgtgagcttccaggggctcaggtactccgtcgggagctcccacgccgtcgtgcagagcatcatgaagcaccctcaaaggctggggttcaaggacgtgacgaacgcgtgctgcgggtcgggccggttcaacggcaagtccgggtgcacgcccaacgcgacgctgtgcgacaaccgacaccagtacctgttctgggacctgctgcaccccacgcacgccgcctccaagatcgccgccgccgccatctacaacggctcgctccacttcgccgcgccgatgaacttcaggcagctggccgaagacgaccggtgctagctagctagcacagctagagctagcacgaggacgtagggacgtgtctctgttctctgctgcggactgtggtgaatatggtcgttggtgtgtagaggacgacggatgcgtgcatggctgctgtgttcgctgtatgtttctcgaccgtggtttggtttagatgatgatgaccgacgccgccggcgtagtttggactgtgaacgaatttacatcatgctgctgcagaggtacgggtgtaccgtgtacgtgacatcgtctacacctctcctggacaactttaactgaatcttttttt

SEQ ID NO: 33099 - protein, 424 aa, Zea mays subsp. mays
  peptide (1)..(424): Ceres Seq. ID no. 12341079
  misc_feature (87)..(396): Pfam Name: Pfam Description:  GDSL-like Lipase/Acylhydrolase
  misc_feature (49)..(419): NCBI GI NO: 29837765 NR Description: putative GDSL-like lipase/acylhydrolase
  misc_feature (84)..(420): NCBI GI NO: 38345853 NR Description: OSJNBa0084K11.17
  misc_feature (58)..(418): NCBI GI NO: 15240452 NR Description: GDSL-motif lipase/hydrolase-like protein
  misc_feature (66)..(423): NCBI GI NO: 32489520 NR Description: OSJNBa0043L24.11
  misc_feature (73)..(420): NCBI GI NO: 34909504 NR Description: putative GDSL-motif lipase/hydrolase-like protein
  misc_feature (80)..(418): NCBI GI NO: 38345537 NR Description: OSJNBa0020J04.12
  misc_feature (58)..(420): NCBI GI NO: 15229742 NR Description: putative protein; protein id: At3g50400.1
  misc_feature (60)..(418): NCBI GI NO: 15224005 NR Description: putative GDSL-motif lipase/acylhydrolase
  misc_feature (71)..(424): NCBI GI NO: 22758315 NR Description: putative early nodulin gene (Enod) related protein
  misc_feature (71)..(424): NCBI GI NO: 37535146 NR Description: putative early nodulin gene (Enod) related protein
DPFFPKAEQRPARVPLPPPAPQSPTHSLASLLAAHYGLRRARVRRSQPGRPAMATAPVVVLVLHVLLGAAAAACAAAAGSSSKVPAMYVFGDSTADVGTNNYLPGGAEVPRANFPHNGVDFPTARPTGRFSNGFNGVDFLAVNMGFKRSPPPFLAVANKTNRQVFRGLLGVNFASAGSGILDTTGSSIIPLSKQVEQFAAVRRNISSRVGNGSAAADALLSRSLFLVSTGGNDLFAFFARNSTPSDADKRRFVANLVTLYQNHVKALYVLGARKFAVIDVPPVGCCPYPRSLHPLGACIDVLNELARGFNEGVRAAMHGLGVSFQGLRYSVGSSHAVVQSIMKHPQRLGFKDVTNACCGSGRFNGKSGCTPNATLCDNRHQYLFWDLLHPTHAASKIAAAAIYNGSLHFAAPMNFRQLAEDDRC

SEQ ID NO: 33100 - protein, 372 aa, Zea mays subsp. mays
  peptide (1)..(372): Ceres Seq. ID no. 12341080
  misc_feature (35)..(344): Pfam Name: Pfam Description:  GDSL-like Lipase/Acylhydrolase
  misc_feature (1)..(367): NCBI GI NO: 29837765 NR Description: putative GDSL-like lipase/acylhydrolase
  misc_feature (32)..(368): NCBI GI NO: 38345853 NR Description: OSJNBa0084K11.17
  misc_feature (6)..(366): NCBI GI NO: 15240452 NR Description: GDSL-motif lipase/hydrolase-like protein
  misc_feature (14)..(371): NCBI GI NO: 32489520 NR Description: OSJNBa0043L24.11
  misc_feature (21)..(368): NCBI GI NO: 34909504 NR Description: putative GDSL-motif lipase/hydrolase-like protein
  misc_feature (28)..(366): NCBI GI NO: 38345537 NR Description: OSJNBa0020J04.12
  misc_feature (6)..(368): NCBI GI NO: 15229742 NR Description: putative protein; protein id: At3g50400.1
  misc_feature (8)..(366): NCBI GI NO: 15224005 NR Description: putative GDSL-motif lipase/acylhydrolase
  misc_feature (19)..(372): NCBI GI NO: 22758315 NR Description: putative early nodulin gene (Enod) related protein
  misc_feature (19)..(372): NCBI GI NO: 37535146 NR Description: putative early nodulin gene (Enod) related protein
MATAPVVVLVLHVLLGAAAAACAAAAGSSSKVPAMYVFGDSTADVGTNNYLPGGAEVPRANFPHNGVDFPTARPTGRFSNGFNGVDFLAVNMGFKRSPPPFLAVANKTNRQVFRGLLGVNFASAGSGILDTTGSSIIPLSKQVEQFAAVRRNISSRVGNGSAAADALLSRSLFLVSTGGNDLFAFFARNSTPSDADKRRFVANLVTLYQNHVKALYVLGARKFAVIDVPPVGCCPYPRSLHPLGACIDVLNELARGFNEGVRAAMHGLGVSFQGLRYSVGSSHAVVQSIMKHPQRLGFKDVTNACCGSGRFNGKSGCTPNATLCDNRHQYLFWDLLHPTHAASKIAAAAIYNGSLHFAAPMNFRQLAEDDRC

SEQ ID NO: 33101 - protein, 338 aa, Zea mays subsp. mays
  peptide (1)..(338): Ceres Seq. ID no. 12341081
  misc_feature (1)..(310): Pfam Name: Pfam Description:  GDSL-like Lipase/Acylhydrolase
  misc_feature (1)..(333): NCBI GI NO: 29837765 NR Description: putative GDSL-like lipase/acylhydrolase
  misc_feature (1)..(334): NCBI GI NO: 38345853 NR Description: OSJNBa0084K11.17
  misc_feature (1)..(332): NCBI GI NO: 15240452 NR Description: GDSL-motif lipase/hydrolase-like protein
  misc_feature (1)..(337): NCBI GI NO: 32489520 NR Description: OSJNBa0043L24.11
  misc_feature (1)..(334): NCBI GI NO: 34909504 NR Description: putative GDSL-motif lipase/hydrolase-like protein
  misc_feature (1)..(332): NCBI GI NO: 38345537 NR Description: OSJNBa0020J04.12
  misc_feature (1)..(334): NCBI GI NO: 15229742 NR Description: putative protein; protein id: At3g50400.1
  misc_feature (1)..(332): NCBI GI NO: 15224005 NR Description: putative GDSL-motif lipase/acylhydrolase
  misc_feature (1)..(338): NCBI GI NO: 22758315 NR Description: putative early nodulin gene (Enod) related protein
  misc_feature (1)..(338): NCBI GI NO: 37535146 NR Description: putative early nodulin gene (Enod) related protein
MYVFGDSTADVGTNNYLPGGAEVPRANFPHNGVDFPTARPTGRFSNGFNGVDFLAVNMGFKRSPPPFLAVANKTNRQVFRGLLGVNFASAGSGILDTTGSSIIPLSKQVEQFAAVRRNISSRVGNGSAAADALLSRSLFLVSTGGNDLFAFFARNSTPSDADKRRFVANLVTLYQNHVKALYVLGARKFAVIDVPPVGCCPYPRSLHPLGACIDVLNELARGFNEGVRAAMHGLGVSFQGLRYSVGSSHAVVQSIMKHPQRLGFKDVTNACCGSGRFNGKSGCTPNATLCDNRHQYLFWDLLHPTHAASKIAAAAIYNGSLHFAAPMNFRQLAEDDRC

SEQ ID NO: 33102 - DNA, 1336 bp, Zea mays subsp. mays
  misc_feature (1)..(1336): Ceres Seq. ID no. 12411856
agttggccacatgccttgccttgcctttgcctacctgttgatcgagccgagcgagcagggagagacacggcaccgagtgaggccgccgcatcctcctcctctccgatccttagtccagtccgcctgctgcctgcctcaacggatcgacgcgacaggagggagggaggaaggagacggtcgatcagagtctgagacggaggccgatccaccaccgcagcgacgagcgggaggagatgaagatcatcattgacacggatcccggcatcgatgacagcgtggccatcctgatggcattccagatgccgggcgtccaggtcctagggctcaccaccatcttcggaaactgcaccacagagcatgccacacgcaacgccttgatcctgtgcgagaaggcaagccatctagaggtcccagtagctgagggcagccatgagcctctcaagggaggaaagccgcacgttgctgacttcgttcatggacctgatggcctcgggaacgtagatcttcctgatcccactatcaagaaagtggaggaaagtgctaccgacttcttggttgataaggtctcgcgatttcctggagaggtctctgtgctcgccttgggtcctctgacaaacatagcattggccatcaagaaggatccctcattcgtgaaaaacgttaagaagatcgttgtgctgggtggagcgttctttgcggctggaaatgccactccttccgctgaagcaaatatccacagtgatccggaggcagccgacatggttttcacttctggggcggacatctacgtcgttggcctcaacatcacaacgcaagtcagcttcacagataaggatctcctggagctaagaaactcgcaagggaagtacgcacagttcctatgtgatgtatgcaagttctacttggactggcacaccgagtcttatggtgctcctgtgattttcctccacgatccggtcagctttgccgcgctagttcgtccggagctgttcacgttcaagaagggcgtggtgagggtggagacgcagggcatctgcgtcgggcatacttccatggacatgttgctgaagaagtggaactcagagaacccgtggactggctactcaccgatttcggtcgcatggacggtcgatgtgcccaaggtggtcgcgtttgtgaaggagctcgtcaccaagccgtgaaccaagttaactaacgtgttgtggtctcgcgcaccagatgtgcagcaaatttgagatgtcgatatatttactcacattcgaagcactgcaaacactattatctcaatagttggttcctgtggaggattgcaaatcaatttgagatgttttaaatt

SEQ ID NO: 33103 - protein, 315 aa, Zea mays subsp. mays
  peptide (1)..(315): Ceres Seq. ID no. 12411857
  misc_feature (2)..(309): Pfam Name: Pfam Description:  Inosine-uridine preferring nucleoside hydrolase
  misc_feature (2)..(315): NCBI GI NO: 18404099 NR Description: expressed protein; protein id: At2g36310
  misc_feature (15)..(259): NCBI GI NO: 25321061 NR Description: hypothetical protein At2g36310
  misc_feature (236)..(281): NCBI GI NO: 25321061 NR Description: hypothetical protein At2g36310
  misc_feature (2)..(313): NCBI GI NO: 30089728 NR Description: putative inosine-uridine preferring nucleosidehydrolase
  misc_feature (1)..(310): NCBI GI NO: 18390550 NR Description: expressed protein; protein id: At1g05620
  misc_feature (1)..(219): NCBI GI NO: 25321071 NR Description: hypothetical protein
  misc_feature (199)..(310): NCBI GI NO: 25321071 NR Description: hypothetical protein
  misc_feature (1)..(314): NCBI GI NO: 15888904 NR Description: AGR_C_2923p [Agrobacterium tumefaciens]
  misc_feature (2)..(308): NCBI GI NO: 15966659 NR Description: PUTATIVE NUCLEOSIDE HYDROLASE PROTEIN
  misc_feature (1)..(314): NCBI GI NO: 17935486 NR Description: inosine-uridine preferring nucleoside hydrolase
MKIIIDTDPGIDDSVAILMAFQMPGVQVLGLTTIFGNCTTEHATRNALILCEKASHLEVPVAEGSHEPLKGGKPHVADFVHGPDGLGNVDLPDPTIKKVEESATDFLVDKVSRFPGEVSVLALGPLTNIALAIKKDPSFVKNVKKIVVLGGAFFAAGNATPSAEANIHSDPEAADMVFTSGADIYVVGLNITTQVSFTDKDLLELRNSQGKYAQFLCDVCKFYLDWHTESYGAPVIFLHDPVSFAALVRPELFTFKKGVVRVETQGICVGHTSMDMLLKKWNSENPWTGYSPISVAWTVDVPKVVAFVKELVTKP

SEQ ID NO: 33104 - protein, 297 aa, Zea mays subsp. mays
  peptide (1)..(297): Ceres Seq. ID no. 12411858
  misc_feature (1)..(291): Pfam Name: Pfam Description:  Inosine-uridine preferring nucleoside hydrolase
  misc_feature (1)..(297): NCBI GI NO: 18404099 NR Description: expressed protein; protein id: At2g36310
  misc_feature (1)..(241): NCBI GI NO: 25321061 NR Description: hypothetical protein At2g36310
  misc_feature (218)..(263): NCBI GI NO: 25321061 NR Description: hypothetical protein At2g36310
  misc_feature (1)..(295): NCBI GI NO: 30089728 NR Description: putative inosine-uridine preferring nucleosidehydrolase
  misc_feature (1)..(292): NCBI GI NO: 18390550 NR Description: expressed protein; protein id: At1g05620
  misc_feature (1)..(201): NCBI GI NO: 25321071 NR Description: hypothetical protein
  misc_feature (181)..(292): NCBI GI NO: 25321071 NR Description: hypothetical protein
  misc_feature (1)..(296): NCBI GI NO: 15888904 NR Description: AGR_C_2923p [Agrobacterium tumefaciens]
  misc_feature (1)..(290): NCBI GI NO: 15966659 NR Description: PUTATIVE NUCLEOSIDE HYDROLASE PROTEIN
  misc_feature (1)..(296): NCBI GI NO: 17935486 NR Description: inosine-uridine preferring nucleoside hydrolase
MAFQMPGVQVLGLTTIFGNCTTEHATRNALILCEKASHLEVPVAEGSHEPLKGGKPHVADFVHGPDGLGNVDLPDPTIKKVEESATDFLVDKVSRFPGEVSVLALGPLTNIALAIKKDPSFVKNVKKIVVLGGAFFAAGNATPSAEANIHSDPEAADMVFTSGADIYVVGLNITTQVSFTDKDLLELRNSQGKYAQFLCDVCKFYLDWHTESYGAPVIFLHDPVSFAALVRPELFTFKKGVVRVETQGICVGHTSMDMLLKKWNSENPWTGYSPISVAWTVDVPKVVAFVKELVTKP

SEQ ID NO: 33105 - protein, 293 aa, Zea mays subsp. mays
  peptide (1)..(293): Ceres Seq. ID no. 12411859
  misc_feature (1)..(287): Pfam Name: Pfam Description:  Inosine-uridine preferring nucleoside hydrolase
  misc_feature (1)..(293): NCBI GI NO: 18404099 NR Description: expressed protein; protein id: At2g36310
  misc_feature (1)..(237): NCBI GI NO: 25321061 NR Description: hypothetical protein At2g36310
  misc_feature (214)..(259): NCBI GI NO: 25321061 NR Description: hypothetical protein At2g36310
  misc_feature (1)..(291): NCBI GI NO: 30089728 NR Description: putative inosine-uridine preferring nucleosidehydrolase
  misc_feature (1)..(288): NCBI GI NO: 18390550 NR Description: expressed protein; protein id: At1g05620
  misc_feature (1)..(197): NCBI GI NO: 25321071 NR Description: hypothetical protein
  misc_feature (177)..(288): NCBI GI NO: 25321071 NR Description: hypothetical protein
  misc_feature (1)..(292): NCBI GI NO: 15888904 NR Description: AGR_C_2923p [Agrobacterium tumefaciens]
  misc_feature (1)..(286): NCBI GI NO: 15966659 NR Description: PUTATIVE NUCLEOSIDE HYDROLASE PROTEIN
  misc_feature (1)..(292): NCBI GI NO: 17935486 NR Description: inosine-uridine preferring nucleoside hydrolase
MPGVQVLGLTTIFGNCTTEHATRNALILCEKASHLEVPVAEGSHEPLKGGKPHVADFVHGPDGLGNVDLPDPTIKKVEESATDFLVDKVSRFPGEVSVLALGPLTNIALAIKKDPSFVKNVKKIVVLGGAFFAAGNATPSAEANIHSDPEAADMVFTSGADIYVVGLNITTQVSFTDKDLLELRNSQGKYAQFLCDVCKFYLDWHTESYGAPVIFLHDPVSFAALVRPELFTFKKGVVRVETQGICVGHTSMDMLLKKWNSENPWTGYSPISVAWTVDVPKVVAFVKELVTKP

SEQ ID NO: 33106 - DNA, 1549 bp, Zea mays subsp. mays; identical to SEQ ID NO: 26077
  misc_feature (1)..(1549): Ceres Seq. ID no. 12345645

SEQ ID NO: 33107 - protein, 443 aa, Zea mays subsp. mays; identical to SEQ ID NO: 26078
  peptide (1)..(443): Ceres Seq. ID no. 12345646
  misc_feature (312)..(434): Pfam Name: Pfam Description:  Transketolase, C-terminal domain
  misc_feature (100)..(442): NCBI GI NO: 15220670 NR Description: pyruvate dehydrogenase E1 beta subunit, putative
  misc_feature (100)..(442): NCBI GI NO: 2454184 NR Description: pyruvate dehydrogenase E1 beta subunit
  misc_feature (92)..(442): NCBI GI NO: 15226781 NR Description: putative pyruvate dehydrogenase E1 beta subunit
  misc_feature (92)..(442): NCBI GI NO: 21593379 NR Description: putative pyruvate dehydrogenase E1 beta subunit
  misc_feature (157)..(442): NCBI GI NO: 2982328 NR Description: pyruvate dehydrogenase E1 beta subunit
  misc_feature (122)..(442): NCBI GI NO: 22711921 NR Description: pyruvate dehydrogenase E1 component beta subunit
  misc_feature (122)..(441): NCBI GI NO: 22297748 NR Description: pyruvate dehydrogenase E1 component beta subunit
  misc_feature (122)..(443): NCBI GI NO: 23041427 NR Description: hypothetical protein
  misc_feature (122)..(443): NCBI GI NO: 17227618 NR Description: pyruvate dehydrogenase E1 beta subunit
  misc_feature (122)..(443): NCBI GI NO: 23124048 NR Description: hypothetical protein [Nostoc punctiforme]

SEQ ID NO: 33108 - protein, 383 aa, Zea mays subsp. mays; identical to SEQ ID NO: 26079
  peptide (1)..(383): Ceres Seq. ID no. 12345647
  misc_feature (252)..(374): Pfam Name: Pfam Description:  Transketolase, C-terminal domain
  misc_feature (40)..(382): NCBI GI NO: 15220670 NR Description: pyruvate dehydrogenase E1 beta subunit, putative
  misc_feature (40)..(382): NCBI GI NO: 2454184 NR Description: pyruvate dehydrogenase E1 beta subunit
  misc_feature (32)..(382): NCBI GI NO: 15226781 NR Description: putative pyruvate dehydrogenase E1 beta subunit
  misc_feature (32)..(382): NCBI GI NO: 21593379 NR Description: putative pyruvate dehydrogenase E1 beta subunit
  misc_feature (97)..(382): NCBI GI NO: 2982328 NR Description: pyruvate dehydrogenase E1 beta subunit
  misc_feature (62)..(382): NCBI GI NO: 22711921 NR Description: pyruvate dehydrogenase E1 component beta subunit
  misc_feature (62)..(381): NCBI GI NO: 22297748 NR Description: pyruvate dehydrogenase E1 component beta subunit
  misc_feature (62)..(383): NCBI GI NO: 23041427 NR Description: hypothetical protein
  misc_feature (62)..(383): NCBI GI NO: 17227618 NR Description: pyruvate dehydrogenase E1 beta subunit
  misc_feature (62)..(383): NCBI GI NO: 23124048 NR Description: hypothetical protein [Nostoc punctiforme]

SEQ ID NO: 33109 - protein, 310 aa, Zea mays subsp. mays; identical to SEQ ID NO: 26080
  peptide (1)..(310): Ceres Seq. ID no. 12345648
  misc_feature (179)..(301): Pfam Name: Pfam Description:  Transketolase, C-terminal domain
  misc_feature (1)..(309): NCBI GI NO: 15220670 NR Description: pyruvate dehydrogenase E1 beta subunit, putative
  misc_feature (1)..(309): NCBI GI NO: 2454184 NR Description: pyruvate dehydrogenase E1 beta subunit
  misc_feature (1)..(309): NCBI GI NO: 15226781 NR Description: putative pyruvate dehydrogenase E1 beta subunit
  misc_feature (1)..(309): NCBI GI NO: 21593379 NR Description: putative pyruvate dehydrogenase E1 beta subunit
  misc_feature (24)..(309): NCBI GI NO: 2982328 NR Description: pyruvate dehydrogenase E1 beta subunit
  misc_feature (1)..(309): NCBI GI NO: 22711921 NR Description: pyruvate dehydrogenase E1 component beta subunit
  misc_feature (1)..(308): NCBI GI NO: 22297748 NR Description: pyruvate dehydrogenase E1 component beta subunit
  misc_feature (1)..(310): NCBI GI NO: 23041427 NR Description: hypothetical protein
  misc_feature (1)..(310): NCBI GI NO: 17227618 NR Description: pyruvate dehydrogenase E1 beta subunit
  misc_feature (1)..(310): NCBI GI NO: 23124048 NR Description: hypothetical protein [Nostoc punctiforme]

SEQ ID NO: 33110 - DNA, 2072 bp, Zea mays subsp. mays
  misc_feature (1)..(2072): Ceres Seq. ID no. 12411849
gtcgctctcctcctcctcctcctcctcctccgtaggcaaggcaaggggggcaaggctctaacggagatcggatcgaactgcctgtgcagtctccctccctccctccctccctcatgtccatatataccaaaaaatctccgccgcgccgccattagctagctctcgtcgtcttcgttcctccgcaaataatttgttactcaagccgaaggaggacgagggcgacgggattggctaatcaaatcgaccgatctagtggctggtgcccaggagaagggacgcgggcagtgcggctcgtcgtggtcagcagcttgtggcgaccggtcgccagggaatcaatcaattcaatcagaaagttgcaattttgattgagctcgattcgtcatccacaagacattagggaatcgaaccaccacaaagcaagaaggcagtccagtgcagagagagagagagagaccaagaagagaaagagaaagggaaagagaagcaaagcaatggatccaccgcatcaccgtgctgtgctgcggcggcctcgtcctcctcctccctcctgccctttttataggccgcctccgcttcgtcgtcttggcaagacctgcccccgcgcctgcaatcctacgacaacagggcgccgctcctcctgcccgtcaagatcatggacaccgccgccgacgacaagccggaaatctccgacgatacggcccaccagattagcgttgatccttggtatcaagttggcttcgtcctcacaaccggggtcaacagcgcatacgttctaggatactctggatcaatcatggtccctctaggctggatcggcggcacatgcggcctcctcctagctgccgccatatccatgtacgctaatgctcttcttgcacggcttcatgaagtcggtggcaaacgccatatcagatacagagaccttgctggacacatatatggaccgaaaatttacgggcttacatgggctctgcagtacattaaccttttcatgatcaacactggctttatcatcttagctggacaagctctcaaggccacgtatggactgttcagtgatgatggagttctgaaactcccttactgcattgcgatatcaggattcgtctgtgctcttttcgccattggaatcccttatttatctgccctcaggatttggttggggttctccacgcttttcagcctcatgtatattgtgatagcagttgtgctgtcgtcgagagatgggataaccgcacctgcaagggattacagcatccccaaatcatcgcagtcaactcgagtcttcactacgataggttccatagcagaccttgtgtttgcttacaacaccggcatgctgccagaaattcaggcaaccatcaggcctcctgtggtgaagaacatggagaaagctctatggttccagttcaccattggctccttgcctctctatgctgtagtttttgtgggttactgggcttatgggtcctcaacatcaggctacctcctcaacagtgtcacaggcccagtctgggtgaaagcggttgcaaatctgtcggcattttttcagacagtcatagcgctgcacatctttgctagccccatgtatgaattcctggacacaaaatatggaagtgggcgtggccccttttgagatccacaacgtggcgttcagagtagcagtcagaggaggctacctgacggtgaacacgctggtggccgcggtgctcccattcctcggcgacttcatgagcctgacgggcgccctcagcaccttcccgctgacgtttgtgctcgcaaatcacatgtacctgatggtgaaggggcctaagctgggtgccatccagaaatcatggcactggctcaatgttcttgggttcactgcgctggctgttgcagcggcggtctccgcaataaggctcatcatgcgtgattccagcacctaccacttcttcgctgatctttgagatcgatcgttttcttttctttttgttggaatgctgagccagagctagtattttttcattttcagagaattattatccatgtatgtaaggatgacgcatatatatatattgaatagatgattt

SEQ ID NO: 33111 - protein, 327 aa, Zea mays subsp. mays
  peptide (1)..(327): Ceres Seq. ID no. 12411850
  misc_feature (1)..(327): NCBI GI NO: 11358960 NR Description: proline transport protein [imported] - rice
  misc_feature (6)..(327): NCBI GI NO: 16215723 NR Description: proline transporter
  misc_feature (6)..(327): NCBI GI NO: 15225591 NR Description: proline transporter 1; protein id: At2g39890
  misc_feature (6)..(327): NCBI GI NO: 21593453 NR Description: proline transporter 1 [Arabidopsis thaliana]
  misc_feature (14)..(321): NCBI GI NO: 8571474 NR Description: proline/glycine betaine transporter
  misc_feature (14)..(326): NCBI GI NO: 15228183 NR Description: proline transporter 2; protein id: At3g55740
  misc_feature (14)..(321): NCBI GI NO: 21069018 NR Description: betaine/proline transporter [Avicennia marina]
  misc_feature (1)..(326): NCBI GI NO: 21554196 NR Description: putative proline transporter
  misc_feature (14)..(326): NCBI GI NO: 15228000 NR Description: putative proline transporter; protein id:At2g36590
  misc_feature (5)..(321): NCBI GI NO: 21069020 NR Description: betaine/proline transporter [Avicennia marina]
MDTAADDKPEISDDTAHQISVDPWYQVGFVLTTGVNSAYVLGYSGSIMVPLGWIGGTCGLLLAAAISMYANALLARLHEVGGKRHIRYRDLAGHIYGPKIYGLTWALQYINLFMINTGFIILAGQALKATYGLFSDDGVLKLPYCIAISGFVCALFAIGIPYLSALRIWLGFSTLFSLMYIVIAVVLSSRDGITAPARDYSIPKSSQSTRVFTTIGSIADLVFAYNTGMLPEIQATIRPPVVKNMEKALWFQFTIGSLPLYAVVFVGYWAYGSSTSGYLLNSVTGPVWVKAVANLSAFFQTVIALHIFASPMYEFLDTKYGSGRGPF

SEQ ID NO: 33112 - protein, 280 aa, Zea mays subsp. mays
  peptide (1)..(280): Ceres Seq. ID no. 12411851
  misc_feature (1)..(280): NCBI GI NO: 11358960 NR Description: proline transport protein [imported] - rice
  misc_feature (1)..(280): NCBI GI NO: 16215723 NR Description: proline transporter
  misc_feature (1)..(280): NCBI GI NO: 15225591 NR Description: proline transporter 1; protein id: At2g39890
  misc_feature (1)..(280): NCBI GI NO: 21593453 NR Description: proline transporter 1 [Arabidopsis thaliana]
  misc_feature (1)..(274): NCBI GI NO: 8571474 NR Description: proline/glycine betaine transporter
  misc_feature (1)..(279): NCBI GI NO: 15228183 NR Description: proline transporter 2; protein id: At3g55740
  misc_feature (1)..(274): NCBI GI NO: 21069018 NR Description: betaine/proline transporter [Avicennia marina]
  misc_feature (1)..(279): NCBI GI NO: 21554196 NR Description: putative proline transporter
  misc_feature (1)..(279): NCBI GI NO: 15228000 NR Description: putative proline transporter; protein id:At2g36590
  misc_feature (1)..(274): NCBI GI NO: 21069020 NR Description: betaine/proline transporter [Avicennia marina]
MVPLGWIGGTCGLLLAAAISMYANALLARLHEVGGKRHIRYRDLAGHIYGPKIYGLTWALQYINLFMINTGFIILAGQALKATYGLFSDDGVLKLPYCIAISGFVCALFAIGIPYLSALRIWLGFSTLFSLMYIVIAVVLSSRDGITAPARDYSIPKSSQSTRVFTTIGSIADLVFAYNTGMLPEIQATIRPPVVKNMEKALWFQFTIGSLPLYAVVFVGYWAYGSSTSGYLLNSVTGPVWVKAVANLSAFFQTVIALHIFASPMYEFLDTKYGSGRGPF

SEQ ID NO: 33113 - protein, 260 aa, Zea mays subsp. mays
  peptide (1)..(260): Ceres Seq. ID no. 12411852
  misc_feature (1)..(260): NCBI GI NO: 11358960 NR Description: proline transport protein [imported] - rice
  misc_feature (1)..(260): NCBI GI NO: 16215723 NR Description: proline transporter
  misc_feature (1)..(260): NCBI GI NO: 15225591 NR Description: proline transporter 1; protein id: At2g39890
  misc_feature (1)..(260): NCBI GI NO: 21593453 NR Description: proline transporter 1 [Arabidopsis thaliana]
  misc_feature (1)..(254): NCBI GI NO: 8571474 NR Description: proline/glycine betaine transporter
  misc_feature (1)..(259): NCBI GI NO: 15228183 NR Description: proline transporter 2; protein id: At3g55740
  misc_feature (1)..(254): NCBI GI NO: 21069018 NR Description: betaine/proline transporter [Avicennia marina]
  misc_feature (1)..(259): NCBI GI NO: 21554196 NR Description: putative proline transporter
  misc_feature (1)..(259): NCBI GI NO: 15228000 NR Description: putative proline transporter; protein id:At2g36590
  misc_feature (1)..(254): NCBI GI NO: 21069020 NR Description: betaine/proline transporter [Avicennia marina]
MYANALLARLHEVGGKRHIRYRDLAGHIYGPKIYGLTWALQYINLFMINTGFIILAGQALKATYGLFSDDGVLKLPYCIAISGFVCALFAIGIPYLSALRIWLGFSTLFSLMYIVIAVVLSSRDGITAPARDYSIPKSSQSTRVFTTIGSIADLVFAYNTGMLPEIQATIRPPVVKNMEKALWFQFTIGSLPLYAVVFVGYWAYGSSTSGYLLNSVTGPVWVKAVANLSAFFQTVIALHIFASPMYEFLDTKYGSGRGPF

SEQ ID NO: 33114 - DNA, 1913 bp, Zea mays subsp. mays
  misc_feature (1)..(1913): Ceres Seq. ID no. 12374119
aattccgtccacagaagaagaatccttctcgacgccgcccccattcattcttggagggcaagaagaacgcgcagtccaaaagcgaaacaaggggaaggggcgaggcagccaaacgaatcccagcacctgcctctcctttgcttgcgcagatctagcgatggcggcgggcggtgagttggcgtggggggaggagcccgtggcgcggcgccggcctaagaccaagatcgtctgcacgctcggcccggcgtcgcgatccgtcgagatgatctcgcgcctgctgcgcgccgggatgtgcgtcgcgcgcttcaacttctcccatggctcccacgagtaccaccaggagacgctcgacaacctgcacgccgccatggagctcaccgggatcctctgcgccgttatgctcgacaccaagggtccagagattagaactggatttttgaaagatgggaatcctattcaattgataaaaggccaagaaatcacaatttctacagactatagcattcagggtgatgagaaaatgatatcaatgagctacaagaagcttgctgttgatctgaagccaggcagtgtcatattgtgtgctgatggtaccatcactcttactgttcttcactgtgataaagaacaaggcttggttcgctgccgctgtgagaacactttcaagcttggcgagaggaagaatgttaatcttccaggagttattgttgatctccccacactcacagacaaggacaaggaggacatccttaaatggggtgttccaaacaagattgacatgattgccttgtcatttgttcggaagggttcggatcttgtggaggttaggaaggtacttggtgagcatgccaagtccataatgctgatgtcaaaggttgagaatcaagagggagtagctaactttgatgatatcctggcaaactctgatgcttttatggtggcaagaggtgatttaggaatggaaattcctatagagaagattttctttgcacagaaggtgatgattttcaagtgcaatattcaaggcaagcctgttgtgactgcaacccagatgttggaatctatgatcaagtctcctcgccctactcgggcagaagcaacggatgttgcaaacgcagttcttgatggcacagactgtgttatgctcagtggtgagactgctgctggggcttatccagagttggcggtgcagactatggctaagatctgcctgcaagcagagtcttgcgtagaccatgctgctattttcaaatcaatcatggcttcagctccaattccaatgagtccattggagagccttgcatcatcagctgttcgcacagcaaactctgccagggcagcacttatcttggtcctgaccaggggaggaactactgctaggcttgtagccaagtataggccatccatgccgattctgtccgttgtggttcctgagctgaagacagactcgttcgactgggcctgcagtgacgagggtccggcaaggcacagcctcattgtgaggggtgtcatcccaatgctgagtgccgccactgccaaggcctttgacaacgaagccactgacgaagctattggttttgccattgaaaatgcgaagacgatggggctatgcaacaccggtcaatccgttgtggccctgcaccgcatcgggatttcatccgtcatcaagcttcttactgtgaagtaggggtccaagggtgagggacaccattttgcttggtgaatttttgtgaggctgcttacgcacatcagcgtatccacagcttttctgttgccaaagatacagactttgcgttctggtacaccttggtgttacaagggttgtgggaatttgtcgtttagatattagcgatttaaacagtttatcaactgctatagctaattaatttgcagctgtgctgcaactttatcgt

SEQ ID NO: 33115 - protein, 561 aa, Zea mays subsp. mays
  peptide (1)..(561): Ceres Seq. ID no. 12374120
  misc_feature (430)..(559): Pfam Name: Pfam Description:  Pyruvate kinase, alpha/beta domain
  misc_feature (69)..(561): NCBI GI NO: 2497543 NR Description: Pyruvate kinase, cytosolic isozyme
  misc_feature (69)..(561): NCBI GI NO: 15241190 NR Description: pyruvate kinase; protein id: At5g56350
  misc_feature (69)..(561): NCBI GI NO: 15236190 NR Description: pyruvate kinase like protein; protein id:At4g26390
  misc_feature (63)..(561): NCBI GI NO: 15242313 NR Description: pyruvate kinase; protein id: At5g08570.1
  misc_feature (63)..(561): NCBI GI NO: 22296818 NR Description: pyruvate kinase [Glycine max]
  misc_feature (63)..(561): NCBI GI NO: 15242863 NR Description: pyruvate kinase; protein id: At5g63680.1
  misc_feature (63)..(561): NCBI GI NO: 22296820 NR Description: pyruvate kinase [Glycine max]
  misc_feature (63)..(561): NCBI GI NO: 2497538 NR Description: Pyruvate kinase, cytosolic isozyme
  misc_feature (69)..(561): NCBI GI NO: 322787 NR Description: pyruvate kinase (EC 2.7.1.40), cytosolic - potato
  misc_feature (59)..(561): NCBI GI NO: 15230952 NR Description: putative pyruvate kinase; protein id: At3g25960.1
IPSTEEESFSTPPPFILGGQEERAVQKRNKGKGRGSQTNPSTCLSFACADLAMAAGGELAWGEEPVARRRPKTKIVCTLGPASRSVEMISRLLRAGMCVARFNFSHGSHEYHQETLDNLHAAMELTGILCAVMLDTKGPEIRTGFLKDGNPIQLIKGQEITISTDYSIQGDEKMISMSYKKLAVDLKPGSVILCADGTITLTVLHCDKEQGLVRCRCENTFKLGERKNVNLPGVIVDLPTLTDKDKEDILKWGVPNKIDMIALSFVRKGSDLVEVRKVLGEHAKSIMLMSKVENQEGVANFDDILANSDAFMVARGDLGMEIPIEKIFFAQKVMIFKCNIQGKPVVTATQMLESMIKSPRPTRAEATDVANAVLDGTDCVMLSGETAAGAYPELAVQTMAKICLQAESCVDHAAIFKSIMASAPIPMSPLESLASSAVRTANSARAALILVLTRGGTTARLVAKYRPSMPILSVVVPELKTDSFDWACSDEGPARHSLIVRGVIPMLSAATAKAFDNEATDEAIGFAIENAKTMGLCNTGQSVVALHRIGISSVIKLLTVK

SEQ ID NO: 33116 - protein, 509 aa, Zea mays subsp. mays
  peptide (1)..(509): Ceres Seq. ID no. 12374121
  misc_feature (378)..(507): Pfam Name: Pfam Description:  Pyruvate kinase, alpha/beta domain
  misc_feature (17)..(509): NCBI GI NO: 2497543 NR Description: Pyruvate kinase, cytosolic isozyme
  misc_feature (17)..(509): NCBI GI NO: 15241190 NR Description: pyruvate kinase; protein id: At5g56350
  misc_feature (17)..(509): NCBI GI NO: 15236190 NR Description: pyruvate kinase like protein; protein id:At4g26390
  misc_feature (11)..(509): NCBI GI NO: 15242313 NR Description: pyruvate kinase; protein id: At5g08570.1
  misc_feature (11)..(509): NCBI GI NO: 22296818 NR Description: pyruvate kinase [Glycine max]
  misc_feature (11)..(509): NCBI GI NO: 15242863 NR Description: pyruvate kinase; protein id: At5g63680.1
  misc_feature (11)..(509): NCBI GI NO: 22296820 NR Description: pyruvate kinase [Glycine max]
  misc_feature (11)..(509): NCBI GI NO: 2497538 NR Description: Pyruvate kinase, cytosolic isozyme
  misc_feature (17)..(509): NCBI GI NO: 322787 NR Description: pyruvate kinase (EC 2.7.1.40), cytosolic - potato
  misc_feature (7)..(509): NCBI GI NO: 15230952 NR Description: putative pyruvate kinase; protein id: At3g25960.1
MAAGGELAWGEEPVARRRPKTKIVCTLGPASRSVEMISRLLRAGMCVARFNFSHGSHEYHQETLDNLHAAMELTGILCAVMLDTKGPEIRTGFLKDGNPIQLIKGQEITISTDYSIQGDEKMISMSYKKLAVDLKPGSVILCADGTITLTVLHCDKEQGLVRCRCENTFKLGERKNVNLPGVIVDLPTLTDKDKEDILKWGVPNKIDMIALSFVRKGSDLVEVRKVLGEHAKSIMLMSKVENQEGVANFDDILANSDAFMVARGDLGMEIPIEKIFFAQKVMIFKCNIQGKPVVTATQMLESMIKSPRPTRAEATDVANAVLDGTDCVMLSGETAAGAYPELAVQTMAKICLQAESCVDHAAIFKSIMASAPIPMSPLESLASSAVRTANSARAALILVLTRGGTTARLVAKYRPSMPILSVVVPELKTDSFDWACSDEGPARHSLIVRGVIPMLSAATAKAFDNEATDEAIGFAIENAKTMGLCNTGQSVVALHRIGISSVIKLLTVK

SEQ ID NO: 33117 - protein, 474 aa, Zea mays subsp. mays
  peptide (1)..(474): Ceres Seq. ID no. 12374122
  misc_feature (343)..(472): Pfam Name: Pfam Description:  Pyruvate kinase, alpha/beta domain
  misc_feature (1)..(474): NCBI GI NO: 2497543 NR Description: Pyruvate kinase, cytosolic isozyme
  misc_feature (1)..(474): NCBI GI NO: 15241190 NR Description: pyruvate kinase; protein id: At5g56350
  misc_feature (1)..(474): NCBI GI NO: 15236190 NR Description: pyruvate kinase like protein; protein id:At4g26390
  misc_feature (1)..(474): NCBI GI NO: 15242313 NR Description: pyruvate kinase; protein id: At5g08570.1
  misc_feature (1)..(474): NCBI GI NO: 22296818 NR Description: pyruvate kinase [Glycine max]
  misc_feature (1)..(474): NCBI GI NO: 15242863 NR Description: pyruvate kinase; protein id: At5g63680.1
  misc_feature (1)..(474): NCBI GI NO: 22296820 NR Description: pyruvate kinase [Glycine max]
  misc_feature (1)..(474): NCBI GI NO: 2497538 NR Description: Pyruvate kinase, cytosolic isozyme
  misc_feature (1)..(474): NCBI GI NO: 322787 NR Description: pyruvate kinase (EC 2.7.1.40), cytosolic - potato
  misc_feature (1)..(474): NCBI GI NO: 15230952 NR Description: putative pyruvate kinase; protein id: At3g25960.1
MISRLLRAGMCVARFNFSHGSHEYHQETLDNLHAAMELTGILCAVMLDTKGPEIRTGFLKDGNPIQLIKGQEITISTDYSIQGDEKMISMSYKKLAVDLKPGSVILCADGTITLTVLHCDKEQGLVRCRCENTFKLGERKNVNLPGVIVDLPTLTDKDKEDILKWGVPNKIDMIALSFVRKGSDLVEVRKVLGEHAKSIMLMSKVENQEGVANFDDILANSDAFMVARGDLGMEIPIEKIFFAQKVMIFKCNIQGKPVVTATQMLESMIKSPRPTRAEATDVANAVLDGTDCVMLSGETAAGAYPELAVQTMAKICLQAESCVDHAAIFKSIMASAPIPMSPLESLASSAVRTANSARAALILVLTRGGTTARLVAKYRPSMPILSVVVPELKTDSFDWACSDEGPARHSLIVRGVIPMLSAATAKAFDNEATDEAIGFAIENAKTMGLCNTGQSVVALHRIGISSVIKLLTVK

SEQ ID NO: 33118 - DNA, 1107 bp, Zea mays subsp. mays
  misc_feature (1)..(1107): Ceres Seq. ID no. 12566683
gcacgagaccattacctagaacatcctaatcgaaaagtctcatcagtcatcacccaccgcctccgccgccgacaacagcgtagtgtagtgtagttccggagagggttggggagagtagtagtgatccgcaatgtcgacggaggaggctgttgtggctgaggtcccggtgaccgaggtgccagcggaggtcccggcggcccaggtggccgaggcgcccaaggcgaagaaggcgcccaaggagaagaaggcgcctaaggagaagaagctttccgcggcgaagaagccggcggcgcaccctccctacgctgagatgattgtagaggcgatcgctgccctcaaggagaggaaggggtcgagctcggtggccatcagcaagtacgtcgaggggaagcatggcggcaagctccccaccaacttccgcaagcagctcactgtgcagctgaagaagctcgctgccgccggcaagctgacgagggtgaagaactccttcaagctgccggccaccgacgccaagcccaaggccgccaagcccaaggcacccaaggccgcgcccaagcccaagccctcgccgaaggcgaaggccaagaccgcttcgaagcccaaggcggcgtcgcccaaacccaaggccaaggccaaggccaagcctgtcgctcctgccgccgcgtcgcccaagccccgcgggcgccctcccaaggtcgccaagacctccgccaaggcctcccccgccaaggcagccaagaaggcggctgctcctgccaagaagggaaaggcagcggcggctcctaagaaggtggcaaccccgaagaaggctgctgctgctgccgccccggccaggaagggcgtggccaggaaggccaagaagtagtctgcctgccttgtcgctggcgagatccccccctcaattccgcctatagattcccctctttcatggattttgatccaatcgtaatattgtcagtagctctagattcgtcggtagctccagcatgagtgtcggtggtagttctgtgcctgtaaaaacttgggatagttgatcgcgtgtgatcagccgtcatgctcctccagtctctatgaacaagctaagctataatagtattttgctatccc

SEQ ID NO: 33119 - protein, 244 aa, Zea mays subsp. mays
  peptide (1)..(244): Ceres Seq. ID no. 12566684
  misc_feature (54)..(124): Pfam Name: Pfam Description:  linker histone H1 and H5 family
  misc_feature (1)..(244): NCBI GI NO: 18463959 NR Description: histone H1-like protein [Zea mays]
  misc_feature (1)..(244): NCBI GI NO: 34897182 NR Description: histone-like protein
  misc_feature (1)..(244): NCBI GI NO: 5230790 NR Description: histone H1 WH1A.4 [Triticum aestivum]
  misc_feature (1)..(244): NCBI GI NO: 5230783 NR Description: histone H1 WH1A.2 [Triticum aestivum]
  misc_feature (3)..(244): NCBI GI NO: 25553627 NR Description: putative histone H1
  misc_feature (1)..(244): NCBI GI NO: 11558848 NR Description: histone H1 [Triticum aestivum]
  misc_feature (1)..(244): NCBI GI NO: 14916992 NR Description: HISTONE H1
  misc_feature (1)..(242): NCBI GI NO: 5230785 NR Description: histone H1 WH1B.1 [Triticum aestivum]
  misc_feature (1)..(244): NCBI GI NO: 5230781 NR Description: histone H1 WH1A.1 [Triticum aestivum]
  misc_feature (1)..(241): NCBI GI NO: 7439660 NR Description: histone H1 (clone TH32) - wheat
MSTEEAVVAEVPVTEVPAEVPAAQVAEAPKAKKAPKEKKAPKEKKLSAAKKPAAHPPYAEMIVEAIAALKERKGSSSVAISKYVEGKHGGKLPTNFRKQLTVQLKKLAAAGKLTRVKNSFKLPATDAKPKAAKPKAPKAAPKPKPSPKAKAKTASKPKAASPKPKAKAKAKPVAPAAASPKPRGRPPKVAKTSAKASPAKAAKKAAAPAKKGKAAAAPKKVATPKKAAAAAAPARKGVARKAKK

SEQ ID NO: 33120 - protein, 184 aa, Zea mays subsp. mays
  peptide (1)..(184): Ceres Seq. ID no. 12566685
  misc_feature (1)..(64): Pfam Name: Pfam Description:  linker histone H1 and H5 family
  misc_feature (1)..(184): NCBI GI NO: 18463959 NR Description: histone H1-like protein [Zea mays]
  misc_feature (1)..(184): NCBI GI NO: 34897182 NR Description: histone-like protein
  misc_feature (1)..(184): NCBI GI NO: 5230790 NR Description: histone H1 WH1A.4 [Triticum aestivum]
  misc_feature (1)..(184): NCBI GI NO: 5230783 NR Description: histone H1 WH1A.2 [Triticum aestivum]
  misc_feature (1)..(184): NCBI GI NO: 25553627 NR Description: putative histone H1
  misc_feature (1)..(184): NCBI GI NO: 11558848 NR Description: histone H1 [Triticum aestivum]
  misc_feature (1)..(184): NCBI GI NO: 14916992 NR Description: HISTONE H1
  misc_feature (1)..(182): NCBI GI NO: 5230785 NR Description: histone H1 WH1B.1 [Triticum aestivum]
  misc_feature (1)..(184): NCBI GI NO: 5230781 NR Description: histone H1 WH1A.1 [Triticum aestivum]
  misc_feature (1)..(181): NCBI GI NO: 7439660 NR Description: histone H1 (clone TH32) - wheat
MIVEAIAALKERKGSSSVAISKYVEGKHGGKLPTNFRKQLTVQLKKLAAAGKLTRVKNSFKLPATDAKPKAAKPKAPKAAPKPKPSPKAKAKTASKPKAASPKPKAKAKAKPVAPAAASPKPRGRPPKVAKTSAKASPAKAAKKAAAPAKKGKAAAAPKKVATPKKAAAAAAPARKGVARKAKK

SEQ ID NO: 33121 - DNA, 1427 bp, Zea mays subsp. mays
  misc_feature (1)..(1427): Ceres Seq. ID no. 12376372
gcacgagaccattacctagaacatcctaatcgaaaaagtttcaaatctcaaatcctcatcgttctcctttccccaaaggccaaaaccgaccccgctccacgcctccactccagccccagcggatcttctcgagcggcggccggcgatggcagcgagcaacatcgggatgatggacggagcctacttcgtcgggcgcaacgagatcctcgcgtggatcaacactacgctgcacctcggcctctccaaggtggaggaggcggcgtcagtcgcggttgcgtgccaactgatggacgcggcgcatcccggcgccgtgccgatgcacaaggtcaacttcgacgccaagacggagtacgacatgatccagaactacaaggtcctgcaggatgtgttcaacaagctcaagatcactaagcatatagaggtgaacaagctaatcaaaggaagaccccttgacaatctggagttcatgcagtggatgaaacgatattgtgattctgtcaatggtggcttcatgagcagctacaatgcttctgagagaagggaaagcagcaaagggggaaaggagacgaacagaagggcatcggtgccctctcacacaccggccaagtctgcatccacaggtcacaaggctcaagcatcacatggcgctaagcgggcaagcgggcagacggcgggtgcaccacagcgcagtgctaagccatcacctgtagccaactctagtggaccagcttatgacgaacaaataactgagctgaagctccttgtggatagcctggagaaggagagagatttctacttttccaagctgcgggacattgagatcttgtgccaaaaccctgaggttgagcacgtgccggtccatgctatccagaacatactctacacatcagaggaggaccctcagcagcaggctccagccctgagccccatcatggaggcgtccgaggagaggccgaagcaagaggcggcgcacaagagaaagagcatctcggacctggacgagtttggtatgtcgtccagctcaaggcagaggctctccgacatctcggacgtgcagctgtgtggatccccgctgacgagtttcagctaaagaaactgtcatctctacaaaatgggtgtctcgtctttctgttggattggttcgtggtttcgtatttcatgtgttgtttggtggtgaactgtcgtgtgctcttagcaaagtgtgacacatttagccacgaaccaaacagcctcttagtctgtgaccagagcgcatgacctcgtctactaatttctctctcagaatcagcttttttttcgtacctattgcgcatcagttgatttttccttctctcttttctttttggccgtatttcatcaggttgcatataaaaaaagtaagatctactggttctggcgttcggctataatgggatctttgatcaggc

SEQ ID NO: 33122 - protein, 314 aa, Zea mays subsp. mays
  peptide (1)..(314): Ceres Seq. ID no. 12376373
  misc_feature (16)..(116): Pfam Name: CH Pfam Description: Calponin homology
  misc_feature (1)..(303): NCBI GI NO: 37535740 NR Description: putative microtubule-associated protein
  misc_feature (3)..(308): NCBI GI NO: 15240262 NR Description: putative protein; protein id: At5g67270
  misc_feature (1)..(267): NCBI GI NO: 38344911 NR Description: OSJNBb0079B02.14
  misc_feature (3)..(249): NCBI GI NO: 32815913 NR Description: At3g47690 [Arabidopsis thaliana]
  misc_feature (3)..(273): NCBI GI NO: 15241860 NR Description: microtubule-associated protein EB1-like protein
  misc_feature (4)..(250): NCBI GI NO: 29124955 NR Description: microtubule-associated protein EB1
  misc_feature (3)..(180): NCBI GI NO: 26450360 NR Description: putative microtubule-associated protein EB1
  misc_feature (15)..(250): NCBI GI NO: 12751131 NR Description: EBF3-S [Homo sapiens]
  misc_feature (15)..(250): NCBI GI NO: 10800412 NR Description: microtubule-associated protein
  misc_feature (15)..(250): NCBI GI NO: 12751130 NR Description: EBF3-L [Homo sapiens]
MAASNIGMMDGAYFVGRNEILAWINTTLHLGLSKVEEAASVAVACQLMDAAHPGAVPMHKVNFDAKTEYDMIQNYKVLQDVFNKLKITKHIEVNKLIKGRPLDNLEFMQWMKRYCDSVNGGFMSSYNASERRESSKGGKETNRRASVPSHTPAKSASTGHKAQASHGAKRASGQTAGAPQRSAKPSPVANSSGPAYDEQITELKLLVDSLEKERDFYFSKLRDIEILCQNPEVEHVPVHAIQNILYTSEEDPQQQAPALSPIMEASEERPKQEAAHKRKSISDLDEFGMSSSSRQRLSDISDVQLCGSPLTSFS

SEQ ID NO: 33123 - protein, 307 aa, Zea mays subsp. mays
  peptide (1)..(307): Ceres Seq. ID no. 12376374
  misc_feature (9)..(109): Pfam Name: CH Pfam Description: Calponin homology
  misc_feature (1)..(296): NCBI GI NO: 37535740 NR Description: putative microtubule-associated protein
  misc_feature (1)..(301): NCBI GI NO: 15240262 NR Description: putative protein; protein id: At5g67270
  misc_feature (1)..(260): NCBI GI NO: 38344911 NR Description: OSJNBb0079B02.14
  misc_feature (1)..(242): NCBI GI NO: 32815913 NR Description: At3g47690 [Arabidopsis thaliana]
  misc_feature (1)..(266): NCBI GI NO: 15241860 NR Description: microtubule-associated protein EB1-like protein
  misc_feature (1)..(243): NCBI GI NO: 29124955 NR Description: microtubule-associated protein EB1
  misc_feature (1)..(173): NCBI GI NO: 26450360 NR Description: putative microtubule-associated protein EB1
  misc_feature (8)..(243): NCBI GI NO: 12751131 NR Description: EBF3-S [Homo sapiens]
  misc_feature (8)..(243): NCBI GI NO: 10800412 NR Description: microtubule-associated protein
  misc_feature (8)..(243): NCBI GI NO: 12751130 NR Description: EBF3-L [Homo sapiens]
MMDGAYFVGRNEILAWINTTLHLGLSKVEEAASVAVACQLMDAAHPGAVPMHKVNFDAKTEYDMIQNYKVLQDVFNKLKITKHIEVNKLIKGRPLDNLEFMQWMKRYCDSVNGGFMSSYNASERRESSKGGKETNRRASVPSHTPAKSASTGHKAQASHGAKRASGQTAGAPQRSAKPSPVANSSGPAYDEQITELKLLVDSLEKERDFYFSKLRDIEILCQNPEVEHVPVHAIQNILYTSEEDPQQQAPALSPIMEASEERPKQEAAHKRKSISDLDEFGMSSSSRQRLSDISDVQLCGSPLTSFS

SEQ ID NO: 33124 - protein, 306 aa, Zea mays subsp. mays
  peptide (1)..(306): Ceres Seq. ID no. 12376375
  misc_feature (8)..(108): Pfam Name: CH Pfam Description: Calponin homology
  misc_feature (1)..(295): NCBI GI NO: 37535740 NR Description: putative microtubule-associated protein
  misc_feature (1)..(300): NCBI GI NO: 15240262 NR Description: putative protein; protein id: At5g67270
  misc_feature (1)..(259): NCBI GI NO: 38344911 NR Description: OSJNBb0079B02.14
  misc_feature (1)..(241): NCBI GI NO: 32815913 NR Description: At3g47690 [Arabidopsis thaliana]
  misc_feature (1)..(265): NCBI GI NO: 15241860 NR Description: microtubule-associated protein EB1-like protein
  misc_feature (1)..(242): NCBI GI NO: 29124955 NR Description: microtubule-associated protein EB1
  misc_feature (1)..(172): NCBI GI NO: 26450360 NR Description: putative microtubule-associated protein EB1
  misc_feature (7)..(242): NCBI GI NO: 12751131 NR Description: EBF3-S [Homo sapiens]
  misc_feature (7)..(242): NCBI GI NO: 10800412 NR Description: microtubule-associated protein
  misc_feature (7)..(242): NCBI GI NO: 12751130 NR Description: EBF3-L [Homo sapiens]
MDGAYFVGRNEILAWINTTLHLGLSKVEEAASVAVACQLMDAAHPGAVPMHKVNFDAKTEYDMIQNYKVLQDVFNKLKITKHIEVNKLIKGRPLDNLEFMQWMKRYCDSVNGGFMSSYNASERRESSKGGKETNRRASVPSHTPAKSASTGHKAQASHGAKRASGQTAGAPQRSAKPSPVANSSGPAYDEQITELKLLVDSLEKERDFYFSKLRDIEILCQNPEVEHVPVHAIQNILYTSEEDPQQQAPALSPIMEASEERPKQEAAHKRKSISDLDEFGMSSSSRQRLSDISDVQLCGSPLTSFS

SEQ ID NO: 33125 - DNA, 1206 bp, Zea mays subsp. mays
  misc_feature (1)..(1206): Ceres Seq. ID no. 12411839
gtgcctcggcccaagtgctaacgcccaactgccaaggcggggaggggggatccggtgcgcgcgcgcgcggaaatgaacaccggctgattagtaggtgggagatcgaggtcgcgcccttgccccacacgccactaaaggccgcgccgacgggctcatcaggcgctctggacgggctcgcttctgccgctccgcgcttgtgcggtgggtgaagtgctgctgctggtgcgggaagcgtcgccaaacgtgcagaccttggtgggggagcgaggagtcgaaacaagggtaagaaccatgagtgaaacagggcacactgtacaagtcactaacctctcgagcagagtatctgaaagtgatctttatgagttcttttcgttctctggccctattgaacatgttgaacttatcagatcaggagaatacggtgctactgcttatgtgacattcaaggagcgctttgccttggaaactgcggtattgctcagtggagctactattgtggatcagccggtatgcataacttattggggacaacctgaggagacttttaatttctgggacaggccaacttgggaggttgaagaggaaattgaatacacgagttatcaatcatgccagtacaacactactccgcaggaagctcttacagtggctcaagatatcgtgaagacgatgctagcaaaggggtacgtgctcagcaaggacgctttggctaaggctagagcctttgatgagtcccgcggattaacagctgcagctgcagccaaggctgcagagctgagcaagagaattggtttaactgacagggtcagtgctggtgtcggtgcaatgcgatcggtcgatgagacatatcgcgtaacggagacgaccaagacggtagctactgccactggaataactgcagctaaggtggtaaatggtatcgtcaccagcagctacttctctgcaggagccatgatgttgtctgatgctcttactagggctgccaaggccgcggctgatctggccgctcatggcagacagagttaagtgaaaaacaaaacatacaatccatcctttttcagttactaaacatgaggacgaacaccttaataggatgcttgaagtgttgttgttcgatgtatatttataacagacaacattgttgatttgttgtataaattaaaaggagacgtacactgcgtttgcactaataagtttgattattgc

SEQ ID NO: 33126 - protein, 244 aa, Zea mays subsp. mays
  peptide (1)..(244): Ceres Seq. ID no. 12411840
  misc_feature (8)..(76): Pfam Name: a.k.a. RRM, RBD, or RNP domain Pfam Description: RNA recognition motif.
  misc_feature (1)..(244): NCBI GI NO: 38344906 NR Description: OSJNBb0079B02.9
  misc_feature (5)..(243): NCBI GI NO: 18394102 NR Description: RRM-containing protein; protein id: At1g14340
  misc_feature (5)..(243): NCBI GI NO: 21618045 NR Description: unknown [Arabidopsis thaliana]
  misc_feature (5)..(239): NCBI GI NO: 25518024 NR Description: F14L17.11 protein - Arabidopsis thaliana
  misc_feature (1)..(241): NCBI GI NO: 6714467 NR Description: unknown protein [Arabidopsis thaliana]
  misc_feature (7)..(243): NCBI GI NO: 18414951 NR Description: RRM-containing protein; protein id: At4g17720
  misc_feature (7)..(239): NCBI GI NO: 18071362 NR Description: putative splicing regulatory protein
  misc_feature (7)..(237): NCBI GI NO: 34897896 NR Description: ESTs D15336
  misc_feature (2)..(243): NCBI GI NO: 38347069 NR Description: OSJNBa0006A01.10
  misc_feature (7)..(243): NCBI GI NO: 8809670 NR Description: gene_id:MSD23
MSETGHTVQVTNLSSRVSESDLYEFFSFSGPIEHVELIRSGEYGATAYVTFKERFALETAVLLSGATIVDQPVCITYWGQPEETFNFWDRPTWEVEEEIEYTSYQSCQYNTTPQEALTVAQDIVKTMLAKGYVLSKDALAKARAFDESRGLTAAAAAKAAELSKRIGLTDRVSAGVGAMRSVDETYRVTETTKTVATATGITAAKVVNGIVTSSYFSAGAMMLSDALTRAAKAAADLAAHGRQS

SEQ ID NO: 33127 - DNA, 962 bp, Zea mays subsp. mays
  misc_feature (1)..(962): Ceres Seq. ID no. 13499139
acgtacgtataggccggcgggaacgcgtaccaggtgccggcggggcggcgggacgggtccgtgtcgcgcgcgtcggacaccagcaacctgccgccgccgacggccaacgtcgcgcagctcacgcagatcttcggcaccaagggcctgacgcagaaggagatggtcatcctgtcgggcgcgcacaccatcggctcctcgcactgcagctccttcagcggccggctgtcggggtcggccacgacggcgggcgggcaggacccgaccatggaccccgcgtacgtggcgcagctggcgcggcagtgcccgcagggcggcgacccgctcgtgcccatggactacgtctcccccaacgccttcgacgagggcttctacaagggcgtcatggccaaccggggcctgctgtcctcggaccaggcgctgctcagcgacaagaacaccgccgtgcaggtcgtcacctacgccaacgacccggccaccttccaggccgacttcgccgccgccatggtcaagatgggctccgtcggcgtgctcaccggcaccagcggcaaggtcagggccaactgcagagtcgcctgattcatcgtcatcactcgtgtggagttgtagattcattatattgattgatttggaccggacgacgtcgacgggatgctacatggcctgcttgcgcaattgtatgtatgcctgtacttgcgcgtgtatgggtttcgctgtgcaaattttcgttgtctcccccgattgattgaggcgtgtgtgcgtgtgtgtctcttctgaatctgaatggaaaatctgtaacctgagctaaaactgctcgtgtactacccaatagttgcttcaaactacgatggatttttattcaaactatcacttccaaacacgcacaaatatgtactcaatcaactagggatcggagaaactggtttgtaaagggaattttataaacacaagctattcagacatgt

SEQ ID NO: 33128 - protein, 205 aa, Zea mays subsp. mays
  peptide (1)..(205): Ceres Seq. ID no. 13499140
VRIGRRERVPGAGGAAGRVRVARVGHQQPAAADGQRRAAHADLRHQGPDAEGDGHPVGRAHHRLLALQLLQRPAVGVGHDGGRAGPDHGPRVRGAAGAAVPAGRRPARAHGLRLPQRLRRGLLQGRHGQPGPAVLGPGAAQRQEHRRAGRHLRQRPGHLPGRLRRRHGQDGLRRRAHRHQRQGQGQLQSRLIHRHHSCGVVDSLY

SEQ ID NO: 33129 - protein, 138 aa, Zea mays subsp. mays
  peptide (1)..(138): Ceres Seq. ID no. 13499141
  misc_feature (1)..(103): Pfam Name: Pfam Description:  Peroxidase
  misc_feature (1)..(138): NCBI GI NO: 37536450 NR Description: putative peroxidase
  misc_feature (1)..(138): NCBI GI NO: 34902230 NR Description: Putative peroxidase
  misc_feature (1)..(138): NCBI GI NO: 34902232 NR Description: Putative peroxidase
  misc_feature (1)..(137): NCBI GI NO: 4760700 NR Description: peroxidase 1 [Scutellaria baicalensis]
  misc_feature (1)..(137): NCBI GI NO: 7453849 NR Description: peroxidase prx12 precursor [Spinacia oleracea]
  misc_feature (1)..(135): NCBI GI NO: 34902236 NR Description: Putative peroxidase
  misc_feature (1)..(137): NCBI GI NO: 34915488 NR Description: peroxidase-like protein
  misc_feature (1)..(137): NCBI GI NO: 34915320 NR Description: putative peroxidase
  misc_feature (1)..(135): NCBI GI NO: 28629828 NR Description: peroxidase 1 [Artemisia annua]
  misc_feature (1)..(137): NCBI GI NO: 5453379 NR Description: bacterial-induced peroxidase precursor
MVILSGAHTIGSSHCSSFSGRLSGSATTAGGQDPTMDPAYVAQLARQCPQGGDPLVPMDYVSPNAFDEGFYKGVMANRGLLSSDQALLSDKNTAVQVVTYANDPATFQADFAAAMVKMGSVGVLTGTSGKVRANCRVA

SEQ ID NO: 33130 - protein, 103 aa, Zea mays subsp. mays
  peptide (1)..(103): Ceres Seq. ID no. 13499142
  misc_feature (1)..(68): Pfam Name: Pfam Description:  Peroxidase
  misc_feature (1)..(103): NCBI GI NO: 37536450 NR Description: putative peroxidase
  misc_feature (1)..(103): NCBI GI NO: 34902230 NR Description: Putative peroxidase
  misc_feature (1)..(103): NCBI GI NO: 34902232 NR Description: Putative peroxidase
  misc_feature (1)..(102): NCBI GI NO: 4760700 NR Description: peroxidase 1 [Scutellaria baicalensis]
  misc_feature (1)..(102): NCBI GI NO: 7453849 NR Description: peroxidase prx12 precursor [Spinacia oleracea]
  misc_feature (1)..(100): NCBI GI NO: 34902236 NR Description: Putative peroxidase
  misc_feature (1)..(102): NCBI GI NO: 34915488 NR Description: peroxidase-like protein
  misc_feature (1)..(102): NCBI GI NO: 34915320 NR Description: putative peroxidase
  misc_feature (1)..(100): NCBI GI NO: 28629828 NR Description: peroxidase 1 [Artemisia annua]
  misc_feature (1)..(102): NCBI GI NO: 5453379 NR Description: bacterial-induced peroxidase precursor
MDPAYVAQLARQCPQGGDPLVPMDYVSPNAFDEGFYKGVMANRGLLSSDQALLSDKNTAVQVVTYANDPATFQADFAAAMVKMGSVGVLTGTSGKVRANCRVA

SEQ ID NO: 33131 - DNA, 1002 bp, Zea mays subsp. mays
  misc_feature (1)..(1002): Ceres Seq. ID no. 12414761
cgcacgggtgacagactgacaggtccgtccgcaaatctgcaacgttgcctcgtcacctctatcctccggtctctcaccgcctaacacggccgccatggccgccgcctccacctcccttccccttggcttctcctctcaccaccgcccaactcccagaatccggccgcagccccagtcccagtcgcaaccactgaaggcaaaaccccttaacccccttcgcttcagcctagccctcaccccggcgaccgcgaagccccgcctcgctgcgatgcccgacgatgtcgctgtcgccaacttcgtggagaaggactggtcgttcctcgagtccgcgggcgcaaacctccagcgcgctctcgcgtcgggggcgctctcgccggcgtcgcgggtgttggcattgacgcccacggcgtccttcgtgaggtcgctcctcgcgtcctcgccctgcgagctactggtggccgcgcatgagtcgatgtacgtgctggcaggggtcaaggaggcgcacgacgaggtgaggtgcttccacctcgagggtgggggcggcggcagaggcggcggcgtggtggaggccgtgccagagaggttcgacgacttcgatgttgtgttcgtgtgctacttccctggaatgggagtctccgcgggggcgctcctcaaatcgctggccaagaggtgctcaaaaggtgcaagagttgtcatgttcttagatcaaggcagacagaattttgagcaacaacggagagagcatcctgatgttgtaacttcggatttgcccagtatagccttcctggagaaggctgcatctgggaacaagtatgaaataacagagttcgttgacgagcctagcttttaccttgctgttttgcagtttcaaggatgatttgttccttttttgcaatatttgtgaagcaaattgtgactgtctgtaaatttgcaatatttgtgaagcaaattgtgactgtctgtaaattctgatggacgtagtttgtgggtggcttatgtcgt

SEQ ID NO: 33132 - protein, 260 aa, Zea mays subsp. mays
  peptide (1)..(260): Ceres Seq. ID no. 12414762
  misc_feature (1)..(259): NCBI GI NO: 34902316 NR Description: Unknown protein
  misc_feature (63)..(257): NCBI GI NO: 15227474 NR Description: hypothetical protein; protein id: At2g41950
  misc_feature (63)..(257): NCBI GI NO: 28207164 NR Description: hypothetical protein [Arabidopsis thaliana]
  misc_feature (63)..(196): NCBI GI NO: 28207166 NR Description: hypothetical protein [Arabidopsis thaliana]
MAAASTSLPLGFSSHHRPTPRIRPQPQSQSQPLKAKPLNPLRFSLALTPATAKPRLAAMPDDVAVANFVEKDWSFLESAGANLQRALASGALSPASRVLALTPTASFVRSLLASSPCELLVAAHESMYVLAGVKEAHDEVRCFHLEGGGGGRGGGVVEAVPERFDDFDVVFVCYFPGMGVSAGALLKSLAKRCSKGARVVMFLDQGRQNFEQQRREHPDVVTSDLPSIAFLEKAASGNKYEITEFVDEPSFYLAVLQFQG

SEQ ID NO: 33133 - protein, 202 aa, Zea mays subsp. mays
  peptide (1)..(202): Ceres Seq. ID no. 12414763
  misc_feature (1)..(201): NCBI GI NO: 34902316 NR Description: Unknown protein
  misc_feature (5)..(199): NCBI GI NO: 15227474 NR Description: hypothetical protein; protein id: At2g41950
  misc_feature (5)..(199): NCBI GI NO: 28207164 NR Description: hypothetical protein [Arabidopsis thaliana]
  misc_feature (5)..(138): NCBI GI NO: 28207166 NR Description: hypothetical protein [Arabidopsis thaliana]
MPDDVAVANFVEKDWSFLESAGANLQRALASGALSPASRVLALTPTASFVRSLLASSPCELLVAAHESMYVLAGVKEAHDEVRCFHLEGGGGGRGGGVVEAVPERFDDFDVVFVCYFPGMGVSAGALLKSLAKRCSKGARVVMFLDQGRQNFEQQRREHPDVVTSDLPSIAFLEKAASGNKYEITEFVDEPSFYLAVLQFQG

SEQ ID NO: 33134 - protein, 134 aa, Zea mays subsp. mays
  peptide (1)..(134): Ceres Seq. ID no. 12414764
  misc_feature (1)..(133): NCBI GI NO: 34902316 NR Description: Unknown protein
  misc_feature (1)..(131): NCBI GI NO: 15227474 NR Description: hypothetical protein; protein id: At2g41950
  misc_feature (1)..(131): NCBI GI NO: 28207164 NR Description: hypothetical protein [Arabidopsis thaliana]
  misc_feature (1)..(70): NCBI GI NO: 28207166 NR Description: hypothetical protein [Arabidopsis thaliana]
MYVLAGVKEAHDEVRCFHLEGGGGGRGGGVVEAVPERFDDFDVVFVCYFPGMGVSAGALLKSLAKRCSKGARVVMFLDQGRQNFEQQRREHPDVVTSDLPSIAFLEKAASGNKYEITEFVDEPSFYLAVLQFQG

SEQ ID NO: 33135 - DNA, 2790 bp, Zea mays subsp. mays
  misc_feature (1)..(2790): Ceres Seq. ID no. 12414791
gagatgggactcacacgccgtcacaatgctgtgcctcgtgtcgccctcttcctcgccgactccgcttccgccgccgcggcgctctcgctcgcatgctgatcgggcggcaccgccggggatcgcgggtggcggcaatgtgcgcctgagtgtgttgtctgtccagtgcaaggctcgccggtcaggggtgcggaaggtcaagagcaaattcgccactgcagctactgtgcaagaagataaaactatggcaactgccaaaggcgatgtcgaccatctccccatatacgacctggaccccaagctggagatattcaaggaccatttcaggtaccggatgaaaagattcctagagcagaaaggatcaattgaagaaaatgagggaagtcttgaatctttttctaaaggctatttgaaatttgggattaatacaaatgaggatggaactgtatatcgtgaatgggcacctgctgcgcaggaggcagagcttattggtgacttcaatgactggaatggtgcaaaccataagatggagaaggataaatttggtgtttggtcgatcaaaattgaccatgtcaaagggaaacctgccatccctcacaattccaaggttaaatttcgctttctacatggtggagtatgggttgatcgtattccagcattgattcgttatgcgactgttgatgcctctaaatttggagctccctatgatggtgttcattgggatcctcctgcttctgaaaggtacacatttaagcatcctcggccttcaaagcctgctgctccacgtatctatgaagcccatgtaggtatgagtggtgaaaagccagcagtaagcacatatagggaatttgcagacaatgtgttgccacgcatacgagcaaataactacaacacagttcagttgatggcagttatggagcattcgtactatgcttctttcgggtaccatgtgacaaatttctttgcggttagcagcagatcaggcacaccagaggacctcaaatatcttgttgataaggcacacagtttgggtttgcgagttctgatggatgttgtccatagccatgcaagtaataatgtcacagatggtttaaatggctatgatgttggacaaagcacccaagagtcctattttcatgcgggagatagaggttatcataaactttgggatagtcggctgttcaactatgctaactgggaggtattaaggtttcttctttctaacctgagatattggttggatgaattcatgtttgatggcttccgatttgatggagttacatcaatgctgtatcatcaccatggtatcaatgtggggtttactggaaactaccaggaatatttcagtttggacacagctgtggatgcagttgtttacatgatgcttgcaaaccatttaatgcacaaactcttgccagaagcaactgttgttgctgaagatgtttcaggcatgccggtcctttgccggccagttgatgaaggtggggttgggtttgactatcgcctggcaatggctatccctgatagatggattgactacctgaagaataaagatgactctgagtggtcgatgggtgaaatagcgcatactttgactaacaggagatatactgaaaaatgcatcgcatatgctgagagccatgatcagtctattgttggcgacaaaactattgcatttctcctgatggacaaggaaatgtacactggcatgtcagacttgcagcctgcttcacctacaattgatcgagggattgcactccaaaagatgattcacttcatcacaatggcccttggaggtgatggctacttgaattttatgggaaatgagtttggtcacccagaatggattgactttccaagagaagggaacaactggagctatgataaatgcagacgacagtggagccttgtggacactgatcacttgcggtacaagtacatgaatgcgtttgaccaagcgatgaatgcgctcgatgagagattttccttcctttcgtcgtcaaagcagatcgtcagcgacatgaacgatgaggaaaaggttattgtctttgaacgtggagatttagtttttgttttcaatttccatcccaagaaaacttacgagggctacaaagtgggatgcgatttgcctgggaaatacagagtagccctggactctgatgctctggtcttcggtggacatggaagagttggccacgacgtggatcacttcacgtcgcctgaaggggtgccaggggtgcccgaaacgaacttcaacaaccggccgaactcgttcaaagtcctttctccgccccgcacctgtgtggcttattaccgtgtagacgaagcaggggctggacgacgtcttcacgcgaaagcagagacaggaaagacgtctccagcagagagcatcgacgtcaaagcttccagagctagtagcaaagaagacaaggaggcaacggctggtggcaagaagggatggaagtttgcgcggcagccatccgatcaagataccaaatgaagccaggagtccttggtgaggactggactggctgccggcgccctgttagtagtcctgctctactggactagccgccgctggcgcccttggaacggtcctttcctgtagcttgcaggcgactggtgtctcatcaccgagcaggcaggcactgcttgtatagcttttctagaataataatcagggatggatggatggtgtgtattggctatctggctagacgtgcatgtgcccagtttgtatgtacaggagcagttcccgtccagaataaaaaaaaacttgttggggggtttttc

SEQ ID NO: 33136 - protein, 831 aa, Zea mays subsp. mays
  peptide (1)..(831): Ceres Seq. ID no. 12414792
  misc_feature (63)..(774): NCBI GI NO: 7433856 NR Description: 1,4-alpha-glucan branching enzyme (EC 2
  misc_feature (15)..(753): NCBI GI NO: 1169912 NR Description: 1,4-alpha-glucan branching enzyme
  misc_feature (60)..(769): NCBI GI NO: 477282 NR Description: starch branching enzyme isoform RBE3 - rice
  misc_feature (93)..(769): NCBI GI NO: 15553091 NR Description: starch branching enzyme II [Ipomoea batatas]
  misc_feature (68)..(769): NCBI GI NO: 5689138 NR Description: starch branching enzyme rbe4 [Oryza sativa]
  misc_feature (42)..(774): NCBI GI NO: 5441246 NR Description: branching enzyme 1 [Phaseolus vulgaris]
  misc_feature (89)..(769): NCBI GI NO: 11037534 NR Description: starch branching enzyme 2 [Triticum aestivum]
  misc_feature (89)..(769): NCBI GI NO: 13447952 NR Description: starch branching enzyme IIa variant
  misc_feature (70)..(769): NCBI GI NO: 7433848 NR Description: 1,4-alpha-glucan branching enzyme (EC 2
  misc_feature (89)..(769): NCBI GI NO: 7433853 NR Description: probable 1,4-alpha-glucan branching enzyme (EC2
RWDSHAVTMLCLVSPSSSPTPLPPPRRSRSHADRAAPPGIAGGGNVRLSVLSVQCKARRSGVRKVKSKFATAATVQEDKTMATAKGDVDHLPIYDLDPKLEIFKDHFRYRMKRFLEQKGSIEENEGSLESFSKGYLKFGINTNEDGTVYREWAPAAQEAELIGDFNDWNGANHKMEKDKFGVWSIKIDHVKGKPAIPHNSKVKFRFLHGGVWVDRIPALIRYATVDASKFGAPYDGVHWDPPASERYTFKHPRPSKPAAPRIYEAHVGMSGEKPAVSTYREFADNVLPRIRANNYNTVQLMAVMEHSYYASFGYHVTNFFAVSSRSGTPEDLKYLVDKAHSLGLRVLMDVVHSHASNNVTDGLNGYDVGQSTQESYFHAGDRGYHKLWDSRLFNYANWEVLRFLLSNLRYWLDEFMFDGFRFDGVTSMLYHHHGINVGFTGNYQEYFSLDTAVDAVVYMMLANHLMHKLLPEATVVAEDVSGMPVLCRPVDEGGVGFDYRLAMAIPDRWIDYLKNKDDSEWSMGEIAHTLTNRRYTEKCIAYAESHDQSIVGDKTIAFLLMDKEMYTGMSDLQPASPTIDRGIALQKMIHFITMALGGDGYLNFMGNEFGHPEWIDFPREGNNWSYDKCRRQWSLVDTDHLRYKYMNAFDQAMNALDERFSFLSSSKQIVSDMNDEEKVIVFERGDLVFVFNFHPKKTYEGYKVGCDLPGKYRVALDSDALVFGGHGRVGHDVDHFTSPEGVPGVPETNFNNRPNSFKVLSPPRTCVAYYRVDEAGAGRRLHAKAETGKTSPAESIDVKASRASSKEDKEATAGGKKGWKFARQPSDQDTK

SEQ ID NO: 33137 - protein, 823 aa, Zea mays subsp. mays
  peptide (1)..(823): Ceres Seq. ID no. 12414793
  misc_feature (55)..(766): NCBI GI NO: 7433856 NR Description: 1,4-alpha-glucan branching enzyme (EC 2
  misc_feature (7)..(745): NCBI GI NO: 1169912 NR Description: 1,4-alpha-glucan branching enzyme
  misc_feature (52)..(761): NCBI GI NO: 477282 NR Description: starch branching enzyme isoform RBE3 - rice
  misc_feature (85)..(761): NCBI GI NO: 15553091 NR Description: starch branching enzyme II [Ipomoea batatas]
  misc_feature (60)..(761): NCBI GI NO: 5689138 NR Description: starch branching enzyme rbe4 [Oryza sativa]
  misc_feature (34)..(766): NCBI GI NO: 5441246 NR Description: branching enzyme 1 [Phaseolus vulgaris]
  misc_feature (81)..(761): NCBI GI NO: 11037534 NR Description: starch branching enzyme 2 [Triticum aestivum]
  misc_feature (81)..(761): NCBI GI NO: 13447952 NR Description: starch branching enzyme IIa variant
  misc_feature (62)..(761): NCBI GI NO: 7433848 NR Description: 1,4-alpha-glucan branching enzyme (EC 2
  misc_feature (81)..(761): NCBI GI NO: 7433853 NR Description: probable 1,4-alpha-glucan branching enzyme (EC2
MLCLVSPSSSPTPLPPPRRSRSHADRAAPPGIAGGGNVRLSVLSVQCKARRSGVRKVKSKFATAATVQEDKTMATAKGDVDHLPIYDLDPKLEIFKDHFRYRMKRFLEQKGSIEENEGSLESFSKGYLKFGINTNEDGTVYREWAPAAQEAELIGDFNDWNGANHKMEKDKFGVWSIKIDHVKGKPAIPHNSKVKFRFLHGGVWVDRIPALIRYATVDASKFGAPYDGVHWDPPASERYTFKHPRPSKPAAPRIYEAHVGMSGEKPAVSTYREFADNVLPRIRANNYNTVQLMAVMEHSYYASFGYHVTNFFAVSSRSGTPEDLKYLVDKAHSLGLRVLMDVVHSHASNNVTDGLNGYDVGQSTQESYFHAGDRGYHKLWDSRLFNYANWEVLRFLLSNLRYWLDEFMFDGFRFDGVTSMLYHHHGINVGFTGNYQEYFSLDTAVDAVVYMMLANHLMHKLLPEATVVAEDVSGMPVLCRPVDEGGVGFDYRLAMAIPDRWIDYLKNKDDSEWSMGEIAHTLTNRRYTEKCIAYAESHDQSIVGDKTIAFLLMDKEMYTGMSDLQPASPTIDRGIALQKMIHFITMALGGDGYLNFMGNEFGHPEWIDFPREGNNWSYDKCRRQWSLVDTDHLRYKYMNAFDQAMNALDERFSFLSSSKQIVSDMNDEEKVIVFERGDLVFVFNFHPKKTYEGYKVGCDLPGKYRVALDSDALVFGGHGRVGHDVDHFTSPEGVPGVPETNFNNRPNSFKVLSPPRTCVAYYRVDEAGAGRRLHAKAETGKTSPAESIDVKASRASSKEDKEATAGGKKGWKFARQPSDQDTK

SEQ ID NO: 33138 - protein, 751 aa, Zea mays subsp. mays
  peptide (1)..(751): Ceres Seq. ID no. 12414794
  misc_feature (1)..(694): NCBI GI NO: 7433856 NR Description: 1,4-alpha-glucan branching enzyme (EC 2
  misc_feature (1)..(673): NCBI GI NO: 1169912 NR Description: 1,4-alpha-glucan branching enzyme
  misc_feature (1)..(689): NCBI GI NO: 477282 NR Description: starch branching enzyme isoform RBE3 - rice
  misc_feature (13)..(689): NCBI GI NO: 15553091 NR Description: starch branching enzyme II [Ipomoea batatas]
  misc_feature (1)..(689): NCBI GI NO: 5689138 NR Description: starch branching enzyme rbe4 [Oryza sativa]
  misc_feature (1)..(694): NCBI GI NO: 5441246 NR Description: branching enzyme 1 [Phaseolus vulgaris]
  misc_feature (9)..(689): NCBI GI NO: 11037534 NR Description: starch branching enzyme 2 [Triticum aestivum]
  misc_feature (9)..(689): NCBI GI NO: 13447952 NR Description: starch branching enzyme IIa variant
  misc_feature (1)..(689): NCBI GI NO: 7433848 NR Description: 1,4-alpha-glucan branching enzyme (EC 2
  misc_feature (9)..(689): NCBI GI NO: 7433853 NR Description: probable 1,4-alpha-glucan branching enzyme (EC2
MATAKGDVDHLPIYDLDPKLEIFKDHFRYRMKRFLEQKGSIEENEGSLESFSKGYLKFGINTNEDGTVYREWAPAAQEAELIGDFNDWNGANHKMEKDKFGVWSIKIDHVKGKPAIPHNSKVKFRFLHGGVWVDRIPALIRYATVDASKFGAPYDGVHWDPPASERYTFKHPRPSKPAAPRIYEAHVGMSGEKPAVSTYREFADNVLPRIRANNYNTVQLMAVMEHSYYASFGYHVTNFFAVSSRSGTPEDLKYLVDKAHSLGLRVLMDVVHSHASNNVTDGLNGYDVGQSTQESYFHAGDRGYHKLWDSRLFNYANWEVLRFLLSNLRYWLDEFMFDGFRFDGVTSMLYHHHGINVGFTGNYQEYFSLDTAVDAVVYMMLANHLMHKLLPEATVVAEDVSGMPVLCRPVDEGGVGFDYRLAMAIPDRWIDYLKNKDDSEWSMGEIAHTLTNRRYTEKCIAYAESHDQSIVGDKTIAFLLMDKEMYTGMSDLQPASPTIDRGIALQKMIHFITMALGGDGYLNFMGNEFGHPEWIDFPREGNNWSYDKCRRQWSLVDTDHLRYKYMNAFDQAMNALDERFSFLSSSKQIVSDMNDEEKVIVFERGDLVFVFNFHPKKTYEGYKVGCDLPGKYRVALDSDALVFGGHGRVGHDVDHFTSPEGVPGVPETNFNNRPNSFKVLSPPRTCVAYYRVDEAGAGRRLHAKAETGKTSPAESIDVKASRASSKEDKEATAGGKKGWKFARQPSDQDTK

SEQ ID NO: 33139 - DNA, 631 bp, Zea mays subsp. mays; identical to SEQ ID NO: 29836
  misc_feature (1)..(631): Ceres Seq. ID no. 12342153

SEQ ID NO: 33140 - protein, 113 aa, Zea mays subsp. mays; identical to SEQ ID NO: 29837
  peptide (1)..(113): Ceres Seq. ID no. 12342154
  misc_feature (1)..(113): Pfam Name: Pfam Description:  Aminotransferase class-III
  misc_feature (1)..(113): NCBI GI NO: 5731259 NR Description: alanine:glyoxylate aminotransferase 2 homolog
  misc_feature (1)..(113): NCBI GI NO: 18420498 NR Description: putative protein; protein id: At4g39660
  misc_feature (1)..(103): NCBI GI NO: 7434175 NR Description: hypothetical protein T19P19
  misc_feature (1)..(113): NCBI GI NO: 15224499 NR Description: putative beta-alanine-pyruvate aminotransferase
  misc_feature (1)..(113): NCBI GI NO: 15028237 NR Description: putative beta-alanine-pyruvate aminotransferase
  misc_feature (1)..(113): NCBI GI NO: 15231974 NR Description: putative aminotransferase; protein id: At3g08860
  misc_feature (1)..(111): NCBI GI NO: 16198011 NR Description: LD24726p [Drosophila melanogaster]
  misc_feature (1)..(111): NCBI GI NO: 28574759 NR Description: CG11241-PA [Drosophila melanogaster]
  misc_feature (1)..(104): NCBI GI NO: 39595899 NR Description: Hypothetical protein CBG12888
  misc_feature (1)..(98): NCBI GI NO: 31239473 NR Description: ENSANGP00000008948 [Anopheles gambiae]

SEQ ID NO: 33141 - protein, 71 aa, Zea mays subsp. mays; identical to SEQ ID NO: 29838
  peptide (1)..(71): Ceres Seq. ID no. 12342155
  misc_feature (1)..(71): Pfam Name: Pfam Description:  Aminotransferase class-III
  misc_feature (1)..(71): NCBI GI NO: 5731259 NR Description: alanine:glyoxylate aminotransferase 2 homolog
  misc_feature (1)..(71): NCBI GI NO: 18420498 NR Description: putative protein; protein id: At4g39660
  misc_feature (1)..(61): NCBI GI NO: 7434175 NR Description: hypothetical protein T19P19
  misc_feature (1)..(71): NCBI GI NO: 15224499 NR Description: putative beta-alanine-pyruvate aminotransferase
  misc_feature (1)..(71): NCBI GI NO: 15028237 NR Description: putative beta-alanine-pyruvate aminotransferase
  misc_feature (1)..(71): NCBI GI NO: 15231974 NR Description: putative aminotransferase; protein id: At3g08860
  misc_feature (1)..(69): NCBI GI NO: 16198011 NR Description: LD24726p [Drosophila melanogaster]
  misc_feature (1)..(69): NCBI GI NO: 28574759 NR Description: CG11241-PA [Drosophila melanogaster]
  misc_feature (1)..(62): NCBI GI NO: 39595899 NR Description: Hypothetical protein CBG12888
  misc_feature (1)..(56): NCBI GI NO: 31239473 NR Description: ENSANGP00000008948 [Anopheles gambiae]

SEQ ID NO: 33142 - DNA, 1374 bp, Zea mays subsp. mays; identical to SEQ ID NO: 26026
  misc_feature (1)..(1374): Ceres Seq. ID no. 12435065
  misc_feature (275)..(275): n is a, c, t, g, unknown, or other
  misc_feature (280)..(280): n is a, c, t, g, unknown, or other
  misc_feature (299)..(299): n is a, c, t, g, unknown, or other
  misc_feature (302)..(302): n is a, c, t, g, unknown, or other
  misc_feature (296)..(296): n is a, c, t, g, unknown, or other
  misc_feature (224)..(224): n is a, c, t, g, unknown, or other
  misc_feature (293)..(293): n is a, c, t, g, unknown, or other

SEQ ID NO: 33143 - protein, 259 aa, Zea mays subsp. mays; identical to SEQ ID NO: 26027
  peptide (1)..(259): Ceres Seq. ID no. 12435066
  misc_feature (162)..(236): Pfam Name: a.k.a. RRM, RBD, or RNP domain Pfam Description: RNA recognition motif.
  misc_feature (24)..(186): NCBI GI NO: 25553563 NR Description: OSJNBa0038F22.13
  misc_feature (179)..(259): NCBI GI NO: 25553563 NR Description: OSJNBa0038F22.13
  misc_feature (40)..(256): NCBI GI NO: 23304837 NR Description: RNA-binding protein [Medicago truncatula]
  misc_feature (38)..(259): NCBI GI NO: 30699215 NR Description: expressed protein [Arabidopsis thaliana]
  misc_feature (110)..(259): NCBI GI NO: 26450151 NR Description: unknown protein [Arabidopsis thaliana]
  misc_feature (39)..(162): NCBI GI NO: 15218968 NR Description: hypothetical protein; protein id: At1g21320.1
  misc_feature (201)..(259): NCBI GI NO: 15218968 NR Description: hypothetical protein; protein id: At1g21320.1
  misc_feature (39)..(259): NCBI GI NO: 25513502 NR Description: F16F4.3 protein - Arabidopsis thaliana
  misc_feature (10)..(10): Xaa is any aa, unknown or other
  misc_feature (11)..(11): Xaa is any aa, unknown or other
  misc_feature (16)..(16): Xaa is any aa, unknown or other
  misc_feature (17)..(17): Xaa is any aa, unknown or other
  misc_feature (18)..(18): Xaa is any aa, unknown or other
  misc_feature (19)..(19): Xaa is any aa, unknown or other

SEQ ID NO: 33144 - protein, 240 aa, Zea mays subsp. mays; identical to SEQ ID NO: 26028
  peptide (1)..(240): Ceres Seq. ID no. 12435067
  misc_feature (143)..(217): Pfam Name: a.k.a. RRM, RBD, or RNP domain Pfam Description: RNA recognition motif.
  misc_feature (5)..(167): NCBI GI NO: 25553563 NR Description: OSJNBa0038F22.13
  misc_feature (160)..(240): NCBI GI NO: 25553563 NR Description: OSJNBa0038F22.13
  misc_feature (21)..(237): NCBI GI NO: 23304837 NR Description: RNA-binding protein [Medicago truncatula]
  misc_feature (19)..(240): NCBI GI NO: 30699215 NR Description: expressed protein [Arabidopsis thaliana]
  misc_feature (91)..(240): NCBI GI NO: 26450151 NR Description: unknown protein [Arabidopsis thaliana]
  misc_feature (20)..(143): NCBI GI NO: 15218968 NR Description: hypothetical protein; protein id: At1g21320.1
  misc_feature (182)..(240): NCBI GI NO: 15218968 NR Description: hypothetical protein; protein id: At1g21320.1
  misc_feature (20)..(240): NCBI GI NO: 25513502 NR Description: F16F4.3 protein - Arabidopsis thaliana

SEQ ID NO: 33145 - protein, 231 aa, Zea mays subsp. mays; identical to SEQ ID NO: 26029
  peptide (1)..(231): Ceres Seq. ID no. 12435068
  misc_feature (134)..(208): Pfam Name: a.k.a. RRM, RBD, or RNP domain Pfam Description: RNA recognition motif.
  misc_feature (1)..(158): NCBI GI NO: 25553563 NR Description: OSJNBa0038F22.13
  misc_feature (151)..(231): NCBI GI NO: 25553563 NR Description: OSJNBa0038F22.13
  misc_feature (12)..(228): NCBI GI NO: 23304837 NR Description: RNA-binding protein [Medicago truncatula]
  misc_feature (10)..(231): NCBI GI NO: 30699215 NR Description: expressed protein [Arabidopsis thaliana]
  misc_feature (82)..(231): NCBI GI NO: 26450151 NR Description: unknown protein [Arabidopsis thaliana]
  misc_feature (11)..(134): NCBI GI NO: 15218968 NR Description: hypothetical protein; protein id: At1g21320.1
  misc_feature (173)..(231): NCBI GI NO: 15218968 NR Description: hypothetical protein; protein id: At1g21320.1
  misc_feature (11)..(231): NCBI GI NO: 25513502 NR Description: F16F4.3 protein - Arabidopsis thaliana

SEQ ID NO: 33146 - DNA, 886 bp, Zea mays subsp. mays
  misc_feature (1)..(886): Ceres Seq. ID no. 12386681
gaatctctctgcctcattctctctccaccggcgacggcgagtccgaccgcactgctcctctccgtgcggagatctctcgcgtgctggcaggcgcgtcctggtgactgggacacgggagaagagaccttggtgggtggcagcggcaggccatggaggcgctgctggtgacggtgcttcttctcctcctctcctctaccctcgccgcagcacaatggtgcgtgtgcaggcaggacgcgtcgcaggccgcgctgcagaagaccatcgactacgcgtgcggctccggggcggactgcaactccatccatgagaccggggcgtgctacaaccccaacaccgtcccggcgcactgctcctgggccgccaacagctactaccagaacaacaaggccaagggcgccacctgcgacttcgccggcaccgccaccctcaccaccagcgacccgagctccttcgggctgctcttaccccaccaccagtgcaagcgccgcgggaaccgtgaccccgaccaccggcggcacaatgggaggagcgggaggcccagggaccttgacgcccgccgggacaggcgcaggcacagccggcactaccggcatggggactgcaggcactacgggtaccgggttcggcggcctaggaccagcaggcatggacacagcggcggcggcggcggggggcttgctcctcctcccagaggctgggctgtgcgctgccctcgtcgcgctcctcctctccgccatcgtgctcgcgtgacgccttcacatgacctcggaaacaacaacctactgcctgcatgctagtagtagtagaaagcgctgcccttttgggaggtgtatgtagttcaggagtactctgattatctatggagaaagggtgggaattattgggc

SEQ ID NO: 33147 - protein, 215 aa, Zea mays subsp. mays
  peptide (1)..(215): Ceres Seq. ID no. 12386682
  misc_feature (1)..(106): NCBI GI NO: 22775658 NR Description: contains ESTs C91599
  misc_feature (1)..(156): NCBI GI NO: 34909796 NR Description: P0403C05.4
  misc_feature (3)..(99): NCBI GI NO: 18394637 NR Description: glycosyl hydrolase family 17; protein id:At1g18650
  misc_feature (3)..(106): NCBI GI NO: 21592859 NR Description: unknown [Arabidopsis thaliana]
  misc_feature (3)..(106): NCBI GI NO: 15241485 NR Description: glycosyl hydrolase family 17; protein id:At5g08000
  misc_feature (9)..(106): NCBI GI NO: 21326118 NR Description: putative expressed protein [Sorghum bicolor]
  misc_feature (3)..(100): NCBI GI NO: 15222715 NR Description: glycosyl hydrolase family 17; protein id:At1g26450
  misc_feature (3)..(100): NCBI GI NO: 18409239 NR Description: unknown protein; protein id: At1g69295
  misc_feature (3)..(100): NCBI GI NO: 21553768 NR Description: unknown [Arabidopsis thaliana]
  misc_feature (1)..(106): NCBI GI NO: 30697478 NR Description: glycosyl hydrolase family 17
MEALLVTVLLLLLSSTLAAAQWCVCRQDASQAALQKTIDYACGSGADCNSIHETGACYNPNTVPAHCSWAANSYYQNNKAKGATCDFAGTATLTTSDPSSFGLLLPHHQCKRRGNRDPDHRRHNGRSGRPRDLDARRDRRRHSRHYRHGDCRHYGYRVRRPRTSRHGHSGGGGGGLAPPPRGWAVRCPRRAPPLRHRARVTPSHDLGNNNLLPAC

SEQ ID NO: 33148 - protein, 148 aa, Zea mays subsp. mays
  peptide (1)..(148): Ceres Seq. ID no. 12386683
  misc_feature (1)..(71): Pfam Name: MSA-2 Pfam Description: Merozoite Surface Antigen 2
  misc_feature (28)..(148): NCBI GI NO: 22775658 NR Description: contains ESTs C91599
  misc_feature (1)..(94): NCBI GI NO: 30140331 NR Description: putative arabinagalactan protein [Lotus japonicus]
  misc_feature (1)..(123): NCBI GI NO: 29829077 NR Description: hypothetical protein
  misc_feature (1)..(105): NCBI GI NO: 11360318 NR Description: probable mucin DKFZp434C196.1 - human (fragment)
  misc_feature (17)..(143): NCBI GI NO: 30983559 NR Description: exosporium protein [Bacillus cereus]
  misc_feature (16)..(148): NCBI GI NO: 30140331 NR Description: putative arabinagalactan protein [Lotus japonicus]
MRPGRATTPTPSRRTAPGPPTATTRTTRPRAPPATSPAPPPSPPATRAPSGCSYPTTSASAAGTVTPTTGGTMGGAGGPGTLTPAGTGAGTAGTTGMGTAGTTGTGFGGLGPAGMDTAAAAAGGLLLLPEAGLCAALVALLLSAIVLA

SEQ ID NO: 33149 - DNA, 1247 bp, Zea mays subsp. mays
  misc_feature (1)..(1247): Ceres Seq. ID no. 12411831
aaaaggtacccaagctgaaagcatcacactcgcagttgcagagttccgcttcatcagtcccacactctccccttcctccccccagtcctgagcttcgccgaggcatacggacaataccggcaccggcagcgagcagtcgggagccatggctccgcggctcctgctcttcctcctcctcctcctcccgctcctcgccgccggacaccagcacccgtcctcctacggctcctccgcgctttccgagtggcgccccgccaaggcatcctactacgccgccgaccccgaagacgccatcggtggggcgtgcgggttcggggatctgggaaagcacgggtacgggatggcgacggtggggctgagcacggcgctgttcgagcgcggcgcggcgtgcggcggctgctacgaggtcaagtgcgtcgaggatctcaagtactgcctccccggcacctccatagtcgtcacggccaccaacttctgcgccccgaactacggccttcccgccgacgccggcggccactgcaacccgcccaaccatcatttcctcctccccatccagtcgtttgagaagattgcgctctggaaggccggcatcatgccaatccagtaccgccgtgttaagtgcctccgtgaaggtggtgtcaggttctctgtcaacggtcggcacttcttctttacagtcctaatcagcaacgttggtggcgcgggtgatgttagatctgtgaagatcaaaggaacagagttgggatggctcccgatgggccgcaactggggccaggtgtggcacatcaactgtgacatgaggggacaacctctatcgtttgagctcagctcgagcgatggcaaggcgctgaccagtttcaacgtcgtccctaaggattgggagtatggcaagacatacacggggaagcaatttcttctgtagagaatgagcgccacaagatcagcttacagtttctcattttttgttctgatcctacgagttgggctgtggtgtacattctctgcacttctgcagaacaagtaatatcattattaggagaaaattacttagtgcaaggcctcagatagttgctcttggtcataaatggttttccatgtccccttcatagttgtactaaagaggcttgatgtatcattcaaaatagaagcctccgttgtattacaatattttacctagcaagcaatgataatgtatttctgcatttctgtattagtaacaagggcagcaactagaactttgatttcct

SEQ ID NO: 33150 - protein, 258 aa, Zea mays subsp. mays
  peptide (1)..(258): Ceres Seq. ID no. 12411832
  misc_feature (165)..(242): Pfam Name: Pfam Description:  Pollen allergen
  misc_feature (1)..(258): NCBI GI NO: 7407665 NR Description: alpha-expansin OsEXP10 [Oryza sativa]
  misc_feature (6)..(256): NCBI GI NO: 18396479 NR Description: expansin, putative; protein id: At3g03220
  misc_feature (6)..(256): NCBI GI NO: 21618283 NR Description: Alpha-expansin 13 precursor
  misc_feature (6)..(161): NCBI GI NO: 6714416 NR Description: putative expansin precursor [Arabidopsis thaliana]
  misc_feature (156)..(256): NCBI GI NO: 6714416 NR Description: putative expansin precursor [Arabidopsis thaliana]
  misc_feature (5)..(256): NCBI GI NO: 4138912 NR Description: expansin precursor [Lycopersicon esculentum]
  misc_feature (8)..(256): NCBI GI NO: 29467505 NR Description: expansin [Pyrus communis]
  misc_feature (11)..(255): NCBI GI NO: 29467507 NR Description: expansin [Pyrus communis]
  misc_feature (9)..(256): NCBI GI NO: 29466641 NR Description: expansin [Prunus persica]
  misc_feature (24)..(256): NCBI GI NO: 38046730 NR Description: alpha-expansin 3
MAPRLLLFLLLLLPLLAAGHQHPSSYGSSALSEWRPAKASYYAADPEDAIGGACGFGDLGKHGYGMATVGLSTALFERGAACGGCYEVKCVEDLKYCLPGTSIVVTATNFCAPNYGLPADAGGHCNPPNHHFLLPIQSFEKIALWKAGIMPIQYRRVKCLREGGVRFSVNGRHFFFTVLISNVGGAGDVRSVKIKGTELGWLPMGRNWGQVWHINCDMRGQPLSFELSSSDGKALTSFNVVPKDWEYGKTYTGKQFLL

SEQ ID NO: 33151 - protein, 193 aa, Zea mays subsp. mays
  peptide (1)..(193): Ceres Seq. ID no. 12411833
  misc_feature (100)..(177): Pfam Name: Pfam Description:  Pollen allergen
  misc_feature (1)..(193): NCBI GI NO: 7407665 NR Description: alpha-expansin OsEXP10 [Oryza sativa]
  misc_feature (1)..(191): NCBI GI NO: 18396479 NR Description: expansin, putative; protein id: At3g03220
  misc_feature (1)..(191): NCBI GI NO: 21618283 NR Description: Alpha-expansin 13 precursor
  misc_feature (1)..(96): NCBI GI NO: 6714416 NR Description: putative expansin precursor [Arabidopsis thaliana]
  misc_feature (91)..(191): NCBI GI NO: 6714416 NR Description: putative expansin precursor [Arabidopsis thaliana]
  misc_feature (1)..(191): NCBI GI NO: 4138912 NR Description: expansin precursor [Lycopersicon esculentum]
  misc_feature (1)..(191): NCBI GI NO: 29467505 NR Description: expansin [Pyrus communis]
  misc_feature (1)..(190): NCBI GI NO: 29467507 NR Description: expansin [Pyrus communis]
  misc_feature (1)..(191): NCBI GI NO: 29466641 NR Description: expansin [Prunus persica]
  misc_feature (1)..(191): NCBI GI NO: 38046730 NR Description: alpha-expansin 3
MATVGLSTALFERGAACGGCYEVKCVEDLKYCLPGTSIVVTATNFCAPNYGLPADAGGHCNPPNHHFLLPIQSFEKIALWKAGIMPIQYRRVKCLREGGVRFSVNGRHFFFTVLISNVGGAGDVRSVKIKGTELGWLPMGRNWGQVWHINCDMRGQPLSFELSSSDGKALTSFNVVPKDWEYGKTYTGKQFLL

SEQ ID NO: 33152 - DNA, 782 bp, Zea mays subsp. mays; identical to SEQ ID NO: 29699
  misc_feature (1)..(782): Ceres Seq. ID no. 12358043

SEQ ID NO: 33153 - protein, 221 aa, Zea mays subsp. mays; identical to SEQ ID NO: 29700
  peptide (1)..(221): Ceres Seq. ID no. 12358044
  misc_feature (90)..(183): Pfam Name: Pfam Description:  Cation efflux family
  misc_feature (2)..(198): NCBI GI NO: 11359723 NR Description: proteophosphoglycan, membrane-associated
  misc_feature (47)..(200): NCBI GI NO: 38175466 NR Description: putative high-affinity potassium transporter
  misc_feature (55)..(206): NCBI GI NO: 11359723 NR Description: proteophosphoglycan, membrane-associated
  misc_feature (2)..(202): NCBI GI NO: 13592175 NR Description: ppg3 [Leishmania major]
  misc_feature (2)..(202): NCBI GI NO: 5420387 NR Description: proteophosphoglycan [Leishmania major]
  misc_feature (48)..(202): NCBI GI NO: 11359723 NR Description: proteophosphoglycan, membrane-associated
  misc_feature (2)..(206): NCBI GI NO: 13592175 NR Description: ppg3 [Leishmania major]
  misc_feature (2)..(208): NCBI GI NO: 13592175 NR Description: ppg3 [Leishmania major]
  misc_feature (2)..(206): NCBI GI NO: 25143299 NR Description: pre-mRNA splicing SR protein related RSR-1 (68
  misc_feature (35)..(196): NCBI GI NO: 5420387 NR Description: proteophosphoglycan [Leishmania major]

SEQ ID NO: 33154 - protein, 206 aa, Zea mays subsp. mays; identical to SEQ ID NO: 29701
  peptide (1)..(206): Ceres Seq. ID no. 12358045
  misc_feature (49)..(206): NCBI GI NO: 34907616 NR Description: contains EST C27797(C52876)~unknown protein
  misc_feature (47)..(204): NCBI GI NO: 15239379 NR Description: putative protein; protein id: At5g36710.1
  misc_feature (47)..(204): NCBI GI NO: 15239407 NR Description: putative protein; protein id: At5g36800.1
  misc_feature (42)..(186): NCBI GI NO: 38345379 NR Description: OSJNBa0067K08.8
  misc_feature (39)..(186): NCBI GI NO: 21703131 NR Description: AT5g16250/T21H19_170 [Arabidopsis thaliana]
  misc_feature (39)..(186): NCBI GI NO: 15237310 NR Description: putative protein; protein id: At5g16250
  misc_feature (39)..(186): NCBI GI NO: 21553926 NR Description: unknown [Arabidopsis thaliana]
  misc_feature (50)..(195): NCBI GI NO: 18396262 NR Description: expressed protein; protein id: At3g02640

SEQ ID NO: 33155 - protein, 190 aa, Zea mays subsp. mays; identical to SEQ ID NO: 29702
  peptide (1)..(190): Ceres Seq. ID no. 12358046

SEQ ID NO: 33156 - protein, 162 aa, Zea mays subsp. mays; identical to SEQ ID NO: 29703
  peptide (1)..(162): Ceres Seq. ID no. 12358047
  misc_feature (5)..(162): NCBI GI NO: 34907616 NR Description: contains EST C27797(C52876)~unknown protein
  misc_feature (3)..(160): NCBI GI NO: 15239379 NR Description: putative protein; protein id: At5g36710.1
  misc_feature (3)..(160): NCBI GI NO: 15239407 NR Description: putative protein; protein id: At5g36800.1
  misc_feature (1)..(142): NCBI GI NO: 38345379 NR Description: OSJNBa0067K08.8
  misc_feature (1)..(142): NCBI GI NO: 21703131 NR Description: AT5g16250/T21H19_170 [Arabidopsis thaliana]
  misc_feature (1)..(142): NCBI GI NO: 15237310 NR Description: putative protein; protein id: At5g16250
  misc_feature (1)..(142): NCBI GI NO: 21553926 NR Description: unknown [Arabidopsis thaliana]
  misc_feature (6)..(151): NCBI GI NO: 18396262 NR Description: expressed protein; protein id: At3g02640

SEQ ID NO: 33157 - DNA, 1789 bp, Zea mays subsp. mays
  misc_feature (1)..(1789): Ceres Seq. ID no. 12374390
ccttccctccgcctccgcctccgcccccgcccccgcccacgcccactcctcgctgccaccactcctgtcacctcttcccgcgccgacgcagccgccatggaccccgtcgccacatgggggctaaccccgctcgcgggcgccgacccggagatctacgacctcctggagcgcgagaagcggcgccagcgtcgcggcatcgagctcatcgcctccgagaacttcacctccttcgccgtcatggaggcgctcggctccgcgctcactaacaagtactccgagggcatgcccggcgcccgctactacggcggcaacgacgtcatcgacgagatcgagaacctctgccggtcacgcgcgctcgctgccttccaccttgacgccgcgtcctggggcgtcaacgtgcagccctactcgggctcccccgccaacttcgccgcctacaccgcgctgctcaacccgcacgaccggatcatggggctcgaccttccctccggcggacacctcactcacgggtactacacggccggcggtaagaagatctccgccacctcgatctactttgagagcctgccgtacaaggtgagcgccgcaacggggtacatcgactacgagaagctcgaggagaaggcacttgacttccgccccaagctcatcatctgcggtggcagtgcgtacccgagggactgggattacgccaagctcagggccgtcgccgacaaggtcggggccctgctgctctgcgacatggcgcacatcagcgggctcgtcgccgcgcaggaagctgcaaatccttttgaatattgtgatgtggttaccacaaccacgcacaagtccctcagagggccaagggctggcatgatcttctacaggaaaggccctaagccccccaagaagggccagcctgagggtgctgtttatgattacgaagacaagatcaactttgcagtgttcccatctctccaaggtggccctcacaaccaccagattgctgcacttgctgttgctctacagcaaactatgtcgcctggcttcaaggcctatgcaaagcaagtgaaggccaatgctgttgcaattggaaactatctcatgagcaagggctacaagatggtgactgatggaactgagaaccaccttgttctctgggatctccgcccccttggcttgactggaaacaaggtcgaaaagctatgtgatctttgccacatcacattgaacaagaatgctgtcttcggtgacagcagtgcattgtctccgggtggtgtccgcattggcgcgccagcaatgacctcgaggggtctactggagaaggatttcgagcagattggggagttcctccaccaggcagtgaccatctgcctgaacatccagaaggagtacggcaagctcctcaaggacttcaacaagggcctggtgaacaacaaggacatcgagaacctcaaggtccaggtggagaagtttgccgactccttcgacatgcctgggttcacgcttgagagcatgaaatacaaggagtagatatgcctctttcatgcgcggcaaggtcctcctgtaccgatgtctttccttgtggtggcgcagggtgccatggcactgcattgccgccacacttacgatgatgatgatgggttatggattttgtctacaatgtcagcaggataggctcacaattgccccctgccctccggtttggtcgcctctcaggttttcatttggtagttgttcgcagggaaccatatgagaattgcaatgtcaatcaggtgtttgccaataataattgggtggtttctgctct

SEQ ID NO: 33158 - protein, 503 aa, Zea mays subsp. mays
  peptide (1)..(503): Ceres Seq. ID no. 12374391
  misc_feature (44)..(444): Pfam Name: Pfam Description:  Serine hydroxymethyltransferase
  misc_feature (33)..(503): NCBI GI NO: 15236375 NR Description: hydroxymethyltransferase; protein id: At4g13930
  misc_feature (33)..(503): NCBI GI NO: 21592544 NR Description: hydroxymethyltransferase [Arabidopsis thaliana]
  misc_feature (33)..(503): NCBI GI NO: 11762130 NR Description: AT4g13930 [Arabidopsis thaliana]
  misc_feature (33)..(500): NCBI GI NO: 15236371 NR Description: glycine hydroxymethyltransferase - like protein
  misc_feature (10)..(492): NCBI GI NO: 18400090 NR Description: putative hydroxymethyltransferase
  misc_feature (10)..(492): NCBI GI NO: 25286207 NR Description: probable hydroxymethyltransferase, 49598-47322
  misc_feature (10)..(492): NCBI GI NO: 21537165 NR Description: putative hydroxymethyltransferase
  misc_feature (36)..(496): NCBI GI NO: 15219182 NR Description: glycine hydroxymethyltransferase, putative
  misc_feature (44)..(502): NCBI GI NO: 17066746 NR Description: serine hydroxymethyltransferase
  misc_feature (44)..(493): NCBI GI NO: 18418028 NR Description: glycine hydroxymethyltransferase (EC 2
PSLRLRLRPRPRPRPLLAATTPVTSSRADAAAMDPVATWGLTPLAGADPEIYDLLEREKRRQRRGIELIASENFTSFAVMEALGSALTNKYSEGMPGARYYGGNDVIDEIENLCRSRALAAFHLDAASWGVNVQPYSGSPANFAAYTALLNPHDRIMGLDLPSGGHLTHGYYTAGGKKISATSIYFESLPYKVSAATGYIDYEKLEEKALDFRPKLIICGGSAYPRDWDYAKLRAVADKVGALLLCDMAHISGLVAAQEAANPFEYCDVVTTTTHKSLRGPRAGMIFYRKGPKPPKKGQPEGAVYDYEDKINFAVFPSLQGGPHNHQIAALAVALQQTMSPGFKAYAKQVKANAVAIGNYLMSKGYKMVTDGTENHLVLWDLRPLGLTGNKVEKLCDLCHITLNKNAVFGDSSALSPGGVRIGAPAMTSRGLLEKDFEQIGEFLHQAVTICLNIQKEYGKLLKDFNKGLVNNKDIENLKVQVEKFADSFDMPGFTLESMKYKE

SEQ ID NO: 33159 - protein, 471 aa, Zea mays subsp. mays; identical to SEQ ID NO: 23628
  peptide (1)..(471): Ceres Seq. ID no. 12374392
  misc_feature (12)..(412): Pfam Name: Pfam Description:  Serine hydroxymethyltransferase
  misc_feature (1)..(471): NCBI GI NO: 15236375 NR Description: hydroxymethyltransferase; protein id: At4g13930
  misc_feature (1)..(471): NCBI GI NO: 21592544 NR Description: hydroxymethyltransferase [Arabidopsis thaliana]
  misc_feature (1)..(471): NCBI GI NO: 11762130 NR Description: AT4g13930 [Arabidopsis thaliana]
  misc_feature (1)..(468): NCBI GI NO: 15236371 NR Description: glycine hydroxymethyltransferase - like protein
  misc_feature (1)..(460): NCBI GI NO: 18400090 NR Description: putative hydroxymethyltransferase
  misc_feature (1)..(460): NCBI GI NO: 25286207 NR Description: probable hydroxymethyltransferase, 49598-47322
  misc_feature (1)..(460): NCBI GI NO: 21537165 NR Description: putative hydroxymethyltransferase
  misc_feature (4)..(464): NCBI GI NO: 15219182 NR Description: glycine hydroxymethyltransferase, putative
  misc_feature (12)..(470): NCBI GI NO: 17066746 NR Description: serine hydroxymethyltransferase
  misc_feature (12)..(461): NCBI GI NO: 18418028 NR Description: glycine hydroxymethyltransferase (EC 2

SEQ ID NO: 33160 - protein, 424 aa, Zea mays subsp. mays; identical to SEQ ID NO: 23629
  peptide (1)..(424): Ceres Seq. ID no. 12374393
  misc_feature (1)..(365): Pfam Name: Pfam Description:  Serine hydroxymethyltransferase
  misc_feature (1)..(424): NCBI GI NO: 15236375 NR Description: hydroxymethyltransferase; protein id: At4g13930
  misc_feature (1)..(424): NCBI GI NO: 21592544 NR Description: hydroxymethyltransferase [Arabidopsis thaliana]
  misc_feature (1)..(424): NCBI GI NO: 11762130 NR Description: AT4g13930 [Arabidopsis thaliana]
  misc_feature (1)..(421): NCBI GI NO: 15236371 NR Description: glycine hydroxymethyltransferase - like protein
  misc_feature (1)..(413): NCBI GI NO: 18400090 NR Description: putative hydroxymethyltransferase
  misc_feature (1)..(413): NCBI GI NO: 25286207 NR Description: probable hydroxymethyltransferase, 49598-47322
  misc_feature (1)..(413): NCBI GI NO: 21537165 NR Description: putative hydroxymethyltransferase
  misc_feature (1)..(417): NCBI GI NO: 15219182 NR Description: glycine hydroxymethyltransferase, putative
  misc_feature (1)..(423): NCBI GI NO: 17066746 NR Description: serine hydroxymethyltransferase
  misc_feature (1)..(414): NCBI GI NO: 18418028 NR Description: glycine hydroxymethyltransferase (EC 2

SEQ ID NO: 33161 - DNA, 1600 bp, Zea mays subsp. mays
  misc_feature (1)..(1600): Ceres Seq. ID no. 12349840
aacacatcactcccagactgctccctcatacgtccattatttccgcaaagtgcaaccgagaatgacatgcagtcgtagtatcgtagataaccaccttatgtcgtacttcaccatcctactgctttcttcttttgctgcaacggtagcatatcctgctcgcagtgaattactgccttaccagatgaaaaaccaccattctgtatcgtcacacaacccacaaccgaaggatttcccaactgagcaactctaccgcgcctaccttgtaatccagcgcttcaagagcaccgtcaccagcgaccccaagaacgtcaccgccacctggattggtcatgatctctgcggagaaacgacctacgtggggttctactgcggatcgccggcaggaggagataagttgacagtcataggggtcattttgaatggctatagactacatgcaccaacgttggaaggtttcgttaatcagctccctgatctatctcttttccatgctgcttccaacaattttggtggcgatataccccaattaaccggcctagggtacatgtaccagctcagtgtcgccgataaagatctgcaattacaggctcaacaaaaaagggatgtccctaatgattctatagtggggggcggcggcaacattcacgcgactggtggtggctgtctatttgcagattttaacttctcgtttaatgttggaattaataagggtcacaaatttcctggttttacgcaatccaaagctctccttctcaaccacaacaatttgtccggtccacttccgtcaaacctcggtttctcaaagctgagctaccttgccctcgccaacaacaaactcaccgggccaatcccgccgtcaatcagtaacctggaagactctctcttcgaggtactccttctcaacaaccagctctccggctgcctcccccacgagctcggcatgctcaccaaggcggccgtgattgacgccggcatgaaccagctcaccggcccaatcccgtcatctttctcctgcctaagcagcgtcgagcagctcaacctggccggaaaccgcctctacggccaggtacccgacgcgctctgcaagcttgctgggcccgctggccgcctcgccaacctcacgctgtccggcaactacttcacatccgccgggccggcatgcgcggcgctgatcaaagacggagtgctggacgtgaagaacaactgcatcccggggctcaccaaccagaggcgccccgcggagtgcgcagcgttccagagccaaccaaagacatgcccggcagcgagcactcaggtgacatgccccgccgccgcagcttccaggaacgcggcggcgccaggggagaggaaggtcaaggattactccagctacgtgacgtacgctactctgcatgactgagccacactggcatgcagtaagagacagagtgccttgctggctatgtgtctcttgtattcagcatgagtgtaccctagcgtgtgttggtgtgattgtgattgctgtctatttgcattattgtacgtttgttgctgtcacatctagatcatcccattatttgtacgtccaaatccattttatggaaagtactgttggtgtttc

SEQ ID NO: 33162 - protein, 465 aa, Zea mays subsp. mays
  peptide (1)..(465): Ceres Seq. ID no. 12349841
  misc_feature (73)..(464): NCBI GI NO: 32490271 NR Description: OSJNBb0116K07.13
  misc_feature (77)..(426): NCBI GI NO: 30680322 NR Description: extensin-related protein [Arabidopsis thaliana]
  misc_feature (72)..(448): NCBI GI NO: 32488397 NR Description: OSJNBa0043A12.27
  misc_feature (72)..(426): NCBI GI NO: 15230349 NR Description: unknown protein; protein id: At3g19320.1
  misc_feature (72)..(464): NCBI GI NO: 15222811 NR Description: unknown protein; protein id: At1g49750.1
  misc_feature (37)..(435): NCBI GI NO: 37718858 NR Description: putative leucine-rich receptor-like protein kinase
  misc_feature (186)..(422): NCBI GI NO: 15230120 NR Description: disease resistance protein, putative
  misc_feature (77)..(189): NCBI GI NO: 15230120 NR Description: disease resistance protein, putative
  misc_feature (193)..(425): NCBI GI NO: 15226640 NR Description: unknown protein; protein id: At2g15880.1
  misc_feature (77)..(189): NCBI GI NO: 15226640 NR Description: unknown protein; protein id: At2g15880.1
THHSQTAPSYVHYFRKVQPRMTCSRSIVDNHLMSYFTILLLSSFAATVAYPARSELLPYQMKNHHSVSSHNPQPKDFPTEQLYRAYLVIQRFKSTVTSDPKNVTATWIGHDLCGETTYVGFYCGSPAGGDKLTVIGVILNGYRLHAPTLEGFVNQLPDLSLFHAASNNFGGDIPQLTGLGYMYQLSVADKDLQLQAQQKRDVPNDSIVGGGGNIHATGGGCLFADFNFSFNVGINKGHKFPGFTQSKALLLNHNNLSGPLPSNLGFSKLSYLALANNKLTGPIPPSISNLEDSLFEVLLLNNQLSGCLPHELGMLTKAAVIDAGMNQLTGPIPSSFSCLSSVEQLNLAGNRLYGQVPDALCKLAGPAGRLANLTLSGNYFTSAGPACAALIKDGVLDVKNNCIPGLTNQRRPAECAAFQSQPKTCPAASTQVTCPAAAASRNAAAPGERKVKDYSSYVTYATLHD

SEQ ID NO: 33163 - protein, 445 aa, Zea mays subsp. mays
  peptide (1)..(445): Ceres Seq. ID no. 12349842
  misc_feature (53)..(444): NCBI GI NO: 32490271 NR Description: OSJNBb0116K07.13
  misc_feature (57)..(406): NCBI GI NO: 30680322 NR Description: extensin-related protein [Arabidopsis thaliana]
  misc_feature (52)..(428): NCBI GI NO: 32488397 NR Description: OSJNBa0043A12.27
  misc_feature (52)..(406): NCBI GI NO: 15230349 NR Description: unknown protein; protein id: At3g19320.1
  misc_feature (52)..(444): NCBI GI NO: 15222811 NR Description: unknown protein; protein id: At1g49750.1
  misc_feature (17)..(415): NCBI GI NO: 37718858 NR Description: putative leucine-rich receptor-like protein kinase
  misc_feature (166)..(402): NCBI GI NO: 15230120 NR Description: disease resistance protein, putative
  misc_feature (57)..(169): NCBI GI NO: 15230120 NR Description: disease resistance protein, putative
  misc_feature (173)..(405): NCBI GI NO: 15226640 NR Description: unknown protein; protein id: At2g15880.1
  misc_feature (57)..(169): NCBI GI NO: 15226640 NR Description: unknown protein; protein id: At2g15880.1
MTCSRSIVDNHLMSYFTILLLSSFAATVAYPARSELLPYQMKNHHSVSSHNPQPKDFPTEQLYRAYLVIQRFKSTVTSDPKNVTATWIGHDLCGETTYVGFYCGSPAGGDKLTVIGVILNGYRLHAPTLEGFVNQLPDLSLFHAASNNFGGDIPQLTGLGYMYQLSVADKDLQLQAQQKRDVPNDSIVGGGGNIHATGGGCLFADFNFSFNVGINKGHKFPGFTQSKALLLNHNNLSGPLPSNLGFSKLSYLALANNKLTGPIPPSISNLEDSLFEVLLLNNQLSGCLPHELGMLTKAAVIDAGMNQLTGPIPSSFSCLSSVEQLNLAGNRLYGQVPDALCKLAGPAGRLANLTLSGNYFTSAGPACAALIKDGVLDVKNNCIPGLTNQRRPAECAAFQSQPKTCPAASTQVTCPAAAASRNAAAPGERKVKDYSSYVTYATLHD

SEQ ID NO: 33164 - protein, 433 aa, Zea mays subsp. mays
  peptide (1)..(433): Ceres Seq. ID no. 12349843
  misc_feature (41)..(432): NCBI GI NO: 32490271 NR Description: OSJNBb0116K07.13
  misc_feature (45)..(394): NCBI GI NO: 30680322 NR Description: extensin-related protein [Arabidopsis thaliana]
  misc_feature (40)..(416): NCBI GI NO: 32488397 NR Description: OSJNBa0043A12.27
  misc_feature (40)..(394): NCBI GI NO: 15230349 NR Description: unknown protein; protein id: At3g19320.1
  misc_feature (40)..(432): NCBI GI NO: 15222811 NR Description: unknown protein; protein id: At1g49750.1
  misc_feature (5)..(403): NCBI GI NO: 37718858 NR Description: putative leucine-rich receptor-like protein kinase
  misc_feature (154)..(390): NCBI GI NO: 15230120 NR Description: disease resistance protein, putative
  misc_feature (45)..(157): NCBI GI NO: 15230120 NR Description: disease resistance protein, putative
  misc_feature (161)..(393): NCBI GI NO: 15226640 NR Description: unknown protein; protein id: At2g15880.1
  misc_feature (45)..(157): NCBI GI NO: 15226640 NR Description: unknown protein; protein id: At2g15880.1
MSYFTILLLSSFAATVAYPARSELLPYQMKNHHSVSSHNPQPKDFPTEQLYRAYLVIQRFKSTVTSDPKNVTATWIGHDLCGETTYVGFYCGSPAGGDKLTVIGVILNGYRLHAPTLEGFVNQLPDLSLFHAASNNFGGDIPQLTGLGYMYQLSVADKDLQLQAQQKRDVPNDSIVGGGGNIHATGGGCLFADFNFSFNVGINKGHKFPGFTQSKALLLNHNNLSGPLPSNLGFSKLSYLALANNKLTGPIPPSISNLEDSLFEVLLLNNQLSGCLPHELGMLTKAAVIDAGMNQLTGPIPSSFSCLSSVEQLNLAGNRLYGQVPDALCKLAGPAGRLANLTLSGNYFTSAGPACAALIKDGVLDVKNNCIPGLTNQRRPAECAAFQSQPKTCPAASTQVTCPAAAASRNAAAPGERKVKDYSSYVTYATLHD

SEQ ID NO: 33165 - DNA, 958 bp, Zea mays subsp. mays
  misc_feature (1)..(958): Ceres Seq. ID no. 12345616
agggttcgcggatcccccacgacacctataagcaccaaccctagcccaaaaccccgcttccacttcacagcctctccgcctccgctcctcgcgccgccgccgcgtctcctcctgtacaggtaaggagaggaagagggcgaaatggtgaagcacaacaacgtcatccccaacgggcacttcaagaagcactggcagaactatgtcaagacatggttcaaccagcccgcccgcaagcagaggcgccgcatcgctcgtcaaaagaaggctgtgaagatattcccccgcccgactgctggtcctctacgccccattgttcaatgccagactttaaagtacaacatgaagtcaagggctgggagaggctttacccttgaggagctgaaggctgctggcatcccaaagaagcttgctccaaccattggtatttctgttgatcaccgccgcaagaacaaatcccttgagggactgcaggccaatgtccagaggcttaagacatacaaggccaagctggttatcttcccaaggcgtgcacacaaggttaaggctggtgactctactccagaggagcttgccaccgctacccaggtccagggtgactacatgccatttactcgtggtgagaaacgttcagttgaggttgtgaaggtcacagatgagatgaagtcatttgctgcctatggcaagctccgccttgagcggatgaacaagaaacatcttggtgcccgccagaagaaggcagctgaggcagagaaggaagataagaagtgaagcggttgaagatagtaccctgttttgttctattcagtcattagtgaatgctactacttaaagtgcttgttctatgttttttttgcggtaatggaaatagagcccagacaaacattttggtgtcctactgtttgatgccttgtacttgtttgcgaactcagctatctaatgggttattggattcttgccc

SEQ ID NO: 33166 - protein, 208 aa, Zea mays subsp. mays; identical to SEQ ID NO: 25233
  peptide (1)..(208): Ceres Seq. ID no. 12345617
  misc_feature (6)..(185): Pfam Name: Pfam Description:  Ribosomal protein L13e
  misc_feature (1)..(208): NCBI GI NO: 34897952 NR Description: ESTs AU077873
  misc_feature (1)..(208): NCBI GI NO: 18873677 NR Description: putative cold-induced protein
  misc_feature (2)..(208): NCBI GI NO: 15229064 NR Description: 60S ribosomal protein L13, BBC1 protein
  misc_feature (2)..(208): NCBI GI NO: 21537149 NR Description: 60S ribosomal protein L13, BBC1 protein
  misc_feature (2)..(208): NCBI GI NO: 730450 NR Description: 60S RIBOSOMAL PROTEIN L13-2
  misc_feature (1)..(208): NCBI GI NO: 12580867 NR Description: 60S ribosomal protein L13E [Picea abies]
  misc_feature (2)..(208): NCBI GI NO: 7441103 NR Description: ribosomal protein L13.B, cytosolic - rape
  misc_feature (2)..(208): NCBI GI NO: 730449 NR Description: 60S RIBOSOMAL PROTEIN L13-1
  misc_feature (2)..(208): NCBI GI NO: 7441102 NR Description: ribosomal protein L13.A, cytosolic - rape
  misc_feature (2)..(208): NCBI GI NO: 15237847 NR Description: 60S ribosomal protein L13; protein id: At5g23900

SEQ ID NO: 33167 - protein, 142 aa, Zea mays subsp. mays; identical to SEQ ID NO: 25234
  peptide (1)..(142): Ceres Seq. ID no. 12345618
  misc_feature (1)..(119): Pfam Name: Pfam Description:  Ribosomal protein L13e
  misc_feature (1)..(142): NCBI GI NO: 34897952 NR Description: ESTs AU077873
  misc_feature (1)..(142): NCBI GI NO: 18873677 NR Description: putative cold-induced protein
  misc_feature (1)..(142): NCBI GI NO: 15229064 NR Description: 60S ribosomal protein L13, BBC1 protein
  misc_feature (1)..(142): NCBI GI NO: 21537149 NR Description: 60S ribosomal protein L13, BBC1 protein
  misc_feature (1)..(142): NCBI GI NO: 730450 NR Description: 60S RIBOSOMAL PROTEIN L13-2
  misc_feature (1)..(142): NCBI GI NO: 12580867 NR Description: 60S ribosomal protein L13E [Picea abies]
  misc_feature (1)..(142): NCBI GI NO: 7441103 NR Description: ribosomal protein L13.B, cytosolic - rape
  misc_feature (1)..(142): NCBI GI NO: 730449 NR Description: 60S RIBOSOMAL PROTEIN L13-1
  misc_feature (1)..(142): NCBI GI NO: 7441102 NR Description: ribosomal protein L13.A, cytosolic - rape
  misc_feature (1)..(142): NCBI GI NO: 15237847 NR Description: 60S ribosomal protein L13; protein id: At5g23900

SEQ ID NO: 33168 - DNA, 668 bp, Zea mays subsp. mays
  misc_feature (1)..(668): Ceres Seq. ID no. 12344404
tattgctgaaaagacagccctagaatacggagagagaaatggattaaatgttgttacagtttgccctactatggctttaggaccgctcttgcggcctatgctcaatgtcagccatgaattcctcatgtacattattaaaggaggtcctactatgatgaagaacattccatggcacatagttgatgtccgagatgtggttgatgctttgcttatggtatacaagaaagaggaatcgacagggagatacatctgtgcaccaaattgcatcagtgcaaaagatctggtgaacatgctgaagagggattatcctaattacaattatgtaaactgcgacaatgatatggtgcttaactctatagttacaccacttatgtcggagaaactgaagaatttgggctggaaaccaatgaagacactagaggaaacattattggatagtgttgaatgctataagaagatggggcttctaaaagatgctgagggatgcccttgtcgtcttcctcacctttttcatatggctatagaaaaatgaagaatactcaccattgcttcttgtgttacctaattactctttgaacattgttgggtatgtgttctaatcacacaccaataatgttgacattcaatgggttgtggttgatttgaaataaatgtttggtttcttatgg

SEQ ID NO: 33169 - protein, 176 aa, Zea mays subsp. mays
  peptide (1)..(176): Ceres Seq. ID no. 12344405
  misc_feature (1)..(159): NCBI GI NO: 6554472 NR Description: putative cinnamoyl-CoA reductase; 14056-15506
  misc_feature (1)..(159): NCBI GI NO: 15223068 NR Description: putative cinnamoyl-CoA reductase
  misc_feature (2)..(156): NCBI GI NO: 15226134 NR Description: putative cinnamoyl-CoA reductase
  misc_feature (2)..(156): NCBI GI NO: 15226135 NR Description: putative cinnamoyl-CoA reductase
  misc_feature (1)..(157): NCBI GI NO: 7431406 NR Description: probable cinnamyl-alcohol dehydrogenase (EC1
  misc_feature (1)..(163): NCBI GI NO: 9964087 NR Description: cinnamoyl CoA reductase [Lolium perenne]
  misc_feature (1)..(156): NCBI GI NO: 28544959 NR Description: cinnamoyl-CoA reductase [Zea mays]
  misc_feature (1)..(156): NCBI GI NO: 3668115 NR Description: cinnamoyl-CoA reductase [Zea mays]
  misc_feature (1)..(156): NCBI GI NO: 28544965 NR Description: cinnamoyl-CoA reductase [Zea mays]
  misc_feature (1)..(156): NCBI GI NO: 28544976 NR Description: cinnamoyl-CoA reductase [Zea mays]
IAEKTALEYGERNGLNVVTVCPTMALGPLLRPMLNVSHEFLMYIIKGGPTMMKNIPWHIVDVRDVVDALLMVYKKEESTGRYICAPNCISAKDLVNMLKRDYPNYNYVNCDNDMVLNSIVTPLMSEKLKNLGWKPMKTLEETLLDSVECYKKMGLLKDAEGCPCRLPHLFHMAIEK

SEQ ID NO: 33170 - protein, 153 aa, Zea mays subsp. mays
  peptide (1)..(153): Ceres Seq. ID no. 12344406
  misc_feature (1)..(136): NCBI GI NO: 6554472 NR Description: putative cinnamoyl-CoA reductase; 14056-15506
  misc_feature (1)..(136): NCBI GI NO: 15223068 NR Description: putative cinnamoyl-CoA reductase
  misc_feature (1)..(133): NCBI GI NO: 15226134 NR Description: putative cinnamoyl-CoA reductase
  misc_feature (1)..(133): NCBI GI NO: 15226135 NR Description: putative cinnamoyl-CoA reductase
  misc_feature (1)..(134): NCBI GI NO: 7431406 NR Description: probable cinnamyl-alcohol dehydrogenase (EC1
  misc_feature (1)..(140): NCBI GI NO: 9964087 NR Description: cinnamoyl CoA reductase [Lolium perenne]
  misc_feature (1)..(133): NCBI GI NO: 28544959 NR Description: cinnamoyl-CoA reductase [Zea mays]
  misc_feature (1)..(133): NCBI GI NO: 3668115 NR Description: cinnamoyl-CoA reductase [Zea mays]
  misc_feature (1)..(133): NCBI GI NO: 28544965 NR Description: cinnamoyl-CoA reductase [Zea mays]
  misc_feature (1)..(133): NCBI GI NO: 28544976 NR Description: cinnamoyl-CoA reductase [Zea mays]
MALGPLLRPMLNVSHEFLMYIIKGGPTMMKNIPWHIVDVRDVVDALLMVYKKEESTGRYICAPNCISAKDLVNMLKRDYPNYNYVNCDNDMVLNSIVTPLMSEKLKNLGWKPMKTLEETLLDSVECYKKMGLLKDAEGCPCRLPHLFHMAIEK

SEQ ID NO: 33171 - protein, 144 aa, Zea mays subsp. mays
  peptide (1)..(144): Ceres Seq. ID no. 12344407
  misc_feature (1)..(127): NCBI GI NO: 6554472 NR Description: putative cinnamoyl-CoA reductase; 14056-15506
  misc_feature (1)..(127): NCBI GI NO: 15223068 NR Description: putative cinnamoyl-CoA reductase
  misc_feature (1)..(124): NCBI GI NO: 15226134 NR Description: putative cinnamoyl-CoA reductase
  misc_feature (1)..(124): NCBI GI NO: 15226135 NR Description: putative cinnamoyl-CoA reductase
  misc_feature (1)..(125): NCBI GI NO: 7431406 NR Description: probable cinnamyl-alcohol dehydrogenase (EC1
  misc_feature (1)..(131): NCBI GI NO: 9964087 NR Description: cinnamoyl CoA reductase [Lolium perenne]
  misc_feature (1)..(124): NCBI GI NO: 28544959 NR Description: cinnamoyl-CoA reductase [Zea mays]
  misc_feature (1)..(124): NCBI GI NO: 3668115 NR Description: cinnamoyl-CoA reductase [Zea mays]
  misc_feature (1)..(124): NCBI GI NO: 28544965 NR Description: cinnamoyl-CoA reductase [Zea mays]
  misc_feature (1)..(124): NCBI GI NO: 28544976 NR Description: cinnamoyl-CoA reductase [Zea mays]
MLNVSHEFLMYIIKGGPTMMKNIPWHIVDVRDVVDALLMVYKKEESTGRYICAPNCISAKDLVNMLKRDYPNYNYVNCDNDMVLNSIVTPLMSEKLKNLGWKPMKTLEETLLDSVECYKKMGLLKDAEGCPCRLPHLFHMAIEK

SEQ ID NO: 33172 - DNA, 1401 bp, Zea mays subsp. mays
  misc_feature (1)..(1401): Ceres Seq. ID no. 13636633
gtcatcaatcaaatactcacacaaccatggggcaccaggcgcagcacggcacggacgacaccgaggagctgctcgcagcccaccggcagctgtggtgccatgccctgggctacgtcaagtccatggcgctcaagtgcgccctggacctgcgcatccccgacaccatcgaccgctgcggcgggagcgccaccctgggcgagctgctcgccgcaagcgagatctcggcgtccaaccacgactacctccgacgggtcatgcgcacgctgacagccatgcgcatcttcgcggccagccacgaccccgccaaggccgacgacgcggccgccatctcctaccagctcaccccggcgtcccggctgctcgtcagcagcagcagcagcgtcgacgacgccgccgggcctcgaaggagaacactactaccccgagcatcctccccaacatcgcccacctggtccgccccaacaccatctccctgctgttcagcatgggcgagtggatgaaggacgagagcgcggcgtccgtgtcgctgtacgagacggtgcaccggcaggggatgtgggcgtgcgtggaggacgacgcggccaacagggccagcttctacgagagcatggacgccgacacccggctcgtgatgcaggccgtggtccgccggtgcccgcacgtgttcgacggcatcaagtcgctcgtcgacgtcggcggcggccgcggcaccgccgccgccgccatcgtcgccgccttcccgcacatccagaggtgcaccgtcatggacctcccccacgtcgtcgccgaggctcccgccggcaccgccggcctgtccttccacggcggcgacatgttcgagcacatcccgtcggctgacgcactcatgctcaagtggatcctgcacgactgggatgaggacaagtgcatcaagataatggagcgctgcaaggaagcgatcggtggcaaggaagcaggggggaaggtgataataatagacacggtgctcggatctcgggcagacgacgacgacgacaagacgtgcagggagacgtatgtgttggatctccacatactgagcttcgtgaacggggcggagcgggaggagcacgagtggaggaggatcttcctggcggctgggttccgtgactacaagatcacgcacacccgaggcatcccgtccatcatcgaggtcttcccgtgatgatcatggatcgagagtcgatcatatatgcatgtttgtacgtgtttgtgtcataataaatcgatcgatcatgttgtttactctttttatttcggtatgtagttgcatctgtgggcgggctaaaataaatcacggccggccgggcttcatcaagcccatgtatccagctgtgtgtaataatgcaatggaaaacgaaccaaaaagaatgcttccattcc

SEQ ID NO: 33173 - protein, 393 aa, Zea mays subsp. mays
  peptide (1)..(393): Ceres Seq. ID no. 15220370
  misc_feature (150)..(379): Pfam Name: Pfam Description:  O-methyltransferase
  misc_feature (150)..(393): NCBI GI NO: 4098238 NR Description: o-methyltransferase [Triticum aestivum]
  misc_feature (145)..(393): NCBI GI NO: 1353193 NR Description: O-METHYLTRANSFERASE ZRP4 (OMT)
  misc_feature (147)..(393): NCBI GI NO: 37530600 NR Description: putative o-methyltransferase ZRP4
  misc_feature (150)..(393): NCBI GI NO: 37530606 NR Description: putative o-methyltransferase ZRP4
  misc_feature (142)..(393): NCBI GI NO: 22093735 NR Description: putative o-methyltransferase
  misc_feature (150)..(393): NCBI GI NO: 34909608 NR Description: putative o-methyltransferase
  misc_feature (138)..(393): NCBI GI NO: 6177792 NR Description: O-methyltransferase [Pyrus pyrifolia]
  misc_feature (142)..(393): NCBI GI NO: 20514367 NR Description: orcinol O-methyltransferase [Rosa hybrid cultivar]
  misc_feature (142)..(393): NCBI GI NO: 38175602 NR Description: putative catechol O-methyltransferase
  misc_feature (142)..(393): NCBI GI NO: 16903138 NR Description: chavicol O-methyltransferase [Ocimum basilicum]
SSIKYSHNHGAPGAARHGRHRGAARSPPAAVVPCPGLRQVHGAQVRPGPAHPRHHRPLRRERHPGRAARRKRDLGVQPRLPPTGHAHADSHAHLRGQPRPRQGRRRGRHLLPAHPGVPAARQQQQQRRRRRRASKENTTTPSILPNIAHLVRPNTISLLFSMGEWMKDESAASVSLYETVHRQGMWACVEDDAANRASFYESMDADTRLVMQAVVRRCPHVFDGIKSLVDVGGGRGTAAAAIVAAFPHIQRCTVMDLPHVVAEAPAGTAGLSFHGGDMFEHIPSADALMLKWILHDWDEDKCIKIMERCKEAIGGKEAGGKVIIIDTVLGSRADDDDDKTCRETYVLDLHILSFVNGAEREEHEWRRIFLAAGFRDYKITHTRGIPSIIEVFP

SEQ ID NO: 33174 - protein, 232 aa, Zea mays subsp. mays
  peptide (1)..(232): Ceres Seq. ID no. 15220371
  misc_feature (1)..(218): Pfam Name: Pfam Description:  O-methyltransferase
  misc_feature (1)..(232): NCBI GI NO: 4098238 NR Description: o-methyltransferase [Triticum aestivum]
  misc_feature (1)..(232): NCBI GI NO: 1353193 NR Description: O-METHYLTRANSFERASE ZRP4 (OMT)
  misc_feature (1)..(232): NCBI GI NO: 37530600 NR Description: putative o-methyltransferase ZRP4
  misc_feature (1)..(232): NCBI GI NO: 37530606 NR Description: putative o-methyltransferase ZRP4
  misc_feature (1)..(232): NCBI GI NO: 22093735 NR Description: putative o-methyltransferase
  misc_feature (1)..(232): NCBI GI NO: 34909608 NR Description: putative o-methyltransferase
  misc_feature (1)..(232): NCBI GI NO: 6177792 NR Description: O-methyltransferase [Pyrus pyrifolia]
  misc_feature (1)..(232): NCBI GI NO: 20514367 NR Description: orcinol O-methyltransferase [Rosa hybrid cultivar]
  misc_feature (1)..(232): NCBI GI NO: 38175602 NR Description: putative catechol O-methyltransferase
  misc_feature (1)..(232): NCBI GI NO: 16903138 NR Description: chavicol O-methyltransferase [Ocimum basilicum]
MGEWMKDESAASVSLYETVHRQGMWACVEDDAANRASFYESMDADTRLVMQAVVRRCPHVFDGIKSLVDVGGGRGTAAAAIVAAFPHIQRCTVMDLPHVVAEAPAGTAGLSFHGGDMFEHIPSADALMLKWILHDWDEDKCIKIMERCKEAIGGKEAGGKVIIIDTVLGSRADDDDDKTCRETYVLDLHILSFVNGAEREEHEWRRIFLAAGFRDYKITHTRGIPSIIEVFP

SEQ ID NO: 33175 - protein, 228 aa, Zea mays subsp. mays
  peptide (1)..(228): Ceres Seq. ID no. 15220372
  misc_feature (1)..(214): Pfam Name: Pfam Description:  O-methyltransferase
  misc_feature (1)..(228): NCBI GI NO: 4098238 NR Description: o-methyltransferase [Triticum aestivum]
  misc_feature (1)..(228): NCBI GI NO: 1353193 NR Description: O-METHYLTRANSFERASE ZRP4 (OMT)
  misc_feature (1)..(228): NCBI GI NO: 37530600 NR Description: putative o-methyltransferase ZRP4
  misc_feature (1)..(228): NCBI GI NO: 37530606 NR Description: putative o-methyltransferase ZRP4
  misc_feature (1)..(228): NCBI GI NO: 22093735 NR Description: putative o-methyltransferase
  misc_feature (1)..(228): NCBI GI NO: 34909608 NR Description: putative o-methyltransferase
  misc_feature (1)..(228): NCBI GI NO: 6177792 NR Description: O-methyltransferase [Pyrus pyrifolia]
  misc_feature (1)..(228): NCBI GI NO: 20514367 NR Description: orcinol O-methyltransferase [Rosa hybrid cultivar]
  misc_feature (1)..(228): NCBI GI NO: 38175602 NR Description: putative catechol O-methyltransferase
  misc_feature (1)..(228): NCBI GI NO: 16903138 NR Description: chavicol O-methyltransferase [Ocimum basilicum]
MKDESAASVSLYETVHRQGMWACVEDDAANRASFYESMDADTRLVMQAVVRRCPHVFDGIKSLVDVGGGRGTAAAAIVAAFPHIQRCTVMDLPHVVAEAPAGTAGLSFHGGDMFEHIPSADALMLKWILHDWDEDKCIKIMERCKEAIGGKEAGGKVIIIDTVLGSRADDDDDKTCRETYVLDLHILSFVNGAEREEHEWRRIFLAAGFRDYKITHTRGIPSIIEVFP

SEQ ID NO: 33176 - DNA, 1106 bp, Zea mays subsp. mays
  misc_feature (1)..(1106): Ceres Seq. ID no. 12411811
acaaaacatatctatatatctgcaacgtcaaatcaacacaggctgttgtttgcttcttttggtaaaggctttagctgcggcagatccaccggcggcgccccgagaatcgaagatgccggtgaaggtgttcggatcgccgacgtcggcggaggtcgcccgcgtcctggcctgcctgttcgagaaggacgtcgagttccagctcatccgcgtcgactccttccgcggcaccaagcgcctgccccagtacctcaagctccagccgcacggcgaggcgctcaccttcgaggacggcaacgtcaccctcgtcggtacgtacgtacacacgcaagcgacgcgagagagccaactgaccaactgaaaacgtaatggatcatggatggatggatggatgcatgcagagtcgaggaagatcctgcgccacatcgccgacaagtacaagaaccaggggtacagggacctgttcggcccgggcgcgctggagcgggcctccatcgagcagtggctgcagacggaggcgcagagcttcgacgtccccagcgccgacatggtctacagcctcgcctacctgccgcccgacatgcagctcgacggcaggggcgtcggcggcctcccggcggcgacggggacgatgaacccggcgcaccggcagaaggtggaggagatgctgcagctgttcgagaagagccgcaggcagctgggcaagctgctggacatctacgagcagcgccttggcgaggaggccttcctggccggaggcaagttcacgctcgccgacctgtcccacctgcccaacgccgaccgcctcgccggcgacccgcggtccgcacgcctcatggagtcgcgcaggaacgtcagcaagtggtgggacaccgtatcccgccgcgactcttgggtcagggtcaaggagttgcagcgcccgccgtccgcggaggcgcccttctgatgtcgatcgatcgcaaattaaggcggtggcctttgctcaagcctacgtgttcggtttctgcataattttttaataaataaacgccactggcccctctacgtcattggcgattgttcattgtgtaataaatcgttcaagagcatatgatgcttcttgccgtgag

SEQ ID NO: 33177 - protein, 211 aa, Zea mays subsp. mays
  peptide (1)..(211): Ceres Seq. ID no. 12411812
  misc_feature (74)..(126): Pfam Name: 20 copies Pfam Description: Collagen triple helix repeat
  misc_feature (17)..(184): NCBI GI NO: 11385473 NR Description: glutathione S-transferase GST 11 [Zea mays]
  misc_feature (33)..(169): NCBI GI NO: 11385473 NR Description: glutathione S-transferase GST 11 [Zea mays]
MDGWMDACRVEEDPAPHRRQVQEPGVQGPVRPGRAGAGLHRAVAADGGAELRRPQRRHGLQPRLPAARHAARRQGRRRPPGGDGDDEPGAPAEGGGDAAAVREEPQAAGQAAGHLRAAPWRGGLPGRRQVHARRPVPPAQRRPPRRRPAVRTPHGVAQERQQVVGHRIPPRLLGQGQGVAAPAVRGGALLMSIDRKLRRWPLLKPTCSVSA

SEQ ID NO: 33178 - protein, 207 aa, Zea mays subsp. mays
  peptide (1)..(207): Ceres Seq. ID no. 12411813
  misc_feature (70)..(122): Pfam Name: 20 copies Pfam Description: Collagen triple helix repeat
  misc_feature (13)..(180): NCBI GI NO: 11385473 NR Description: glutathione S-transferase GST 11 [Zea mays]
  misc_feature (29)..(165): NCBI GI NO: 11385473 NR Description: glutathione S-transferase GST 11 [Zea mays]
MDACRVEEDPAPHRRQVQEPGVQGPVRPGRAGAGLHRAVAADGGAELRRPQRRHGLQPRLPAARHAARRQGRRRPPGGDGDDEPGAPAEGGGDAAAVREEPQAAGQAAGHLRAAPWRGGLPGRRQVHARRPVPPAQRRPPRRRPAVRTPHGVAQERQQVVGHRIPPRLLGQGQGVAAPAVRGGALLMSIDRKLRRWPLLKPTCSVSA

SEQ ID NO: 33179 - protein, 188 aa, Zea mays subsp. mays
  peptide (1)..(188): Ceres Seq. ID no. 12411814
  misc_feature (8)..(188): NCBI GI NO: 11385479 NR Description: glutathione S-transferase GST 14 [Zea mays]
  misc_feature (77)..(184): NCBI GI NO: 22758271 NR Description: Putative glutathione S-transferase
  misc_feature (7)..(76): NCBI GI NO: 22758271 NR Description: Putative glutathione S-transferase
  misc_feature (1)..(188): NCBI GI NO: 37536564 NR Description: putative glutathione S-transferase
  misc_feature (8)..(102): NCBI GI NO: 11385469 NR Description: glutathione S-transferase GST 9 [Zea mays]
  misc_feature (106)..(184): NCBI GI NO: 11385469 NR Description: glutathione S-transferase GST 9 [Zea mays]
  misc_feature (102)..(184): NCBI GI NO: 11385475 NR Description: glutathione S-transferase GST 12 [Zea mays]
  misc_feature (102)..(184): NCBI GI NO: 11385477 NR Description: glutathione S-transferase GST 13 [Zea mays]
  misc_feature (8)..(65): NCBI GI NO: 11385475 NR Description: glutathione S-transferase GST 12 [Zea mays]
  misc_feature (8)..(65): NCBI GI NO: 11385477 NR Description: glutathione S-transferase GST 13 [Zea mays]
MDGWMHAESRKILRHIADKYKNQGYRDLFGPGALERASIEQWLQTEAQSFDVPSADMVYSLAYLPPDMQLDGRGVGGLPAATGTMNPAHRQKVEEMLQLFEKSRRQLGKLLDIYEQRLGEEAFLAGGKFTLADLSHLPNADRLAGDPRSARLMESRRNVSKWWDTVSRRDSWVRVKELQRPPSAEAPF

SEQ ID NO: 33180 - DNA, 786 bp, Zea mays subsp. mays
  misc_feature (1)..(786): Ceres Seq. ID no. 12337520
  misc_feature (383)..(383): n is a, c, t, g, unknown, or other
agagattcagcggacgttgatggagctccttaaccaattagatggatttgatgagctaggaaaggtaaaaatgatcatggccacaaatcgacctgatgttctggacccggcgctcctgcgtcctggacgtttagataggaagattgaaattccgctacccaacgagcaatcaagaatggaagttctaaaaatccatgcagccggtatcgccaagcatggggagattgattatgaagcagtcgtgaaactagctgaaggtttcaatggggctgatcttcggaacgtgtgcaccgaagctggcatggctgcaattcgtgcagagagagattacgtagtccacgaagacttcatgaaggctgtgaggaagctaaatgatgcaaaanagctggaatcgagtgcgcattacagtgcagattttggcaaagagtaatgatgctaatgccgatgcaacggacaaatgcatttggcatgtatcatcaggcgagcccagtcagatgcgatgcaaaagcgagaaaggaaccagctatttatgttcaggctacaggcagcttctcttttattccttctttctcgtattcacaattttagtgaggaggattgtcgagctgaccggtgggagaaaccagtcgagaatttagtagctttgcaccagatgccatttgcttctgtaaatcacacattatctgcttccgtgtgtagaatggtaataacttgtcccagctccatgtacttaagacagagtgctcgacttgagaggtaaaaacagagaaaagaacaatttggttc

SEQ ID NO: 33181 - protein, 142 aa, Zea mays subsp. mays
  peptide (1)..(142): Ceres Seq. ID no. 12337521
  misc_feature (1)..(105): Pfam Name: AAA Pfam Description: ATPase family associated with various cellular activities
  misc_feature (1)..(142): NCBI GI NO: 17298147 NR Description: 26S proteasome regulatory particle triple-A ATPase subunit4b
  misc_feature (1)..(142): NCBI GI NO: 11094192 NR Description: 26S proteasome regulatory particle triple-A ATPase subunit4
  misc_feature (1)..(142): NCBI GI NO: 24745880 NR Description: 26S proteasome AAA-ATPase subunit RPT4a
  misc_feature (1)..(142): NCBI GI NO: 15239140 NR Description: 26S proteasome AAA-ATPase subunit RPT4a
  misc_feature (1)..(142): NCBI GI NO: 15219503 NR Description: 26S proteasome regulatory particle triple-A ATPase subunit4
  misc_feature (1)..(135): NCBI GI NO: 24640100 NR Description: CG3455-PA [Drosophila melanogaster]
  misc_feature (1)..(135): NCBI GI NO: 31242591 NR Description: ENSANGP00000017473 [Anopheles gambiae]
  misc_feature (1)..(135): NCBI GI NO: 6434958 NR Description: 26S proteasome regulatory complex subunit p42D
  misc_feature (1)..(135): NCBI GI NO: 17945503 NR Description: RE23388p [Drosophila melanogaster]
  misc_feature (1)..(135): NCBI GI NO: 2960216 NR Description: 26S proteasome regulatory ATPase subunit 10b
  misc_feature (128)..(128): Xaa is any aa, unknown or other
EIQRTLMELLNQLDGFDELGKVKMIMATNRPDVLDPALLRPGRLDRKIEIPLPNEQSRMEVLKIHAAGIAKHGEIDYEAVVKLAEGFNGADLRNVCTEAGMAAIRAERDYVVHEDFMKAVRKLNDAKXLESSAHYSADFGKE

SEQ ID NO: 33182 - protein, 136 aa, Zea mays subsp. mays
  peptide (1)..(136): Ceres Seq. ID no. 12337522
  misc_feature (1)..(99): Pfam Name: AAA Pfam Description: ATPase family associated with various cellular activities
  misc_feature (1)..(136): NCBI GI NO: 17298147 NR Description: 26S proteasome regulatory particle triple-A ATPase subunit4b
  misc_feature (1)..(136): NCBI GI NO: 11094192 NR Description: 26S proteasome regulatory particle triple-A ATPase subunit4
  misc_feature (1)..(136): NCBI GI NO: 24745880 NR Description: 26S proteasome AAA-ATPase subunit RPT4a
  misc_feature (1)..(136): NCBI GI NO: 15239140 NR Description: 26S proteasome AAA-ATPase subunit RPT4a
  misc_feature (1)..(136): NCBI GI NO: 15219503 NR Description: 26S proteasome regulatory particle triple-A ATPase subunit4
  misc_feature (1)..(129): NCBI GI NO: 24640100 NR Description: CG3455-PA [Drosophila melanogaster]
  misc_feature (1)..(129): NCBI GI NO: 31242591 NR Description: ENSANGP00000017473 [Anopheles gambiae]
  misc_feature (1)..(129): NCBI GI NO: 6434958 NR Description: 26S proteasome regulatory complex subunit p42D
  misc_feature (1)..(129): NCBI GI NO: 17945503 NR Description: RE23388p [Drosophila melanogaster]
  misc_feature (1)..(129): NCBI GI NO: 2960216 NR Description: 26S proteasome regulatory ATPase subunit 10b
  misc_feature (122)..(122): Xaa is any aa, unknown or other
MELLNQLDGFDELGKVKMIMATNRPDVLDPALLRPGRLDRKIEIPLPNEQSRMEVLKIHAAGIAKHGEIDYEAVVKLAEGFNGADLRNVCTEAGMAAIRAERDYVVHEDFMKAVRKLNDAKXLESSAHYSADFGKE

SEQ ID NO: 33183 - protein, 119 aa, Zea mays subsp. mays
  peptide (1)..(119): Ceres Seq. ID no. 12337523
  misc_feature (1)..(82): Pfam Name: AAA Pfam Description: ATPase family associated with various cellular activities
  misc_feature (1)..(119): NCBI GI NO: 17298147 NR Description: 26S proteasome regulatory particle triple-A ATPase subunit4b
  misc_feature (1)..(119): NCBI GI NO: 11094192 NR Description: 26S proteasome regulatory particle triple-A ATPase subunit4
  misc_feature (1)..(119): NCBI GI NO: 24745880 NR Description: 26S proteasome AAA-ATPase subunit RPT4a
  misc_feature (1)..(119): NCBI GI NO: 15239140 NR Description: 26S proteasome AAA-ATPase subunit RPT4a
  misc_feature (1)..(119): NCBI GI NO: 15219503 NR Description: 26S proteasome regulatory particle triple-A ATPase subunit4
  misc_feature (1)..(112): NCBI GI NO: 24640100 NR Description: CG3455-PA [Drosophila melanogaster]
  misc_feature (1)..(112): NCBI GI NO: 31242591 NR Description: ENSANGP00000017473 [Anopheles gambiae]
  misc_feature (1)..(112): NCBI GI NO: 6434958 NR Description: 26S proteasome regulatory complex subunit p42D
  misc_feature (1)..(112): NCBI GI NO: 17945503 NR Description: RE23388p [Drosophila melanogaster]
  misc_feature (1)..(112): NCBI GI NO: 2960216 NR Description: 26S proteasome regulatory ATPase subunit 10b
  misc_feature (105)..(105): Xaa is any aa, unknown or other
MIMATNRPDVLDPALLRPGRLDRKIEIPLPNEQSRMEVLKIHAAGIAKHGEIDYEAVVKLAEGFNGADLRNVCTEAGMAAIRAERDYVVHEDFMKAVRKLNDAKXLESSAHYSADFGKE

SEQ ID NO: 33184 - DNA, 656 bp, Zea mays subsp. mays
  misc_feature (1)..(656): Ceres Seq. ID no. 12404694
atcaccaatctcaactcagcgagctctccaccagttttacagccaagaaagaaccaaccatgatcagcaccaagaggatcgctcagctggccaagaagtggcagaggatggaagcgctcgggaggaagcgccgcctcgcctgggggacggcggcggcggcaaagaaagccgacaggtgctgcgcctccgtggcgagcaagggccactgcgcggtgtacacgactgacggggcacggttcgaggtgccattggcgtgcctcgggacggaagtcttcgccgagctcctgcacatgtccagagaggagttcggcttcgcgggcggccacggcaggatcttgctgccctgcgacgccatggtcatggagtacgccctgtgcttgctgcggaggggcgcctctgcggacctggagaaggcgttcctcagcaccatggcgatgtcgtgccactctgcagaccacgcggcggcgccatatgtggcggcttgctgttagtttgcagctgtataagtagtggcagagagttcatcactgtatatagtaggacaaagagaggtgttgttcagatcctgcgacccattaaggaaggtagcgattagcaagttagcgccagtgctcttgtttgagcagtgagcatattacagcttaatttcacgcccg

SEQ ID NO: 33185 - protein, 162 aa, Zea mays subsp. mays
  peptide (1)..(162): Ceres Seq. ID no. 12404695
  misc_feature (20)..(128): Pfam Name: Pfam Description:  Auxin responsive protein
  misc_feature (20)..(149): NCBI GI NO: 21592571 NR Description: auxin-induced protein, putative
  misc_feature (20)..(149): NCBI GI NO: 20149052 NR Description: auxin-induced SAUR-like protein [Capsicum annuum]
  misc_feature (20)..(149): NCBI GI NO: 18397101 NR Description: auxin-induced protein, putative
  misc_feature (20)..(144): NCBI GI NO: 21553494 NR Description: auxin-induced protein, putative
  misc_feature (20)..(144): NCBI GI NO: 18397103 NR Description: auxin-induced protein, putative
  misc_feature (29)..(149): NCBI GI NO: 25403067 NR Description: probable auxin-induced protein, 48806-48408
  misc_feature (20)..(144): NCBI GI NO: 38603942 NR Description: At1g29420 [Arabidopsis thaliana]
  misc_feature (20)..(144): NCBI GI NO: 15218951 NR Description: auxin-induced protein, putative
  misc_feature (20)..(155): NCBI GI NO: 26452075 NR Description: putative auxin-induced protein
  misc_feature (20)..(155): NCBI GI NO: 15218924 NR Description: auxin-induced protein, putative
HQSQLSELSTSFTAKKEPTMISTKRIAQLAKKWQRMEALGRKRRLAWGTAAAAKKADRCCASVASKGHCAVYTTDGARFEVPLACLGTEVFAELLHMSREEFGFAGGHGRILLPCDAMVMEYALCLLRRGASADLEKAFLSTMAMSCHSADHAAAPYVAACC

SEQ ID NO: 33186 - protein, 143 aa, Zea mays subsp. mays
  peptide (1)..(143): Ceres Seq. ID no. 12404696
  misc_feature (1)..(109): Pfam Name: Pfam Description:  Auxin responsive protein
  misc_feature (1)..(130): NCBI GI NO: 21592571 NR Description: auxin-induced protein, putative
  misc_feature (1)..(130): NCBI GI NO: 20149052 NR Description: auxin-induced SAUR-like protein [Capsicum annuum]
  misc_feature (1)..(130): NCBI GI NO: 18397101 NR Description: auxin-induced protein, putative
  misc_feature (1)..(125): NCBI GI NO: 21553494 NR Description: auxin-induced protein, putative
  misc_feature (1)..(125): NCBI GI NO: 18397103 NR Description: auxin-induced protein, putative
  misc_feature (10)..(130): NCBI GI NO: 25403067 NR Description: probable auxin-induced protein, 48806-48408
  misc_feature (1)..(125): NCBI GI NO: 38603942 NR Description: At1g29420 [Arabidopsis thaliana]
  misc_feature (1)..(125): NCBI GI NO: 15218951 NR Description: auxin-induced protein, putative
  misc_feature (1)..(136): NCBI GI NO: 26452075 NR Description: putative auxin-induced protein
  misc_feature (1)..(136): NCBI GI NO: 15218924 NR Description: auxin-induced protein, putative
MISTKRIAQLAKKWQRMEALGRKRRLAWGTAAAAKKADRCCASVASKGHCAVYTTDGARFEVPLACLGTEVFAELLHMSREEFGFAGGHGRILLPCDAMVMEYALCLLRRGASADLEKAFLSTMAMSCHSADHAAAPYVAACC

SEQ ID NO: 33187 - protein, 127 aa, Zea mays subsp. mays
  peptide (1)..(127): Ceres Seq. ID no. 12404697
  misc_feature (1)..(93): Pfam Name: Pfam Description:  Auxin responsive protein
  misc_feature (1)..(114): NCBI GI NO: 21592571 NR Description: auxin-induced protein, putative
  misc_feature (1)..(114): NCBI GI NO: 20149052 NR Description: auxin-induced SAUR-like protein [Capsicum annuum]
  misc_feature (1)..(114): NCBI GI NO: 18397101 NR Description: auxin-induced protein, putative
  misc_feature (1)..(109): NCBI GI NO: 21553494 NR Description: auxin-induced protein, putative
  misc_feature (1)..(109): NCBI GI NO: 18397103 NR Description: auxin-induced protein, putative
  misc_feature (1)..(114): NCBI GI NO: 25403067 NR Description: probable auxin-induced protein, 48806-48408
  misc_feature (1)..(109): NCBI GI NO: 38603942 NR Description: At1g29420 [Arabidopsis thaliana]
  misc_feature (1)..(109): NCBI GI NO: 15218951 NR Description: auxin-induced protein, putative
  misc_feature (1)..(120): NCBI GI NO: 26452075 NR Description: putative auxin-induced protein
  misc_feature (1)..(120): NCBI GI NO: 15218924 NR Description: auxin-induced protein, putative
MEALGRKRRLAWGTAAAAKKADRCCASVASKGHCAVYTTDGARFEVPLACLGTEVFAELLHMSREEFGFAGGHGRILLPCDAMVMEYALCLLRRGASADLEKAFLSTMAMSCHSADHAAAPYVAACC

SEQ ID NO: 33188 - DNA, 1493 bp, Zea mays subsp. mays
  misc_feature (1)..(1493): Ceres Seq. ID no. 12369010
gagatggtctaacgtgatgtcatagggtgattgtcttctgttctgtctggcagttttttttttttgagaatccgatgcgatcaaggctagaattgtttatcgctcgcgggcgggaagtgtggtgacgcgtctcgatccgcgcaccgcttgggcttctcgtaggagtagtggagtactgctcagcctgtcaccgtcagcgtatgttcttgttccagttcctatttttactccaagtccactagggatcctatccagattcgtggggacactctcttcgagttccaggcttccaaggtccaagggccgtagcatttgtctggttggattgggttgttccgcttgggtagccgggtgggatcggaatctgtgtggcacccatggcggcggtcgaggggacgaagaagaaggtaatcatcgacaccgaccccggaattgatgacgcgatggccatcttcttggcgctgcggtcgccggagctggaggtgctgggcctcaccactaccttcggcaacgtccacaccgccctcgccacgcgcaacgcgctccacctgctggaggctgttggcaggactgacatccccgtggcagagggatcccatctaacgatcaagaaagccaccaaattgaggatcgcaagcttcgtccacggttcagacggcctgggaaatcaggacttccctccaccagctaccaagcctgtaaatcagtctgctgctgccttcctggttgagcaggcaaatctgtaccctggtcaagttaccgttgtcgccctcggcccacttaccaaccttgctctggcagtcgagcttgatcctgcgttcccggagaagatagggcagattattattcttggcggtgcgtattcagttaatggaaacgtgaaccctgcagctgaggcgaacatcttcggggatcctgacgcggcagatatcgtgttcacctgcggtgctgatattttggccgtgggactaaatgtaacccaccaagtcgttctaaccgatgctgaccgggagaagcttgagcagtgtgacagcaaatacgcccgctacttgtgcaagctaatgggcgtttattttgattaccacagggacgcctacttcataaaaggagcgtatcttcacgatccaacgacggttattgctgcggtgaacccatcgctgctgacttacacagaaggcgttgtgagggtacagacggtcgggatcaccaagggccttactgttttcgacaacaccaagaaaaggtacggagagatcacggcctggagtggcatgcccaccgtgaaggtcgctgtcaccgtcgatgcccctgccgtggtagagctgatagtgcagaggctgatgaccgatgactagcaacaacgccaccagctgatccggttgggatcatcatgtggttatgtgcgtgcttggtgtttacgtacagtttatatatgcttgacacgtttgctgatgcttctgagagaacgtgattaaattaaattaaacttgatt

SEQ ID NO: 33189 - protein, 325 aa, Zea mays subsp. mays
  peptide (1)..(325): Ceres Seq. ID no. 12369011
  misc_feature (8)..(318): Pfam Name: Pfam Description:  Inosine-uridine preferring nucleoside hydrolase
  misc_feature (7)..(325): NCBI GI NO: 30089728 NR Description: putative inosine-uridine preferring nucleosidehydrolase
  misc_feature (6)..(322): NCBI GI NO: 18390550 NR Description: expressed protein; protein id: At1g05620
  misc_feature (6)..(208): NCBI GI NO: 25321071 NR Description: hypothetical protein
  misc_feature (206)..(322): NCBI GI NO: 25321071 NR Description: hypothetical protein
  misc_feature (4)..(322): NCBI GI NO: 18404099 NR Description: expressed protein; protein id: At2g36310
  misc_feature (23)..(268): NCBI GI NO: 25321061 NR Description: hypothetical protein At2g36310
  misc_feature (242)..(297): NCBI GI NO: 25321061 NR Description: hypothetical protein At2g36310
  misc_feature (5)..(317): NCBI GI NO: 15888904 NR Description: AGR_C_2923p [Agrobacterium tumefaciens]
  misc_feature (5)..(317): NCBI GI NO: 17935486 NR Description: inosine-uridine preferring nucleoside hydrolase
  misc_feature (10)..(317): NCBI GI NO: 15966659 NR Description: PUTATIVE NUCLEOSIDE HYDROLASE PROTEIN
MAAVEGTKKKVIIDTDPGIDDAMAIFLALRSPELEVLGLTTTFGNVHTALATRNALHLLEAVGRTDIPVAEGSHLTIKKATKLRIASFVHGSDGLGNQDFPPPATKPVNQSAAAFLVEQANLYPGQVTVVALGPLTNLALAVELDPAFPEKIGQIIILGGAYSVNGNVNPAAEANIFGDPDAADIVFTCGADILAVGLNVTHQVVLTDADREKLEQCDSKYARYLCKLMGVYFDYHRDAYFIKGAYLHDPTTVIAAVNPSLLTYTEGVVRVQTVGITKGLTVFDNTKKRYGEITAWSGMPTVKVAVTVDAPAVVELIVQRLMTDD

SEQ ID NO: 33190 - protein, 303 aa, Zea mays subsp. mays
  peptide (1)..(303): Ceres Seq. ID no. 12369012
  misc_feature (1)..(296): Pfam Name: Pfam Description:  Inosine-uridine preferring nucleoside hydrolase
  misc_feature (1)..(303): NCBI GI NO: 30089728 NR Description: putative inosine-uridine preferring nucleosidehydrolase
  misc_feature (1)..(300): NCBI GI NO: 18390550 NR Description: expressed protein; protein id: At1g05620
  misc_feature (1)..(186): NCBI GI NO: 25321071 NR Description: hypothetical protein
  misc_feature (184)..(300): NCBI GI NO: 25321071 NR Description: hypothetical protein
  misc_feature (1)..(300): NCBI GI NO: 18404099 NR Description: expressed protein; protein id: At2g36310
  misc_feature (1)..(246): NCBI GI NO: 25321061 NR Description: hypothetical protein At2g36310
  misc_feature (220)..(275): NCBI GI NO: 25321061 NR Description: hypothetical protein At2g36310
  misc_feature (1)..(295): NCBI GI NO: 15888904 NR Description: AGR_C_2923p [Agrobacterium tumefaciens]
  misc_feature (1)..(295): NCBI GI NO: 17935486 NR Description: inosine-uridine preferring nucleoside hydrolase
  misc_feature (1)..(295): NCBI GI NO: 15966659 NR Description: PUTATIVE NUCLEOSIDE HYDROLASE PROTEIN
MAIFLALRSPELEVLGLTTTFGNVHTALATRNALHLLEAVGRTDIPVAEGSHLTIKKATKLRIASFVHGSDGLGNQDFPPPATKPVNQSAAAFLVEQANLYPGQVTVVALGPLTNLALAVELDPAFPEKIGQIIILGGAYSVNGNVNPAAEANIFGDPDAADIVFTCGADILAVGLNVTHQVVLTDADREKLEQCDSKYARYLCKLMGVYFDYHRDAYFIKGAYLHDPTTVIAAVNPSLLTYTEGVVRVQTVGITKGLTVFDNTKKRYGEITAWSGMPTVKVAVTVDAPAVVELIVQRLMTDD

SEQ ID NO: 33191 - DNA, 1265 bp, Zea mays subsp. mays
  misc_feature (1)..(1265): Ceres Seq. ID no. 12374386
gtctgccgagccgagtgttcctttctagccttcacttctcagcgcggcagccttcgatcccccgactgcagccgccagccgcaccatggagcaagccgccatgccgcaggttccccgcgtcaagctcggcatccaggggcttgaggtgtcgaagctggggttcgggtgcatggggctcacgggcacctacaacgcgccgctcggcgacgaggccgtcgccgccgtcgtcgcgcacgccttccgccgcgggatcaccttcttcgacacctccgatgcctacgggccccgcaccaacgagaccctcctggggaaggcgctcaagcagctgccgagggagcaggtgcaggtggccaccaagttcgggataggccagggcgccgctggcatgaccgtgtgcggcacgcccgagtacgtacgcgcctgctgcgaggccagcctgcgccgcctcgacgccggctacatcgacctctactaccagcaccgcgtcgacaccaccgtccccatcgaggatacgattggtgagctcaagaagttggtggaggaggggaaggtcaagtacatcggcttgtcagaggccagcccagacacaatccgccgtgcgcacgccgtgcatcccatcaccgccgtgcagatggagtggtcgctctggtcccgagacatcgagcccgagatcgtgccactctgcagagaattggggattggaattgtggcttacagtccaattggccgtggattttttggtggaagaggagtgacacagcaagtttcttctgaatctagtctgcaaaggcatccaagatttacaacagaaagcttggagaagaacaagcagatttacctgaaaatagaagatttggcgaagaagtaccagtgcagcccagctcagctagctctagcctgggttctgcatcaaggggatgatgtggttcctataccagggacaacaaaaacgaagaacctagatgccaacgttgactccttgaaggtgaagctcacagctgaggacctgaaggaaattggcagccagatacgtgcagaagatgtggctggtggaagacaatacaattcctatgcacatacctcctggaagtacgcagatacaccaaaaaagtgaagttctggtcctggaaaccttgtagcaatcacaggcgtatgcaaatgttgaactatttccctgcatttgagccggaatcgtacgatgatgcatcttgtgaacatgcggcactaataaatcgagacgaagaataatgtgttttccatcagtg

SEQ ID NO: 33192 - protein, 342 aa, Zea mays subsp. mays
  peptide (1)..(342): Ceres Seq. ID no. 12374387
  misc_feature (8)..(340): NCBI GI NO: 37534402 NR Description: putative polyprotein
  misc_feature (202)..(342): NCBI GI NO: 34912706 NR Description: putative auxin-induced protein
  misc_feature (21)..(143): NCBI GI NO: 34912706 NR Description: putative auxin-induced protein
  misc_feature (8)..(340): NCBI GI NO: 15219786 NR Description: auxin-induced protein, putative
  misc_feature (5)..(340): NCBI GI NO: 38344997 NR Description: OSJNBa0008A08.11
  misc_feature (9)..(340): NCBI GI NO: 18406861 NR Description: auxin-induced protein, putative
  misc_feature (9)..(340): NCBI GI NO: 6562980 NR Description: auxin-induced atb2 [Arabidopsis thaliana]
  misc_feature (8)..(340): NCBI GI NO: 30102704 NR Description: At1g60680 [Arabidopsis thaliana]
  misc_feature (9)..(340): NCBI GI NO: 30696459 NR Description: aldo/keto reductase family [Arabidopsis thaliana]
  misc_feature (9)..(340): NCBI GI NO: 25316216 NR Description: hypothetical protein F8A5.24
MEQAAMPQVPRVKLGIQGLEVSKLGFGCMGLTGTYNAPLGDEAVAAVVAHAFRRGITFFDTSDAYGPRTNETLLGKALKQLPREQVQVATKFGIGQGAAGMTVCGTPEYVRACCEASLRRLDAGYIDLYYQHRVDTTVPIEDTIGELKKLVEEGKVKYIGLSEASPDTIRRAHAVHPITAVQMEWSLWSRDIEPEIVPLCRELGIGIVAYSPIGRGFFGGRGVTQQVSSESSLQRHPRFTTESLEKNKQIYLKIEDLAKKYQCSPAQLALAWVLHQGDDVVPIPGTTKTKNLDANVDSLKVKLTAEDLKEIGSQIRAEDVAGGRQYNSYAHTSWKYADTPKK

SEQ ID NO: 33193 - protein, 337 aa, Zea mays subsp. mays
  peptide (1)..(337): Ceres Seq. ID no. 12374388
  misc_feature (3)..(335): NCBI GI NO: 37534402 NR Description: putative polyprotein
  misc_feature (197)..(337): NCBI GI NO: 34912706 NR Description: putative auxin-induced protein
  misc_feature (16)..(138): NCBI GI NO: 34912706 NR Description: putative auxin-induced protein
  misc_feature (3)..(335): NCBI GI NO: 15219786 NR Description: auxin-induced protein, putative
  misc_feature (1)..(335): NCBI GI NO: 38344997 NR Description: OSJNBa0008A08.11
  misc_feature (4)..(335): NCBI GI NO: 18406861 NR Description: auxin-induced protein, putative
  misc_feature (4)..(335): NCBI GI NO: 6562980 NR Description: auxin-induced atb2 [Arabidopsis thaliana]
  misc_feature (3)..(335): NCBI GI NO: 30102704 NR Description: At1g60680 [Arabidopsis thaliana]
  misc_feature (4)..(335): NCBI GI NO: 30696459 NR Description: aldo/keto reductase family [Arabidopsis thaliana]
  misc_feature (4)..(335): NCBI GI NO: 25316216 NR Description: hypothetical protein F8A5.24
MPQVPRVKLGIQGLEVSKLGFGCMGLTGTYNAPLGDEAVAAVVAHAFRRGITFFDTSDAYGPRTNETLLGKALKQLPREQVQVATKFGIGQGAAGMTVCGTPEYVRACCEASLRRLDAGYIDLYYQHRVDTTVPIEDTIGELKKLVEEGKVKYIGLSEASPDTIRRAHAVHPITAVQMEWSLWSRDIEPEIVPLCRELGIGIVAYSPIGRGFFGGRGVTQQVSSESSLQRHPRFTTESLEKNKQIYLKIEDLAKKYQCSPAQLALAWVLHQGDDVVPIPGTTKTKNLDANVDSLKVKLTAEDLKEIGSQIRAEDVAGGRQYNSYAHTSWKYADTPKK

SEQ ID NO: 33194 - protein, 314 aa, Zea mays subsp. mays
  peptide (1)..(314): Ceres Seq. ID no. 12374389
  misc_feature (1)..(312): NCBI GI NO: 37534402 NR Description: putative polyprotein
  misc_feature (174)..(314): NCBI GI NO: 34912706 NR Description: putative auxin-induced protein
  misc_feature (1)..(115): NCBI GI NO: 34912706 NR Description: putative auxin-induced protein
  misc_feature (1)..(312): NCBI GI NO: 15219786 NR Description: auxin-induced protein, putative
  misc_feature (1)..(312): NCBI GI NO: 38344997 NR Description: OSJNBa0008A08.11
  misc_feature (1)..(312): NCBI GI NO: 18406861 NR Description: auxin-induced protein, putative
  misc_feature (1)..(312): NCBI GI NO: 6562980 NR Description: auxin-induced atb2 [Arabidopsis thaliana]
  misc_feature (1)..(312): NCBI GI NO: 30102704 NR Description: At1g60680 [Arabidopsis thaliana]
  misc_feature (1)..(312): NCBI GI NO: 30696459 NR Description: aldo/keto reductase family [Arabidopsis thaliana]
  misc_feature (1)..(312): NCBI GI NO: 25316216 NR Description: hypothetical protein F8A5.24
MGLTGTYNAPLGDEAVAAVVAHAFRRGITFFDTSDAYGPRTNETLLGKALKQLPREQVQVATKFGIGQGAAGMTVCGTPEYVRACCEASLRRLDAGYIDLYYQHRVDTTVPIEDTIGELKKLVEEGKVKYIGLSEASPDTIRRAHAVHPITAVQMEWSLWSRDIEPEIVPLCRELGIGIVAYSPIGRGFFGGRGVTQQVSSESSLQRHPRFTTESLEKNKQIYLKIEDLAKKYQCSPAQLALAWVLHQGDDVVPIPGTTKTKNLDANVDSLKVKLTAEDLKEIGSQIRAEDVAGGRQYNSYAHTSWKYADTPKK

SEQ ID NO: 33195 - DNA, 1754 bp, Zea mays subsp. mays
  misc_feature (1)..(1754): Ceres Seq. ID no. 12412767
gttggtaatactgtacaaattttcgtctagttgcgtgctctcgctagggttccgccccgccggcatacccgaccataaaccccgcgccgcccgccagcaaccttcagtctcatttctcacgcgtagctcggacaggcagcttgaagctcgcgaaccagccatggcgaatggggacgcggccgtggaggtcggcgggaacggggagcaggaagccgcggcgcgccaggcgtcgacgttcgcggagctgggtatctgcgcggagctggtggaggcgtgcgacgccatggggtggaaggagcccaccaggatccaggccgaggccatcccccacgcgctccaagggaaggacctgatcgctctggcgcagacggggtccgggaagacgggcgcgttcgcgctgcccatcctgcaggagctgctcagcaaccgccaggctgaacagtctttcttcgcttgcgtgctctcgccaacaagagagctggcgattcagatcgcagagcagtttgaggcccttggatcagctattggtttgcgttgctcagtgcttgttggaggagtggatcgggtgcagcaagtgttatccatcggaaaacgtccacatattgtagttggaactcctggccgtcttttggaccatttgacagagactaaaggttttagccttaagaaaatcaagtatttggtattggatgaagctgataaattacttaatgtggagtttgagaaatcccttgatgacattctaagcgagatgcctaaagacaggaggactttccttttttcagcgactatgaccaaaaaggtaaataaactgcaacgtgcttgtctcaggaatcctgctaaggttgaagtgtcctccaaatattctacagtagattcacttaaacaagagttctattttgttcctgcagatgacaaggattgctatcttcttcatgttctgaacgagaggctggagagcatgatcatgatctttgtgcgcacctgtgaatctactagactccttgctcttatgttgaggaatcttggtttgaaagctatgtctatcagtggccagatgagtcaggacaagagattaggtgctttgaacagattcaaagcgaaagattgcaatatccttatttgcactgatgtagcaagtcgcggcctcgacattcaaggagttgatatggtcatcaactatgatattccaatcaattctaaggattatgttcatcgggtgggcaggactgcacgtgcagggcgatcaggatacgctgtatctttggtgaaccaatatgaagcccagtggttcgtgctgatcgagcagctccttggcaagaaaattgaccagtgtaaggtggacagagatgaagtccttatacttaaagggcccatatccgatgcaaagagaattgcgctgacgaaattgaaggattccggtggccacaagaagcggagaaatgtgggagatgacgatgaagaggttgaagatcattcttctcattctagaagaccgaaatccttgaagagatcaaacagacgatgaaggctctggagcatgtctggactgcctcgtttcgtgcaagtcctttgtggttcagcgcagatccaccctgtggtggtttggagtgatgctttgcctatttatactagggccagttaagacgttcacttgacaccattccttgggttgaaagcaagtctcccccaattttgtcatcccgacccaaaccatgcttacataaggaatcattttttgctgatggctgccg

SEQ ID NO: 33196 - protein, 508 aa, Zea mays subsp. mays
  peptide (1)..(508): Ceres Seq. ID no. 12412768
  misc_feature (90)..(297): Pfam Name: Pfam Description:  DEAD/DEAH box helicase
  misc_feature (39)..(508): NCBI GI NO: 31126733 NR Description: putative RNA helicase
  misc_feature (78)..(490): NCBI GI NO: 18424420 NR Description: DEAD/DEAH box RNA helicase protein, putative
  misc_feature (78)..(490): NCBI GI NO: 21593647 NR Description: replication protein A1-like [Arabidopsis thaliana]
  misc_feature (78)..(490): NCBI GI NO: 26450667 NR Description: putative replication protein A1
  misc_feature (67)..(508): NCBI GI NO: 34899100 NR Description: ATP-dependent helicase pitchoune
  misc_feature (43)..(487): NCBI GI NO: 21464402 NR Description: RE27528p [Drosophila melanogaster]
  misc_feature (43)..(487): NCBI GI NO: 24585582 NR Description: CG9253-PA [Drosophila melanogaster]
  misc_feature (66)..(488): NCBI GI NO: 27229058 NR Description: RIKEN cDNA 4930588A18 [Mus musculus]
  misc_feature (143)..(490): NCBI GI NO: 11358794 NR Description: RNA helicase RH10
  misc_feature (75)..(487): NCBI GI NO: 11121196 NR Description: DEAD box protein [Homo sapiens]
LVILYKFSSSCVLSLGFRPAGIPDHKPRAARQQPSVSFLTRSSDRQLEAREPAMANGDAAVEVGGNGEQEAAARQASTFAELGICAELVEACDAMGWKEPTRIQAEAIPHALQGKDLIALAQTGSGKTGAFALPILQELLSNRQAEQSFFACVLSPTRELAIQIAEQFEALGSAIGLRCSVLVGGVDRVQQVLSIGKRPHIVVGTPGRLLDHLTETKGFSLKKIKYLVLDEADKLLNVEFEKSLDDILSEMPKDRRTFLFSATMTKKVNKLQRACLRNPAKVEVSSKYSTVDSLKQEFYFVPADDKDCYLLHVLNERLESMIMIFVRTCESTRLLALMLRNLGLKAMSISGQMSQDKRLGALNRFKAKDCNILICTDVASRGLDIQGVDMVINYDIPINSKDYVHRVGRTARAGRSGYAVSLVNQYEAQWFVLIEQLLGKKIDQCKVDRDEVLILKGPISDAKRIALTKLKDSGGHKKRRNVGDDDEEVEDHSSHSRRPKSLKRSNRR

SEQ ID NO: 33197 - protein, 455 aa, Zea mays subsp. mays
  peptide (1)..(455): Ceres Seq. ID no. 12412769
  misc_feature (37)..(244): Pfam Name: Pfam Description:  DEAD/DEAH box helicase
  misc_feature (1)..(455): NCBI GI NO: 31126733 NR Description: putative RNA helicase
  misc_feature (25)..(437): NCBI GI NO: 18424420 NR Description: DEAD/DEAH box RNA helicase protein, putative
  misc_feature (25)..(437): NCBI GI NO: 21593647 NR Description: replication protein A1-like [Arabidopsis thaliana]
  misc_feature (25)..(437): NCBI GI NO: 26450667 NR Description: putative replication protein A1
  misc_feature (14)..(455): NCBI GI NO: 34899100 NR Description: ATP-dependent helicase pitchoune
  misc_feature (1)..(434): NCBI GI NO: 21464402 NR Description: RE27528p [Drosophila melanogaster]
  misc_feature (1)..(434): NCBI GI NO: 24585582 NR Description: CG9253-PA [Drosophila melanogaster]
  misc_feature (13)..(435): NCBI GI NO: 27229058 NR Description: RIKEN cDNA 4930588A18 [Mus musculus]
  misc_feature (90)..(437): NCBI GI NO: 11358794 NR Description: RNA helicase RH10
  misc_feature (22)..(434): NCBI GI NO: 11121196 NR Description: DEAD box protein [Homo sapiens]
MANGDAAVEVGGNGEQEAAARQASTFAELGICAELVEACDAMGWKEPTRIQAEAIPHALQGKDLIALAQTGSGKTGAFALPILQELLSNRQAEQSFFACVLSPTRELAIQIAEQFEALGSAIGLRCSVLVGGVDRVQQVLSIGKRPHIVVGTPGRLLDHLTETKGFSLKKIKYLVLDEADKLLNVEFEKSLDDILSEMPKDRRTFLFSATMTKKVNKLQRACLRNPAKVEVSSKYSTVDSLKQEFYFVPADDKDCYLLHVLNERLESMIMIFVRTCESTRLLALMLRNLGLKAMSISGQMSQDKRLGALNRFKAKDCNILICTDVASRGLDIQGVDMVINYDIPINSKDYVHRVGRTARAGRSGYAVSLVNQYEAQWFVLIEQLLGKKIDQCKVDRDEVLILKGPISDAKRIALTKLKDSGGHKKRRNVGDDDEEVEDHSSHSRRPKSLKRSNRR

SEQ ID NO: 33198 - protein, 414 aa, Zea mays subsp. mays
  peptide (1)..(414): Ceres Seq. ID no. 12412770
  misc_feature (1)..(203): Pfam Name: Pfam Description:  DEAD/DEAH box helicase
  misc_feature (1)..(414): NCBI GI NO: 31126733 NR Description: putative RNA helicase
  misc_feature (1)..(396): NCBI GI NO: 18424420 NR Description: DEAD/DEAH box RNA helicase protein, putative
  misc_feature (1)..(396): NCBI GI NO: 21593647 NR Description: replication protein A1-like [Arabidopsis thaliana]
  misc_feature (1)..(396): NCBI GI NO: 26450667 NR Description: putative replication protein A1
  misc_feature (1)..(414): NCBI GI NO: 34899100 NR Description: ATP-dependent helicase pitchoune
  misc_feature (1)..(393): NCBI GI NO: 21464402 NR Description: RE27528p [Drosophila melanogaster]
  misc_feature (1)..(393): NCBI GI NO: 24585582 NR Description: CG9253-PA [Drosophila melanogaster]
  misc_feature (1)..(394): NCBI GI NO: 27229058 NR Description: RIKEN cDNA 4930588A18 [Mus musculus]
  misc_feature (49)..(396): NCBI GI NO: 11358794 NR Description: RNA helicase RH10
  misc_feature (1)..(393): NCBI GI NO: 11121196 NR Description: DEAD box protein [Homo sapiens]
MGWKEPTRIQAEAIPHALQGKDLIALAQTGSGKTGAFALPILQELLSNRQAEQSFFACVLSPTRELAIQIAEQFEALGSAIGLRCSVLVGGVDRVQQVLSIGKRPHIVVGTPGRLLDHLTETKGFSLKKIKYLVLDEADKLLNVEFEKSLDDILSEMPKDRRTFLFSATMTKKVNKLQRACLRNPAKVEVSSKYSTVDSLKQEFYFVPADDKDCYLLHVLNERLESMIMIFVRTCESTRLLALMLRNLGLKAMSISGQMSQDKRLGALNRFKAKDCNILICTDVASRGLDIQGVDMVINYDIPINSKDYVHRVGRTARAGRSGYAVSLVNQYEAQWFVLIEQLLGKKIDQCKVDRDEVLILKGPISDAKRIALTKLKDSGGHKKRRNVGDDDEEVEDHSSHSRRPKSLKRSNRR

SEQ ID NO: 33199 - DNA, 1458 bp, Zea mays subsp. mays
  misc_feature (1)..(1458): Ceres Seq. ID no. 12373464
aggagtagtagcaaccaagctaccctatctataagtactacggctcgaatgtgtcggccgacggcaatcaccattacatttgatccgccgcgcgcggcccgatcgacgagcgagagcctcattcacaccccgatctagctagctagctagtttacgaaaaaaaaatctggccacagggatgcggtggcggctgcagccggcgccggcgccgacgctgctcctcgtcctgctggtggccaccgtcgccgccgtcgtcgtggtggtgcgggcggagccccaggtgccgtgctacttcgtgttcggggactcgctcgtggacaacggcaacaacaacgacatcgcgtcgctggcgcgggccaactacccgccctacggcatcgacttcgccgccggccccaccggccgtttcagcaatggcctcaccaccgtcgacgctatatctcggcttctgggcttcgacgattacatccccgcgtacgctggcgcgagcggcgatcagctcctcaccggcgtcaacttcgcttccgccgcagccgggatccgtgacgagaccggccagcaactggggcaacggatcagcttcggcgggcagctccagaactaccaggcggcggtgcagcagctggtgagcatcctgggcgacgaggactccgcggccagccacctgagccagtgcatcttcacggtgggcatgggcagcaacgactacctcaacaactacttcatgccggcggtctactccaccagccagcagtacacgccggagcagtacgccgacgtgctcatcaaccagtactcgcagcagctccggaccctgtacagctacggggccaggaaggtggcgctcatgggcgtggggcaggtcgggtgcagccccaacgagctggcgcagcgcagcaccgacggcaccacctgcgtgccgcagatcaacggcgccatcgacatcttcaaccggaagctcgtcgccctcgtcgaccagttcaacgcgctgccgggggcgcacttcacctacataaacgtgtatgggatcttccaggacatcctgagagccccagggtcgcacggtctgacggtgacgaaccaagggtgctgcggcgtcggacggaataacgggcaggtgacgtgcttgccgttccagacgccgtgcgccaacaggaacgagtacctcttctgggacgctttccaccccacggaggcggccaacatcctcgtcggtcggagggcgtacagcgcggcgctgccgtccgacgtccaccccatggatctgcgcacgctcgccaggatctagctgtatggatcatgtgaactcgtgaagagaagcaaagcttacagcgtcttccttttttttgttctttgtttcccctcgtgattgtattgcttaccactcgcaaagggacgtatggtccctccatctaaactatatatataaacatgatatatactccctcgctcccgccc

SEQ ID NO: 33200 - protein, 369 aa, Zea mays subsp. mays
  peptide (1)..(369): Ceres Seq. ID no. 12373465
  misc_feature (38)..(349): Pfam Name: Pfam Description:  GDSL-like Lipase/Acylhydrolase
  misc_feature (11)..(369): NCBI GI NO: 34909504 NR Description: putative GDSL-motif lipase/hydrolase-like protein
  misc_feature (13)..(369): NCBI GI NO: 34910808 NR Description: GDSL-motif lipase/hydrolase-like protein
  misc_feature (14)..(369): NCBI GI NO: 15242458 NR Description: GDSL-motif lipase/hydrolase-like protein
  misc_feature (14)..(369): NCBI GI NO: 21553940 NR Description: GDSL-motif lipase/hydrolase-like protein
  misc_feature (1)..(369): NCBI GI NO: 7485419 NR Description: hypothetical protein F13C5
  misc_feature (15)..(369): NCBI GI NO: 18415211 NR Description: Expressed protein; protein id: At4g18970
  misc_feature (29)..(369): NCBI GI NO: 15220512 NR Description: lipase/hydrolase, putative; protein id:At1g29660
  misc_feature (29)..(369): NCBI GI NO: 21594055 NR Description: lipase/hydrolase, putative [Arabidopsis thaliana]
  misc_feature (15)..(369): NCBI GI NO: 21618199 NR Description: GDSL-motif lipase/hydrolase-like protein
  misc_feature (15)..(369): NCBI GI NO: 21592417 NR Description: lipase/hydrolase, putative [Arabidopsis thaliana]
MRWRLQPAPAPTLLLVLLVATVAAVVVVVRAEPQVPCYFVFGDSLVDNGNNNDIASLARANYPPYGIDFAAGPTGRFSNGLTTVDAISRLLGFDDYIPAYAGASGDQLLTGVNFASAAAGIRDETGQQLGQRISFGGQLQNYQAAVQQLVSILGDEDSAASHLSQCIFTVGMGSNDYLNNYFMPAVYSTSQQYTPEQYADVLINQYSQQLRTLYSYGARKVALMGVGQVGCSPNELAQRSTDGTTCVPQINGAIDIFNRKLVALVDQFNALPGAHFTYINVYGIFQDILRAPGSHGLTVTNQGCCGVGRNNGQVTCLPFQTPCANRNEYLFWDAFHPTEAANILVGRRAYSAALPSDVHPMDLRTLARI

SEQ ID NO: 33201 - protein, 198 aa, Zea mays subsp. mays
  peptide (1)..(198): Ceres Seq. ID no. 12373466
  misc_feature (1)..(178): Pfam Name: Pfam Description:  GDSL-like Lipase/Acylhydrolase
  misc_feature (1)..(198): NCBI GI NO: 34909504 NR Description: putative GDSL-motif lipase/hydrolase-like protein
  misc_feature (1)..(198): NCBI GI NO: 34910808 NR Description: GDSL-motif lipase/hydrolase-like protein
  misc_feature (1)..(198): NCBI GI NO: 15242458 NR Description: GDSL-motif lipase/hydrolase-like protein
  misc_feature (1)..(198): NCBI GI NO: 21553940 NR Description: GDSL-motif lipase/hydrolase-like protein
  misc_feature (1)..(198): NCBI GI NO: 7485419 NR Description: hypothetical protein F13C5
  misc_feature (1)..(198): NCBI GI NO: 18415211 NR Description: Expressed protein; protein id: At4g18970
  misc_feature (1)..(198): NCBI GI NO: 15220512 NR Description: lipase/hydrolase, putative; protein id:At1g29660
  misc_feature (1)..(198): NCBI GI NO: 21594055 NR Description: lipase/hydrolase, putative [Arabidopsis thaliana]
  misc_feature (1)..(198): NCBI GI NO: 21618199 NR Description: GDSL-motif lipase/hydrolase-like protein
  misc_feature (1)..(198): NCBI GI NO: 21592417 NR Description: lipase/hydrolase, putative [Arabidopsis thaliana]
MGSNDYLNNYFMPAVYSTSQQYTPEQYADVLINQYSQQLRTLYSYGARKVALMGVGQVGCSPNELAQRSTDGTTCVPQINGAIDIFNRKLVALVDQFNALPGAHFTYINVYGIFQDILRAPGSHGLTVTNQGCCGVGRNNGQVTCLPFQTPCANRNEYLFWDAFHPTEAANILVGRRAYSAALPSDVHPMDLRTLARI

SEQ ID NO: 33202 - protein, 187 aa, Zea mays subsp. mays
  peptide (1)..(187): Ceres Seq. ID no. 12373467
  misc_feature (1)..(167): Pfam Name: Pfam Description:  GDSL-like Lipase/Acylhydrolase
  misc_feature (1)..(187): NCBI GI NO: 34909504 NR Description: putative GDSL-motif lipase/hydrolase-like protein
  misc_feature (1)..(187): NCBI GI NO: 34910808 NR Description: GDSL-motif lipase/hydrolase-like protein
  misc_feature (1)..(187): NCBI GI NO: 15242458 NR Description: GDSL-motif lipase/hydrolase-like protein
  misc_feature (1)..(187): NCBI GI NO: 21553940 NR Description: GDSL-motif lipase/hydrolase-like protein
  misc_feature (1)..(187): NCBI GI NO: 7485419 NR Description: hypothetical protein F13C5
  misc_feature (1)..(187): NCBI GI NO: 18415211 NR Description: Expressed protein; protein id: At4g18970
  misc_feature (1)..(187): NCBI GI NO: 15220512 NR Description: lipase/hydrolase, putative; protein id:At1g29660
  misc_feature (1)..(187): NCBI GI NO: 21594055 NR Description: lipase/hydrolase, putative [Arabidopsis thaliana]
  misc_feature (1)..(187): NCBI GI NO: 21618199 NR Description: GDSL-motif lipase/hydrolase-like protein
  misc_feature (1)..(187): NCBI GI NO: 21592417 NR Description: lipase/hydrolase, putative [Arabidopsis thaliana]
MPAVYSTSQQYTPEQYADVLINQYSQQLRTLYSYGARKVALMGVGQVGCSPNELAQRSTDGTTCVPQINGAIDIFNRKLVALVDQFNALPGAHFTYINVYGIFQDILRAPGSHGLTVTNQGCCGVGRNNGQVTCLPFQTPCANRNEYLFWDAFHPTEAANILVGRRAYSAALPSDVHPMDLRTLARI

SEQ ID NO: 33203 - DNA, 1563 bp, Zea mays subsp. mays
  misc_feature (1)..(1563): Ceres Seq. ID no. 12351717
actcccccgcctcgccgccagtcagattcaccaccggctcccctgcacaaccgcgtccgcgctgcaccaccaccgttcatcgaggaggaggggggacggagaccacggacatggagagatctcaacggcagtctcctccgccaccgtcgccgtcctcctcctcgtcctccgtctccgcggacaccgtcctcgtccctcccggaaagaggcggagggcggcgacggccaaggccggcgccgagcctaataagaggatccgcaaggaccccgccgccgccgccgcggggaagaggagctccgtctacaggggagtcaccaggcacaggtggacgggcaggttcgaggcgcatctctgggacaagcactgcctcgccgcgctccacaacaagaagaaaggcaggcaagtctacctgggggcgtatgacagcgaggaggcagctgctcgtgcctatgacctcgcagctctcaagtactggggtcctgagactctgctcaacttccctgtggaggattactccagcgagatgccggagatggaggccgtttcccgggaggagtacctggcctccctccgccgcaggagcagcggcttctccaggggcgtctccaagtacagaggcgtcgccaggcatcaccacaacgggaggtgggaggcacggattgggcgagtctttgggaacaagtacctctacttgggaacatttgacactcaagaagaggcagccaaggcctatgaccttgcggccattgaataccgtggcgtcaatgctgtaaccaacttcgacatcagctgctacctggaccacccgctgttcctggcacagctccaacaggagccacaggtggtgccggcactcaaccaagaacctcaacctgatcagagcgaaaccggaactacagagcaagagccggagtcaagcgaagccaagacaccggatggcagtgcagaacccgatgagaacgcggtgcctgacgacaccgcggagcccctcagcacagtcgacgacagcatcgaagagggcttatggagcccttgcatggattacgagctagacaccatgtcgagaccaaactttggcagctcaatcaatctgagcgagtggttcgctgacgcagacttcgactgcaacatcgggtgcctgttcgatgggtgttctgcggctgacgaaggaagcaaggatggtgtaggtctggcagatttcagtctgtttgaggcaggtgatgtccagctgaaggatgttctttcggatatggaagaggggatacaacctccagcgatgatcagtgtgtgcaactaattctggaacccgaggaggttttcgctttccaggtgtcctgtcttgggtaatccttgatctgtctaatgccacagtgccactgcaccagagcagctgagaactttcttgtagaaagcccatggcagtttggcgttagacaagtgtgtcgatgttctttaattctttgaatttgcccctaggctgcttggctaacgttaagggtttgtcattgtctcacttagcctagattcaactaatcacatcctgaatctgaagtggttgtgct

SEQ ID NO: 33204 - protein, 431 aa, Zea mays subsp. mays
  peptide (1)..(431): Ceres Seq. ID no. 12351718
  misc_feature (98)..(172): Pfam Name: Pfam Description:  AP2 domain
  misc_feature (83)..(338): NCBI GI NO: 18394319 NR Description: ovule development protein, putative
  misc_feature (68)..(325): NCBI GI NO: 15219975 NR Description: ovule development protein, putative
  misc_feature (83)..(338): NCBI GI NO: 25518475 NR Description: hypothetical protein T24D18
  misc_feature (68)..(325): NCBI GI NO: 34221733 NR Description: putative AP2 domain transcription factor
  misc_feature (47)..(347): NCBI GI NO: 34909212 NR Description: P0425G02.29
  misc_feature (21)..(291): NCBI GI NO: 38492172 NR Description: ANT-like protein [Nicotiana tabacum]
  misc_feature (95)..(265): NCBI GI NO: 21069057 NR Description: BABY BOOM [Arabidopsis thaliana]
  misc_feature (22)..(265): NCBI GI NO: 21304227 NR Description: ovule development aintegumenta-like protein BNM3
  misc_feature (22)..(265): NCBI GI NO: 34907686 NR Description: putative ovule development protein aintegumenta-like protein
  misc_feature (73)..(369): NCBI GI NO: 15242120 NR Description: ovule development protein, putative
SPASPPVRFTTGSPAQPRPRCTTTVHRGGGGTETTDMERSQRQSPPPPSPSSSSSSVSADTVLVPPGKRRRAATAKAGAEPNKRIRKDPAAAAAGKRSSVYRGVTRHRWTGRFEAHLWDKHCLAALHNKKKGRQVYLGAYDSEEAAARAYDLAALKYWGPETLLNFPVEDYSSEMPEMEAVSREEYLASLRRRSSGFSRGVSKYRGVARHHHNGRWEARIGRVFGNKYLYLGTFDTQEEAAKAYDLAAIEYRGVNAVTNFDISCYLDHPLFLAQLQQEPQVVPALNQEPQPDQSETGTTEQEPESSEAKTPDGSAEPDENAVPDDTAEPLSTVDDSIEEGLWSPCMDYELDTMSRPNFGSSINLSEWFADADFDCNIGCLFDGCSAADEGSKDGVGLADFSLFEAGDVQLKDVLSDMEEGIQPPAMISVCN

SEQ ID NO: 33205 - protein, 395 aa, Zea mays subsp. mays
  peptide (1)..(395): Ceres Seq. ID no. 12351719
  misc_feature (62)..(136): Pfam Name: Pfam Description:  AP2 domain
  misc_feature (47)..(302): NCBI GI NO: 18394319 NR Description: ovule development protein, putative
  misc_feature (32)..(289): NCBI GI NO: 15219975 NR Description: ovule development protein, putative
  misc_feature (47)..(302): NCBI GI NO: 25518475 NR Description: hypothetical protein T24D18
  misc_feature (32)..(289): NCBI GI NO: 34221733 NR Description: putative AP2 domain transcription factor
  misc_feature (11)..(311): NCBI GI NO: 34909212 NR Description: P0425G02.29
  misc_feature (1)..(255): NCBI GI NO: 38492172 NR Description: ANT-like protein [Nicotiana tabacum]
  misc_feature (59)..(229): NCBI GI NO: 21069057 NR Description: BABY BOOM [Arabidopsis thaliana]
  misc_feature (1)..(229): NCBI GI NO: 21304227 NR Description: ovule development aintegumenta-like protein BNM3
  misc_feature (1)..(229): NCBI GI NO: 34907686 NR Description: putative ovule development protein aintegumenta-like protein
  misc_feature (37)..(333): NCBI GI NO: 15242120 NR Description: ovule development protein, putative
MERSQRQSPPPPSPSSSSSSVSADTVLVPPGKRRRAATAKAGAEPNKRIRKDPAAAAAGKRSSVYRGVTRHRWTGRFEAHLWDKHCLAALHNKKKGRQVYLGAYDSEEAAARAYDLAALKYWGPETLLNFPVEDYSSEMPEMEAVSREEYLASLRRRSSGFSRGVSKYRGVARHHHNGRWEARIGRVFGNKYLYLGTFDTQEEAAKAYDLAAIEYRGVNAVTNFDISCYLDHPLFLAQLQQEPQVVPALNQEPQPDQSETGTTEQEPESSEAKTPDGSAEPDENAVPDDTAEPLSTVDDSIEEGLWSPCMDYELDTMSRPNFGSSINLSEWFADADFDCNIGCLFDGCSAADEGSKDGVGLADFSLFEAGDVQLKDVLSDMEEGIQPPAMISVCN

SEQ ID NO: 33206 - protein, 257 aa, Zea mays subsp. mays
  peptide (1)..(257): Ceres Seq. ID no. 12351720
  misc_feature (28)..(91): Pfam Name: Pfam Description:  AP2 domain
  misc_feature (1)..(164): NCBI GI NO: 18394319 NR Description: ovule development protein, putative
  misc_feature (1)..(151): NCBI GI NO: 15219975 NR Description: ovule development protein, putative
  misc_feature (1)..(164): NCBI GI NO: 25518475 NR Description: hypothetical protein T24D18
  misc_feature (1)..(151): NCBI GI NO: 34221733 NR Description: putative AP2 domain transcription factor
  misc_feature (1)..(173): NCBI GI NO: 34909212 NR Description: P0425G02.29
  misc_feature (1)..(117): NCBI GI NO: 38492172 NR Description: ANT-like protein [Nicotiana tabacum]
  misc_feature (1)..(91): NCBI GI NO: 21069057 NR Description: BABY BOOM [Arabidopsis thaliana]
  misc_feature (1)..(91): NCBI GI NO: 21304227 NR Description: ovule development aintegumenta-like protein BNM3
  misc_feature (1)..(91): NCBI GI NO: 34907686 NR Description: putative ovule development protein aintegumenta-like protein
  misc_feature (1)..(195): NCBI GI NO: 15242120 NR Description: ovule development protein, putative
MPEMEAVSREEYLASLRRRSSGFSRGVSKYRGVARHHHNGRWEARIGRVFGNKYLYLGTFDTQEEAAKAYDLAAIEYRGVNAVTNFDISCYLDHPLFLAQLQQEPQVVPALNQEPQPDQSETGTTEQEPESSEAKTPDGSAEPDENAVPDDTAEPLSTVDDSIEEGLWSPCMDYELDTMSRPNFGSSINLSEWFADADFDCNIGCLFDGCSAADEGSKDGVGLADFSLFEAGDVQLKDVLSDMEEGIQPPAMISVCN

SEQ ID NO: 33207 - DNA, 1213 bp, Zea mays subsp. mays
  misc_feature (1)..(1213): Ceres Seq. ID no. 12348756
gattggttgctgttgcttcctgctttcgcttcgccttcacccgttcgccgtgcggccgagctctctagttccgccgctcgctagtcgccttcctcccaaatggcgaccgccatgcggggcagcagcctcctgcggttcggtttccgccatccttcctgcctcctgttccagtcccctcggtgtcctgccccgagcctgggtctgaacctggccgttggccgcaccgggcttatacgcctccgatgctcggcggccggggccggcgacgccggtggaaagaaggtgtcggctcggctggctctgacgcagcaggtgctgcggaacgccgaggagcgcgccgcgtcggcgggttcggaccctgcccccaagatcaccctggatcatgttactgttaattttgcaagaagtggtggtcctggtggtcagaatgttaacaaagttaacacaaaggttgacatgcgattcaatgttaaggaagctcactggcttggggagagaatcaaggaacggatattacaagcggagaagaataggataaataaagatggagagcttgttatatcttctacaaaaactagaacacagaagggcaatattgaagatgcattgcagaaaatacaggcaatcattgatgctgcatcatatgttcctccacccccaacagaagaccaaaagaaaaagattgaaaaaattgctgcagttgctgaaaggaagagacttcagaataagaaggtgctttcacagaagaaggaatttagacggaacagaactagctgggattgatgcaaggtatcttgcacagacccgtctttctgttttgtgccattccgcggtgggcattggcaatagtttagagggcttgttctcggggtagcaaaagcattcggctgatccttacagcagtggtgtacagagaccgacgaaaaacaagggtcagacttgctgaaggcatcttggtgaagaagatatagctaagtttcgtaggcatctccagtttttgtttcgtctattagtagggatggattcggatcggatactcatggaaacagatccgaacgtcactatttaccatattttaatccgaatacgaatactatcggatacgaatacaaaacggatagttcgaattcggatttacattcgaatacttacttgatttggaacatagcatcataacaagtattaatttgttttatcgatggatttatagttg

SEQ ID NO: 33208 - protein, 227 aa, Zea mays subsp. mays
  peptide (1)..(227): Ceres Seq. ID no. 12348757
  misc_feature (10)..(227): NCBI GI NO: 27754314 NR Description: unknown protein [Arabidopsis thaliana]
  misc_feature (120)..(227): NCBI GI NO: 15221608 NR Description: hypothetical protein; protein id: At1g62850.1
  misc_feature (94)..(162): NCBI GI NO: 6630453 NR Description: F23N19.20 [Arabidopsis thaliana]
  misc_feature (199)..(227): NCBI GI NO: 6630453 NR Description: F23N19.20 [Arabidopsis thaliana]
  misc_feature (44)..(227): NCBI GI NO: 19921098 NR Description: CG6094-PA [Drosophila melanogaster]
  misc_feature (78)..(221): NCBI GI NO: 27690532 NR Description: similar to immature colon carcinoma transcript 1
  misc_feature (30)..(221): NCBI GI NO: 20306641 NR Description: Similar to immature colon carcinoma transcript 1
  misc_feature (66)..(221): NCBI GI NO: 19387848 NR Description: immature colon carcinoma transcript 1
  misc_feature (80)..(221): NCBI GI NO: 4557657 NR Description: immature colon carcinoma transcript 1
  misc_feature (80)..(221): NCBI GI NO: 30585121 NR Description: Homo sapiens immature colon carcinoma transcript 1
MATAMRGSSLLRFGFRHPSCLLFQSPRCPAPSLGLNLAVGRTGLIRLRCSAAGAGDAGGKKVSARLALTQQVLRNAEERAASAGSDPAPKITLDHVTVNFARSGGPGGQNVNKVNTKVDMRFNVKEAHWLGERIKERILQAEKNRINKDGELVISSTKTRTQKGNIEDALQKIQAIIDAASYVPPPPTEDQKKKIEKIAAVAERKRLQNKKVLSQKKEFRRNRTSWD

SEQ ID NO: 33209 - protein, 223 aa, Zea mays subsp. mays
  peptide (1)..(223): Ceres Seq. ID no. 12348758
  misc_feature (6)..(223): NCBI GI NO: 27754314 NR Description: unknown protein [Arabidopsis thaliana]
  misc_feature (116)..(223): NCBI GI NO: 15221608 NR Description: hypothetical protein; protein id: At1g62850.1
  misc_feature (90)..(158): NCBI GI NO: 6630453 NR Description: F23N19.20 [Arabidopsis thaliana]
  misc_feature (195)..(223): NCBI GI NO: 6630453 NR Description: F23N19.20 [Arabidopsis thaliana]
  misc_feature (40)..(223): NCBI GI NO: 19921098 NR Description: CG6094-PA [Drosophila melanogaster]
  misc_feature (74)..(217): NCBI GI NO: 27690532 NR Description: similar to immature colon carcinoma transcript 1
  misc_feature (26)..(217): NCBI GI NO: 20306641 NR Description: Similar to immature colon carcinoma transcript 1
  misc_feature (62)..(217): NCBI GI NO: 19387848 NR Description: immature colon carcinoma transcript 1
  misc_feature (76)..(217): NCBI GI NO: 4557657 NR Description: immature colon carcinoma transcript 1
  misc_feature (76)..(217): NCBI GI NO: 30585121 NR Description: Homo sapiens immature colon carcinoma transcript 1
MRGSSLLRFGFRHPSCLLFQSPRCPAPSLGLNLAVGRTGLIRLRCSAAGAGDAGGKKVSARLALTQQVLRNAEERAASAGSDPAPKITLDHVTVNFARSGGPGGQNVNKVNTKVDMRFNVKEAHWLGERIKERILQAEKNRINKDGELVISSTKTRTQKGNIEDALQKIQAIIDAASYVPPPPTEDQKKKIEKIAAVAERKRLQNKKVLSQKKEFRRNRTSWD

SEQ ID NO: 33210 - DNA, 1477 bp, Zea mays subsp. mays
  misc_feature (1)..(1477): Ceres Seq. ID no. 12374112
aagccacttggcgcacgcgctgacgcgcacccgcaccagcctctagtcggccagtcgggacgaagcctctcgaacgagcgaggccacgaggtgcccgccgcgcccagccggcctcgccgaccgggcccgccggcccctatataggcaggcgccacttcctcctcgcaaccaccagacgccagtccaccaccgcttcccgtgcagcgccctccctctacgttcccccatttcctgtgttggcggcgatggcgcggcacttcgtgctcaacaccggcgccaagatcccctccgtggggctcggcacctggcagtctgaccccggcgtcgttggcaacgctgtctacgccgccgtcaaggcgggttaccgacatatcgattgtgccagagtttacggcaacgaaaaggagattggtttggcgctgaagaagctatttgaagagggtgtagtgaagcgagaagatctgtttatcacctctaagctatggaatgatcatcatgctcctgaagatgtgcctgaggcactaaatgacagcctgaatgatttgcagcttgagtacctggatctttatcttatccattggccatttagagtcaagaagggaacaaataccagccctgaaaattttgttacacctgacttccctgctacttggggggcaatggaaaagttatatgatgctggcaaagctcgcgctattggtgtgagtaacttctcctcaaagaaattgggtgacttgcttgctgtagctcgtgtacctccagctgttgatcaggtggaatgtcatcctggttggcagcaaactaagctccatagcttttgtcagtcaactggtgttcatctaactgcttactcaccactaggttcacctggtacaacttggatgaatggtaatgtccttaaagaaccaataatcatctcaatagctgagaaactcgggaaaacttctgcacaagtggctctgcgctggaacattcagatgggtcacagtgttcttccaaagagcacgaatgaagaaaggataaagcaaaaccttgatgtttatgattggtcaattccagatgacttgcttgcaaagttctctgagattaagcaggctaggctacttagaggcaacttcattgtgaatccagagagcgtttacaagacccatgaggagctctgggatggtgaactttaggaaggacgccgttgtccgtcctgactcctgagcagggagcaagcagcgttccattagggcccgtcagatcatttcacctccaaagttgctcttttgaaatgaaggttcagtgctcggaagctctggtgccatcctgtatcacgaactattgagaaatttatcggtgattttactttgtgctacgggatgtgctgctgcagtctatcctagtgtcagttgatttttctggtaaaactgtgaccaaataagttaattcgccaggcatcattactattggaatttcatcgttttatctccgc

SEQ ID NO: 33211 - protein, 310 aa, Zea mays subsp. mays
  peptide (1)..(310): Ceres Seq. ID no. 12374113
  misc_feature (1)..(310): NCBI GI NO: 34908280 NR Description: putative aldose reductase
  misc_feature (1)..(310): NCBI GI NO: 34908276 NR Description: putative aldose reductase
  misc_feature (1)..(310): NCBI GI NO: 30687261 NR Description: aldo/keto reductase family [Arabidopsis thaliana]
  misc_feature (5)..(310): NCBI GI NO: 30687247 NR Description: aldo/keto reductase family [Arabidopsis thaliana]
  misc_feature (1)..(284): NCBI GI NO: 25283479 NR Description: probable alcohol dehydrogenase
  misc_feature (283)..(310): NCBI GI NO: 25283479 NR Description: probable alcohol dehydrogenase
  misc_feature (9)..(310): NCBI GI NO: 28393400 NR Description: putative aldo/keto reductase
  misc_feature (1)..(308): NCBI GI NO: 13160397 NR Description: aldose reductase [Digitalis purpurea]
  misc_feature (1)..(308): NCBI GI NO: 13160399 NR Description: aldose reductase [Digitalis purpurea]
  misc_feature (5)..(285): NCBI GI NO: 7431114 NR Description: aldehyde dehydrogenase homolog At2g37770 -Arabidopsis thaliana
MARHFVLNTGAKIPSVGLGTWQSDPGVVGNAVYAAVKAGYRHIDCARVYGNEKEIGLALKKLFEEGVVKREDLFITSKLWNDHHAPEDVPEALNDSLNDLQLEYLDLYLIHWPFRVKKGTNTSPENFVTPDFPATWGAMEKLYDAGKARAIGVSNFSSKKLGDLLAVARVPPAVDQVECHPGWQQTKLHSFCQSTGVHLTAYSPLGSPGTTWMNGNVLKEPIIISIAEKLGKTSAQVALRWNIQMGHSVLPKSTNEERIKQNLDVYDWSIPDDLLAKFSEIKQARLLRGNFIVNPESVYKTHEELWDGEL

SEQ ID NO: 33212 - protein, 172 aa, Zea mays subsp. mays
  peptide (1)..(172): Ceres Seq. ID no. 12374114
  misc_feature (1)..(172): NCBI GI NO: 34908280 NR Description: putative aldose reductase
  misc_feature (1)..(172): NCBI GI NO: 34908276 NR Description: putative aldose reductase
  misc_feature (1)..(172): NCBI GI NO: 30687261 NR Description: aldo/keto reductase family [Arabidopsis thaliana]
  misc_feature (1)..(172): NCBI GI NO: 30687247 NR Description: aldo/keto reductase family [Arabidopsis thaliana]
  misc_feature (1)..(146): NCBI GI NO: 25283479 NR Description: probable alcohol dehydrogenase
  misc_feature (145)..(172): NCBI GI NO: 25283479 NR Description: probable alcohol dehydrogenase
  misc_feature (1)..(172): NCBI GI NO: 28393400 NR Description: putative aldo/keto reductase
  misc_feature (1)..(170): NCBI GI NO: 13160397 NR Description: aldose reductase [Digitalis purpurea]
  misc_feature (1)..(170): NCBI GI NO: 13160399 NR Description: aldose reductase [Digitalis purpurea]
  misc_feature (1)..(147): NCBI GI NO: 7431114 NR Description: aldehyde dehydrogenase homolog At2g37770 -Arabidopsis thaliana
MEKLYDAGKARAIGVSNFSSKKLGDLLAVARVPPAVDQVECHPGWQQTKLHSFCQSTGVHLTAYSPLGSPGTTWMNGNVLKEPIIISIAEKLGKTSAQVALRWNIQMGHSVLPKSTNEERIKQNLDVYDWSIPDDLLAKFSEIKQARLLRGNFIVNPESVYKTHEELWDGEL

SEQ ID NO: 33213 - DNA, 1112 bp, Zea mays subsp. mays
  misc_feature (1)..(1112): Ceres Seq. ID no. 12413854
atcgaatccttatcgttttctgtttttgttttgcccatttttttcgctggcgatttatgccatcacatctggcgctgctgtcgtgcctgctggtactgctcctctctttcgacaagttcctcttccactacctgaagcgccgctggttctccggcggcagcggcgccaccgtcccaagggcccccgccaaatcgaggcggaacatggcggccgccaagtggagcgagacggccatgctcgttatcgacatgcagaaggacttcgtggacccggcgatgcgcagtccgatgctggtagccggtggcgaggccgtcgtccctgccgttgccggggccgtcgccgtcgcaatggagcgcggcattttcgtcgtctgggttgtcagagagcatgacccttctggaagagatgttgaacttttccgtaggcaccattattctgggggaaagggtccaacagtgaaaggtctgaaaggagcggagctggctgatgggcttgttatcaaagaaggggaatacaagttggtgaagactagatttagtgctttcttcgcaacacatcttgattctgtcctgaaaactgcaggaataaagaacttggttattgttggagttcagacaccaaattgcattcggcagactgtgttcgatgctatagcactggactatgagaaagttacggttctaattgacgcaacagctgctgcaagaccagaaatccatttgtccaatatcagggatatgaagaacatcggagtggacacgccaaccctggaagaatggcgccgctagggttactctgtctcttggcagcaacagcaaacggagatgacctgttgtatgagatgcatgcagcacctccctgcatctacttctttgcttctaatctgcgtctgactgcgcgtacgttgttgtattgttatacccagtgcggtagaacaattgcagatggtggtatatggtatatgcaaacttgtaatccctcatatgtagagttcagttcaccataccatgtgatgtgcttgctttcacgtcgcagcagatggcactcaatccactccacatgccttgttatcttctttcttcatgagtcggcaaatgatgcctaaactgttg

SEQ ID NO: 33214 - protein, 261 aa, Zea mays subsp. mays
  peptide (1)..(261): Ceres Seq. ID no. 12413855
  misc_feature (76)..(259): Pfam Name: Pfam Description:  Isochorismatase family
  misc_feature (70)..(259): NCBI GI NO: 18401044 NR Description: putative hydrolase; protein id: At3g16190
  misc_feature (74)..(260): NCBI GI NO: 33599706 NR Description: putative isochorismatase
  misc_feature (77)..(258): NCBI GI NO: 20093942 NR Description: Amidase related to nicotinamidase
  misc_feature (77)..(249): NCBI GI NO: 11499734 NR Description: isochorismatase (entB) [Archaeoglobus fulgidus]
  misc_feature (75)..(256): NCBI GI NO: 14521185 NR Description: PYRAZINAMIDASE/NICOTINAMIDASE [Pyrococcus abyssi]
  misc_feature (74)..(231): NCBI GI NO: 28868562 NR Description: isochorismatase family protein
  misc_feature (57)..(246): NCBI GI NO: 18313752 NR Description: isochorismatase, putative [Pyrobaculum aerophilum]
  misc_feature (77)..(233): NCBI GI NO: 16081574 NR Description: N-carbamoylsarcosine amidase related protein
  misc_feature (57)..(233): NCBI GI NO: 14602014 NR Description: hypothetical protein [Aeropyrum pernix]
  misc_feature (64)..(236): NCBI GI NO: 23470336 NR Description: hypothetical protein
RILIVFCFCFAHFFRWRFMPSHLALLSCLLVLLLSFDKFLFHYLKRRWFSGGSGATVPRAPAKSRRNMAAAKWSETAMLVIDMQKDFVDPAMRSPMLVAGGEAVVPAVAGAVAVAMERGIFVVWVVREHDPSGRDVELFRRHHYSGGKGPTVKGLKGAELADGLVIKEGEYKLVKTRFSAFFATHLDSVLKTAGIKNLVIVGVQTPNCIRQTVFDAIALDYEKVTVLIDATAAARPEIHLSNIRDMKNIGVDTPTLEEWRR

SEQ ID NO: 33215 - protein, 243 aa, Zea mays subsp. mays
  peptide (1)..(243): Ceres Seq. ID no. 12413856
  misc_feature (58)..(241): Pfam Name: Pfam Description:  Isochorismatase family
  misc_feature (52)..(241): NCBI GI NO: 18401044 NR Description: putative hydrolase; protein id: At3g16190
  misc_feature (56)..(242): NCBI GI NO: 33599706 NR Description: putative isochorismatase
  misc_feature (59)..(240): NCBI GI NO: 20093942 NR Description: Amidase related to nicotinamidase
  misc_feature (59)..(231): NCBI GI NO: 11499734 NR Description: isochorismatase (entB) [Archaeoglobus fulgidus]
  misc_feature (57)..(238): NCBI GI NO: 14521185 NR Description: PYRAZINAMIDASE/NICOTINAMIDASE [Pyrococcus abyssi]
  misc_feature (56)..(213): NCBI GI NO: 28868562 NR Description: isochorismatase family protein
  misc_feature (39)..(228): NCBI GI NO: 18313752 NR Description: isochorismatase, putative [Pyrobaculum aerophilum]
  misc_feature (59)..(215): NCBI GI NO: 16081574 NR Description: N-carbamoylsarcosine amidase related protein
  misc_feature (39)..(215): NCBI GI NO: 14602014 NR Description: hypothetical protein [Aeropyrum pernix]
  misc_feature (46)..(218): NCBI GI NO: 23470336 NR Description: hypothetical protein
MPSHLALLSCLLVLLLSFDKFLFHYLKRRWFSGGSGATVPRAPAKSRRNMAAAKWSETAMLVIDMQKDFVDPAMRSPMLVAGGEAVVPAVAGAVAVAMERGIFVVWVVREHDPSGRDVELFRRHHYSGGKGPTVKGLKGAELADGLVIKEGEYKLVKTRFSAFFATHLDSVLKTAGIKNLVIVGVQTPNCIRQTVFDAIALDYEKVTVLIDATAAARPEIHLSNIRDMKNIGVDTPTLEEWRR

SEQ ID NO: 33216 - protein, 194 aa, Zea mays subsp. mays
  peptide (1)..(194): Ceres Seq. ID no. 12413857
  misc_feature (9)..(192): Pfam Name: Pfam Description:  Isochorismatase family
  misc_feature (3)..(192): NCBI GI NO: 18401044 NR Description: putative hydrolase; protein id: At3g16190
  misc_feature (7)..(193): NCBI GI NO: 33599706 NR Description: putative isochorismatase
  misc_feature (10)..(191): NCBI GI NO: 20093942 NR Description: Amidase related to nicotinamidase
  misc_feature (10)..(182): NCBI GI NO: 11499734 NR Description: isochorismatase (entB) [Archaeoglobus fulgidus]
  misc_feature (8)..(189): NCBI GI NO: 14521185 NR Description: PYRAZINAMIDASE/NICOTINAMIDASE [Pyrococcus abyssi]
  misc_feature (7)..(164): NCBI GI NO: 28868562 NR Description: isochorismatase family protein
  misc_feature (1)..(179): NCBI GI NO: 18313752 NR Description: isochorismatase, putative [Pyrobaculum aerophilum]
  misc_feature (10)..(166): NCBI GI NO: 16081574 NR Description: N-carbamoylsarcosine amidase related protein
  misc_feature (1)..(166): NCBI GI NO: 14602014 NR Description: hypothetical protein [Aeropyrum pernix]
  misc_feature (1)..(169): NCBI GI NO: 23470336 NR Description: hypothetical protein
MAAAKWSETAMLVIDMQKDFVDPAMRSPMLVAGGEAVVPAVAGAVAVAMERGIFVVWVVREHDPSGRDVELFRRHHYSGGKGPTVKGLKGAELADGLVIKEGEYKLVKTRFSAFFATHLDSVLKTAGIKNLVIVGVQTPNCIRQTVFDAIALDYEKVTVLIDATAAARPEIHLSNIRDMKNIGVDTPTLEEWRR

SEQ ID NO: 33217 - DNA, 1745 bp, Zea mays subsp. mays
  misc_feature (1)..(1745): Ceres Seq. ID no. 12348768
acgctcgcagcaccggccgttttctacgggcggtgcagtggacgggagtagtaccctttctttctcttcgaagaaaatgcggcggcgtgtggtataaaccccgcccgtcacgccgggccgtccgtgcgtttccttttgtcttcgcttgcttcctttcgaaagtccttgcgtcacactcgccgatcgatcgagtctctccggattacagagaggcccaactgccgaagccatcgatcgccgccacctcttcgagcagaatagttgagaatggctgacgaggatatccagcctatcgtatgtgacaatggcactggaatggtcaaggccggtttcgctggtgatgatgcgccaagagctgtcttccccagcattgtgggaagaccacgccacaccggtgtcatggtcggcatgggccaaaaggatgcctacgtaggtgatgaggctcaggccaagagaggcatcctgacactgaagtacccgattgagcatggcattgtcaacaactgggatgacatggagaaaatctggcatcacaccttctacaacgagctccgtgtttcgcctgaagatcaccctgtgctgctgaccgaggcccctctcaaccccaaggccaacagagaaaaaatgacgcagattatgtttgaaaccttcgaatgcccagcaatttatgttgctatccaggctgttctttcgttgtacgctagtgggcgaacaactggtattgtgatggattccggtgatggtgtgagccacacggttccaatctatgaaggatacacacttcctcatgctattctccgtttggatcttgcggggcgtgacctcaccgaccacctaatgaagatcctcacagagagagggtactccctcactacgagcgctgagcgggagattgtcagggacataaaggagaagcttgcctacgttgcccttgattatgaacaggagctggagactgccaggagcagctcctctgtcgagaagagctacgagatgcctgatggtcaggtcatcaccattgggtcagaaaggtttaggtgccccgaggtgctgttccaaccatcccttgttggcatggaatcgcctggcgtccatgaggccacgtacaactccatcatgaagtgtgatgttgatatcaggaaggatttgtatggtaacgttgtcctcagtgggggatctaccatgttccctgggattgccgatcgtatgagcaaggagatcacgtccctggctcctagcagcatgaaggttaaagtgattgcgccacctgaaaggaagtacagtgtctggatcggtggctctattttggcttctctcagcacttttcagcagatgtggatctccaagggagagtatgacgaaactggtccgggcattgtccacatgaagtgcttctaagtttttttgggaaatttttccaaaaaaaaagaagtttctggggaagttcgacatggtacgtcaggcgttaccggctcattgtgaaccaatacatgaactgccatgataaggttataagcagaaataacagtagcactggctccaattcctgaagatgagtctggtgctccctgctgtatgaaatggatcccactcgtatattcgtcaccgcgccgcactggtgtaacgtgttgcctcagagtttgcttttagctggttccttttttaaaaataagtactgtttttggttggctaccagtcattttgaacttcagtagcaaattatcttatttaatgcttgctttttc

SEQ ID NO: 33218 - protein, 376 aa, Zea mays subsp. mays
  peptide (1)..(376): Ceres Seq. ID no. 12348769
  misc_feature (1)..(376): Pfam Name: Pfam Description:  Actin
  misc_feature (1)..(376): NCBI GI NO: 113220 NR Description: ACTIN 1
  misc_feature (1)..(376): NCBI GI NO: 168404 NR Description: actin
  misc_feature (1)..(376): NCBI GI NO: 9965319 NR Description: actin [Setaria italica]
  misc_feature (1)..(376): NCBI GI NO: 37535954 NR Description: actin [Oryza sativa (japonica cultivar-group)]
  misc_feature (1)..(376): NCBI GI NO: 15242516 NR Description: ACTIN 2/7 (sp|P53492); protein id: At5g09810
  misc_feature (1)..(376): NCBI GI NO: 11276972 NR Description: actin [imported] - rape
  misc_feature (1)..(376): NCBI GI NO: 24496452 NR Description: actin [Hordeum vulgare]
  misc_feature (1)..(376): NCBI GI NO: 23955912 NR Description: actin [Stevia rebaudiana]
  misc_feature (1)..(376): NCBI GI NO: 11276970 NR Description: actin [imported] - Malva pusilla
  misc_feature (1)..(376): NCBI GI NO: 37547348 NR Description: similar to FKSG30 [Homo sapiens]
MADEDIQPIVCDNGTGMVKAGFAGDDAPRAVFPSIVGRPRHTGVMVGMGQKDAYVGDEAQAKRGILTLKYPIEHGIVNNWDDMEKIWHHTFYNELRVSPEDHPVLLTEAPLNPKANREKMTQIMFETFECPAIYVAIQAVLSLYASGRTTGIVMDSGDGVSHTVPIYEGYTLPHAILRLDLAGRDLTDHLMKILTERGYSLTTSAEREIVRDIKEKLAYVALDYEQELETARSSSSVEKSYEMPDGQVITIGSERFRCPEVLFQPSLVGMESPGVHEATYNSIMKCDVDIRKDLYGNVVLSGGSTMFPGIADRMSKEITSLAPSSMKVKVIAPPERKYSVWIGGSILASLSTFQQMWISKGEYDETGPGIVHMKCF

SEQ ID NO: 33219 - protein, 360 aa, Zea mays subsp. mays
  peptide (1)..(360): Ceres Seq. ID no. 12348770
  misc_feature (1)..(360): Pfam Name: Pfam Description:  Actin
  misc_feature (1)..(360): NCBI GI NO: 113220 NR Description: ACTIN 1
  misc_feature (1)..(360): NCBI GI NO: 168404 NR Description: actin
  misc_feature (1)..(360): NCBI GI NO: 9965319 NR Description: actin [Setaria italica]
  misc_feature (1)..(360): NCBI GI NO: 37535954 NR Description: actin [Oryza sativa (japonica cultivar-group)]
  misc_feature (1)..(360): NCBI GI NO: 15242516 NR Description: ACTIN 2/7 (sp|P53492); protein id: At5g09810
  misc_feature (1)..(360): NCBI GI NO: 11276972 NR Description: actin [imported] - rape
  misc_feature (1)..(360): NCBI GI NO: 24496452 NR Description: actin [Hordeum vulgare]
  misc_feature (1)..(360): NCBI GI NO: 23955912 NR Description: actin [Stevia rebaudiana]
  misc_feature (1)..(360): NCBI GI NO: 11276970 NR Description: actin [imported] - Malva pusilla
  misc_feature (1)..(360): NCBI GI NO: 37547348 NR Description: similar to FKSG30 [Homo sapiens]
MVKAGFAGDDAPRAVFPSIVGRPRHTGVMVGMGQKDAYVGDEAQAKRGILTLKYPIEHGIVNNWDDMEKIWHHTFYNELRVSPEDHPVLLTEAPLNPKANREKMTQIMFETFECPAIYVAIQAVLSLYASGRTTGIVMDSGDGVSHTVPIYEGYTLPHAILRLDLAGRDLTDHLMKILTERGYSLTTSAEREIVRDIKEKLAYVALDYEQELETARSSSSVEKSYEMPDGQVITIGSERFRCPEVLFQPSLVGMESPGVHEATYNSIMKCDVDIRKDLYGNVVLSGGSTMFPGIADRMSKEITSLAPSSMKVKVIAPPERKYSVWIGGSILASLSTFQQMWISKGEYDETGPGIVHMKCF

SEQ ID NO: 33220 - protein, 332 aa, Zea mays subsp. mays
  peptide (1)..(332): Ceres Seq. ID no. 12348771
  misc_feature (1)..(332): Pfam Name: Pfam Description:  Actin
  misc_feature (1)..(332): NCBI GI NO: 113220 NR Description: ACTIN 1
  misc_feature (1)..(332): NCBI GI NO: 168404 NR Description: actin
  misc_feature (1)..(332): NCBI GI NO: 9965319 NR Description: actin [Setaria italica]
  misc_feature (1)..(332): NCBI GI NO: 37535954 NR Description: actin [Oryza sativa (japonica cultivar-group)]
  misc_feature (1)..(332): NCBI GI NO: 15242516 NR Description: ACTIN 2/7 (sp|P53492); protein id: At5g09810
  misc_feature (1)..(332): NCBI GI NO: 11276972 NR Description: actin [imported] - rape
  misc_feature (1)..(332): NCBI GI NO: 24496452 NR Description: actin [Hordeum vulgare]
  misc_feature (1)..(332): NCBI GI NO: 23955912 NR Description: actin [Stevia rebaudiana]
  misc_feature (1)..(332): NCBI GI NO: 11276970 NR Description: actin [imported] - Malva pusilla
  misc_feature (1)..(332): NCBI GI NO: 37547348 NR Description: similar to FKSG30 [Homo sapiens]
MVGMGQKDAYVGDEAQAKRGILTLKYPIEHGIVNNWDDMEKIWHHTFYNELRVSPEDHPVLLTEAPLNPKANREKMTQIMFETFECPAIYVAIQAVLSLYASGRTTGIVMDSGDGVSHTVPIYEGYTLPHAILRLDLAGRDLTDHLMKILTERGYSLTTSAEREIVRDIKEKLAYVALDYEQELETARSSSSVEKSYEMPDGQVITIGSERFRCPEVLFQPSLVGMESPGVHEATYNSIMKCDVDIRKDLYGNVVLSGGSTMFPGIADRMSKEITSLAPSSMKVKVIAPPERKYSVWIGGSILASLSTFQQMWISKGEYDETGPGIVHMKCF

SEQ ID NO: 33221 - DNA, 1877 bp, Zea mays subsp. mays
  misc_feature (1)..(1877): Ceres Seq. ID no. 12344575
ctctcctctcgctcgcgtccgcacaaatcccgtgctcccccgtctgaaaaccctccccacctccggcggcggcggcggcgctggcgaccgggtgtcttctccggcgagtctcccccctagtaacaagaaaatatggatgtacctgttgatgaccctgtggagaacctcactggaagtcctagtacccttggcaatgaggaagaagccactacttatgctaatgtgcaagatcagtccaaggaagaaccagaaaagctttacgaggaacccaaagacccaatgcaagacgagttgggtaaccaagggcatgtgagcatgaacaatgaagatgtgggaggccagaacaaagtggaccaagctacccccacagagcacggcgaggaagctggggtgaagcagcatgatgctacagttcctgatgacaagaaatggcctgggtggcctggagagagtgtgttccgtatactggttcctaccacaaaggtgggtgccgtcattgggcgcaaaggggatttcatcaagaaaatgtgtgaggaatcaagagcccgcatcaaggttcttgagggaccaccagctgtgccagaaagagctgtaatgatttcagcaaaggatgaaccagacacagagctacctccagctgttgatgggttgcttagagttcatagaaggataacagatggtttagaaactgaaactgatcagcctcaacgagctactgtcaacactgggccgacaaggctactggttccagcttcccaagctggcagcctaattgggaagcaaggagcaactattaagtcaatacaggatgcttcaaagtgcgttctccggattgttgagaatgttccacctgttgcattaaacgatgacagagttgtagagatacagggtgaacctcatgattctcacaaagccgtagaactgattgcaagtcatttaagaaaatttcttgttgaccgcagtgtcctccctttgtttgaaacacagattaaagcacacaatatgcacagagagcaacctatgcctcctccacaggcatggggcccccctcctccgtcaccctggggtcatccaccaccaaaccttcctcctggtggcccaggttatgttgggaacccacactacatgcctccacggccacaagagaactattatcctcctcccgatgtgccccctgtagaaaagcagccacactatggaatttcttcatatggacgagatgcacctccaagtgctcccccagggaatcaaaaccaagcacatgggtcatctcaggtgacacacagcatgcaagttcctctttcctatgctgatgctgtgataggggcagctggtgccagtatcagctacatccgcaggcatagtggagcaactataagtattcaagaaggcgctcctggcgagatgacagtggagattacaggaagtgcttcacaagtacagactgctcaacagctaatcaagaatttcatggctgaagcttctccccagggaccaccagccccaggtccacacggtcaaccagtggacacgggttacggctcgtacccaccttacgtggagcatcctatgggtctcctccaggtgctccagctccagcgcctcacaacggtggaagttatggtgctgcaccatactcgtcgagctatggatactaatccggagcaagagcttgcctcagacttagggaaggagggttatcgttatggttttgtttgctagtctattcatctgttgagaactcaagattgttattgttaggacgtgtgaactttggtgttctaggctgctttcagacgccagtgtcgatatactctctttgctttattgttgcggaatttatcgtaatatgttattttaatgttcaagaaaaaacc

SEQ ID NO: 33222 - protein, 529 aa, Zea mays subsp. mays
  peptide (1)..(529): Ceres Seq. ID no. 12344576
  misc_feature (202)..(253): Pfam Name: Pfam Description:  KH domain
  misc_feature (1)..(474): NCBI GI NO: 16924113 NR Description: putative RNA binding protein [Oryza sativa]
  misc_feature (1)..(478): NCBI GI NO: 15229321 NR Description: KH domain protein; protein id: At3g04610
  misc_feature (82)..(473): NCBI GI NO: 37536904 NR Description: putative nucleic acid binding protein
  misc_feature (305)..(455): NCBI GI NO: 37534332 NR Description: unknown protein
  misc_feature (101)..(237): NCBI GI NO: 37534332 NR Description: unknown protein
  misc_feature (237)..(365): NCBI GI NO: 37534332 NR Description: unknown protein
  misc_feature (106)..(447): NCBI GI NO: 15217969 NR Description: KH domain protein; protein id: At1g51580.1
  misc_feature (110)..(443): NCBI GI NO: 14141168 NR Description: poly
  misc_feature (110)..(443): NCBI GI NO: 6707736 NR Description: Poly(rC)-binding protein 2 (Alpha-CP2) (hnRNP-E2)
  misc_feature (298)..(454): NCBI GI NO: 28317389 NR Description: TPA: hnRNP-E2 b [Xenopus laevis]
MDVPVDDPVENLTGSPSTLGNEEEATTYANVQDQSKEEPEKLYEEPKDPMQDELGNQGHVSMNNEDVGGQNKVDQATPTEHGEEAGVKQHDATVPDDKKWPGWPGESVFRILVPTTKVGAVIGRKGDFIKKMCEESRARIKVLEGPPAVPERAVMISAKDEPDTELPPAVDGLLRVHRRITDGLETETDQPQRATVNTGPTRLLVPASQAGSLIGKQGATIKSIQDASKCVLRIVENVPPVALNDDRVVEIQGEPHDSHKAVELIASHLRKFLVDRSVLPLFETQIKAHNMHREQPMPPPQAWGPPPPSPWGHPPPNLPPGGPGYVGNPHYMPPRPQENYYPPPDVPPVEKQPHYGISSYGRDAPPSAPPGNQNQAHGSSQVTHSMQVPLSYADAVIGAAGASISYIRRHSGATISIQEGAPGEMTVEITGSASQVQTAQQLIKNFMAEASPQGPPAPGPHGQPVDTGYGSYPPYVEHPMGLLQVLQLQRLTTVEVMVLHHTRRAMDTNPEQELASDLGKEGYRYGFVC

SEQ ID NO: 33223 - protein, 480 aa, Zea mays subsp. mays
  peptide (1)..(480): Ceres Seq. ID no. 12344577
  misc_feature (153)..(204): Pfam Name: Pfam Description:  KH domain
  misc_feature (1)..(425): NCBI GI NO: 16924113 NR Description: putative RNA binding protein [Oryza sativa]
  misc_feature (1)..(429): NCBI GI NO: 15229321 NR Description: KH domain protein; protein id: At3g04610
  misc_feature (33)..(424): NCBI GI NO: 37536904 NR Description: putative nucleic acid binding protein
  misc_feature (256)..(406): NCBI GI NO: 37534332 NR Description: unknown protein
  misc_feature (52)..(188): NCBI GI NO: 37534332 NR Description: unknown protein
  misc_feature (188)..(316): NCBI GI NO: 37534332 NR Description: unknown protein
  misc_feature (57)..(398): NCBI GI NO: 15217969 NR Description: KH domain protein; protein id: At1g51580.1
  misc_feature (61)..(394): NCBI GI NO: 14141168 NR Description: poly
  misc_feature (61)..(394): NCBI GI NO: 6707736 NR Description: Poly(rC)-binding protein 2 (Alpha-CP2) (hnRNP-E2)
  misc_feature (249)..(405): NCBI GI NO: 28317389 NR Description: TPA: hnRNP-E2 b [Xenopus laevis]
MQDELGNQGHVSMNNEDVGGQNKVDQATPTEHGEEAGVKQHDATVPDDKKWPGWPGESVFRILVPTTKVGAVIGRKGDFIKKMCEESRARIKVLEGPPAVPERAVMISAKDEPDTELPPAVDGLLRVHRRITDGLETETDQPQRATVNTGPTRLLVPASQAGSLIGKQGATIKSIQDASKCVLRIVENVPPVALNDDRVVEIQGEPHDSHKAVELIASHLRKFLVDRSVLPLFETQIKAHNMHREQPMPPPQAWGPPPPSPWGHPPPNLPPGGPGYVGNPHYMPPRPQENYYPPPDVPPVEKQPHYGISSYGRDAPPSAPPGNQNQAHGSSQVTHSMQVPLSYADAVIGAAGASISYIRRHSGATISIQEGAPGEMTVEITGSASQVQTAQQLIKNFMAEASPQGPPAPGPHGQPVDTGYGSYPPYVEHPMGLLQVLQLQRLTTVEVMVLHHTRRAMDTNPEQELASDLGKEGYRYGFVC

SEQ ID NO: 33224 - protein, 468 aa, Zea mays subsp. mays
  peptide (1)..(468): Ceres Seq. ID no. 12344578
  misc_feature (141)..(192): Pfam Name: Pfam Description:  KH domain
  misc_feature (1)..(413): NCBI GI NO: 16924113 NR Description: putative RNA binding protein [Oryza sativa]
  misc_feature (1)..(417): NCBI GI NO: 15229321 NR Description: KH domain protein; protein id: At3g04610
  misc_feature (21)..(412): NCBI GI NO: 37536904 NR Description: putative nucleic acid binding protein
  misc_feature (244)..(394): NCBI GI NO: 37534332 NR Description: unknown protein
  misc_feature (40)..(176): NCBI GI NO: 37534332 NR Description: unknown protein
  misc_feature (176)..(304): NCBI GI NO: 37534332 NR Description: unknown protein
  misc_feature (45)..(386): NCBI GI NO: 15217969 NR Description: KH domain protein; protein id: At1g51580.1
  misc_feature (49)..(382): NCBI GI NO: 14141168 NR Description: poly
  misc_feature (49)..(382): NCBI GI NO: 6707736 NR Description: Poly(rC)-binding protein 2 (Alpha-CP2) (hnRNP-E2)
  misc_feature (237)..(393): NCBI GI NO: 28317389 NR Description: TPA: hnRNP-E2 b [Xenopus laevis]
MNNEDVGGQNKVDQATPTEHGEEAGVKQHDATVPDDKKWPGWPGESVFRILVPTTKVGAVIGRKGDFIKKMCEESRARIKVLEGPPAVPERAVMISAKDEPDTELPPAVDGLLRVHRRITDGLETETDQPQRATVNTGPTRLLVPASQAGSLIGKQGATIKSIQDASKCVLRIVENVPPVALNDDRVVEIQGEPHDSHKAVELIASHLRKFLVDRSVLPLFETQIKAHNMHREQPMPPPQAWGPPPPSPWGHPPPNLPPGGPGYVGNPHYMPPRPQENYYPPPDVPPVEKQPHYGISSYGRDAPPSAPPGNQNQAHGSSQVTHSMQVPLSYADAVIGAAGASISYIRRHSGATISIQEGAPGEMTVEITGSASQVQTAQQLIKNFMAEASPQGPPAPGPHGQPVDTGYGSYPPYVEHPMGLLQVLQLQRLTTVEVMVLHHTRRAMDTNPEQELASDLGKEGYRYGFVC

SEQ ID NO: 33225 - DNA, 619 bp, Zea mays subsp. mays
  misc_feature (1)..(619): Ceres Seq. ID no. 13499146
aagcacccaaatcgacgaattcttcccccctctccgatctcgacgcgcaccgatgcgggcgatgtcgtcggcggttaatggtatgctgcgggcacggctgcgcggggcagcgcgcgttcgcggcggcggcggcgagggggccgggcggtggacgaccccaggtcacgaggagcgccccaaggggtacctcttcaaccggccgccgccgcctccggggggaatctcgcaagtgggaggattgggagctgccctgctacgtgacctccttcctcaccgtcgtcatcctcggcgtcggcctcaacgcgaagcccgaccttacaatcgagacgtgggcgcaccagaaggcgctcgagcgcctccagcagcaggagctcgccgctgccgacacccaggccgagtgatccgcgcgtctcaggtcctctcgaactctcggctgcctctgatttggttccaataagatggccacaatgtgcggtcctgaatgttctggacttctggtattgatggaacacgagctgaacactatgctgctgttttttctgttctgttttgaaatttgcccggtgatgatggcgaatgtcctgaatattctgaatattttgaaatgtttgactgttgt

SEQ ID NO: 33226 - protein, 151 aa, Zea mays subsp. mays
  peptide (1)..(151): Ceres Seq. ID no. 13499147
  misc_feature (33)..(72): NCBI GI NO: 18410807 NR Description: expressed protein [Arabidopsis thaliana]
  misc_feature (33)..(72): NCBI GI NO: 7485503 NR Description: hypothetical protein F15B8
STQIDEFFPPLRSRRAPMRAMSSAVNGMLRARLRGAARVRGGGGEGAGRWTTPGHEERPKGYLFNRPPPPPGGISQVGGLGAALLRDLLPHRRHPRRRPQREARPYNRDVGAPEGARAPPAAGARRCRHPGRVIRASQVLSNSRLPLIWFQ

SEQ ID NO: 33227 - protein, 134 aa, Zea mays subsp. mays
  peptide (1)..(134): Ceres Seq. ID no. 13499148
  misc_feature (16)..(55): NCBI GI NO: 18410807 NR Description: expressed protein [Arabidopsis thaliana]
  misc_feature (16)..(55): NCBI GI NO: 7485503 NR Description: hypothetical protein F15B8
MRAMSSAVNGMLRARLRGAARVRGGGGEGAGRWTTPGHEERPKGYLFNRPPPPPGGISQVGGLGAALLRDLLPHRRHPRRRPQREARPYNRDVGAPEGARAPPAAGARRCRHPGRVIRASQVLSNSRLPLIWFQ

SEQ ID NO: 33228 - protein, 132 aa, Zea mays subsp. mays
  peptide (1)..(132): Ceres Seq. ID no. 13499149
  misc_feature (72)..(127): NCBI GI NO: 18410807 NR Description: expressed protein [Arabidopsis thaliana]
  misc_feature (72)..(127): NCBI GI NO: 7485503 NR Description: hypothetical protein F15B8
  misc_feature (40)..(132): NCBI GI NO: 15227917 NR Description: expressed protein [Arabidopsis thaliana]
  misc_feature (6)..(130): NCBI GI NO: 9858777 NR Description: BAC19.9 [Lycopersicon esculentum]
  misc_feature (29)..(132): NCBI GI NO: 29150398 NR Description: hypothetical protein
APKSTNSSPLSDLDAHRCGRCRRRLMVCCGHGCAGQRAFAAAAARGPGGGRPQVTRSAPRGTSSTGRRRLRGESRKWEDWELPCYVTSFLTVVILGVGLNAKPDLTIETWAHQKALERLQQQELAAADTQAE

SEQ ID NO: 33229 - protein, 107 aa, Zea mays subsp. mays
  peptide (1)..(107): Ceres Seq. ID no. 13499150
  misc_feature (47)..(102): NCBI GI NO: 18410807 NR Description: expressed protein [Arabidopsis thaliana]
  misc_feature (47)..(102): NCBI GI NO: 7485503 NR Description: hypothetical protein F15B8
  misc_feature (15)..(107): NCBI GI NO: 15227917 NR Description: expressed protein [Arabidopsis thaliana]
  misc_feature (1)..(105): NCBI GI NO: 9858777 NR Description: BAC19.9 [Lycopersicon esculentum]
  misc_feature (4)..(107): NCBI GI NO: 29150398 NR Description: hypothetical protein
MVCCGHGCAGQRAFAAAAARGPGGGRPQVTRSAPRGTSSTGRRRLRGESRKWEDWELPCYVTSFLTVVILGVGLNAKPDLTIETWAHQKALERLQQQELAAADTQAE

SEQ ID NO: 33230 - DNA, 1426 bp, Zea mays subsp. mays
  misc_feature (1)..(1426): Ceres Seq. ID no. 12414746
atgacctatgcgtgtcactgcaggcggacctacaagctctttggaggagtagagacttccagccatcccttctacgctctccccgttcccgtgtcgtcctcccgacaaagagggagccgctagggtttagcggcttccgcttctgggcgagggcttacccgcgagggacggcgcgacgcggcggcacttgagctagggtttccctccgatcccgttcctttcccggcgaggcgatggacgaggcggcgattgacgacttgatccggcggctcctcgaggcccgcggcgggcgcaccccgcgcaacgcgcaggtgactgacgccgagatccggcgcctctgcgccaccgccaaggacgttttcctgctcccagcccaacctcctggagctcgaggcccccattaagatatgcggggatgtccatggccagtattcagacctccttcgattatttgagtatggtggctatccaccagatgcaaattatctgttcctgggtgactatgttgatcgggggaaacagagcatagaaacaatatgccttctcttggcgtacaagataaagtacccagaaaacttctttcttctcaggggaaaccatgaatgtgcctcgatcaaccggatatatgggttttttgatgagtgtaagaggagattcaatgtgcgtatctggaagatattcactgagtgttttaactgcctcccagtggctgcacttattgacgataagatcttttgcatgcatggggggttgtctcctgagctaaagaacatggatcaaatacgtaacatttctcctcctgtggatgttcctgacgttggtcttctatgtgatctgttatggtcggaccctgataaagagattgttgggtggggtgataatgacaggggtgtttcctacacctttggagctgacatagttgctgagtttcttcagaaacatgacctagatttgatctgcagggctcaccaggtcgtagaggatggctatgagtttttcgcaaatcgccagcttgtaacaatattctcagcaccgaactactgtggagagtttgacaatgctggtgcactgatgagcatcgatgactccctagtatgctcgttccagatactcaagccttctgaaaagaaaagaaaagcaggagctgagaacatgccaaagcccggtacacctcccaggaagataaaaataagtgttacccgcatttagccagattctcgttatcaaactggatttgagaagttgtgattaaatgctccccaaacttgttatggtaggttttttggtgagcttaacacggtgttaaactgtggagtgtggaccaccgtgcttatgtcttgctgatctgaagtcatgcaaatgtatcctggcgttttgccaaacaaaaaagatcatgctaacagaaacttctggattttttttattg

SEQ ID NO: 33231 - protein, 156 aa, Zea mays subsp. mays
  peptide (1)..(156): Ceres Seq. ID no. 12414747
  misc_feature (1)..(81): Pfam Name: Pfam Description:  Calcineurin-like phosphoesterase
  misc_feature (1)..(149): NCBI GI NO: 7435131 NR Description: phosphoprotein phosphatase (EC 3
  misc_feature (1)..(148): NCBI GI NO: 1346763 NR Description: SERINE/THREONINE PROTEIN PHOSPHATASE PP1
  misc_feature (1)..(148): NCBI GI NO: 18413493 NR Description: protein phosphatase type 1
  misc_feature (1)..(148): NCBI GI NO: 15222607 NR Description: phosphoprotein phosphatase-type 1 catalyticsubunit
  misc_feature (1)..(148): NCBI GI NO: 1346760 NR Description: Serine/threonine protein phosphatase PP1 isozyme 6
  misc_feature (1)..(151): NCBI GI NO: 25752372 NR Description: phosphoprotein phosphatase (EC 3
  misc_feature (1)..(147): NCBI GI NO: 1346753 NR Description: SERINE/THREONINE PROTEIN PHOSPHATASE PP1 ISOZYME 2
  misc_feature (1)..(147): NCBI GI NO: 1346750 NR Description: SERINE/THREONINE PROTEIN PHOSPHATASE PP1 ISOZYME 1
  misc_feature (1)..(147): NCBI GI NO: 4506005 NR Description: protein phosphatase 1
  misc_feature (1)..(147): NCBI GI NO: 27884151 NR Description: SI:zC214P16
MHGGLSPELKNMDQIRNISPPVDVPDVGLLCDLLWSDPDKEIVGWGDNDRGVSYTFGADIVAEFLQKHDLDLICRAHQVVEDGYEFFANRQLVTIFSAPNYCGEFDNAGALMSIDDSLVCSFQILKPSEKKRKAGAENMPKPGTPPRKIKISVTRI

SEQ ID NO: 33232 - protein, 145 aa, Zea mays subsp. mays
  peptide (1)..(145): Ceres Seq. ID no. 12414748
  misc_feature (1)..(70): Pfam Name: Pfam Description:  Calcineurin-like phosphoesterase
  misc_feature (1)..(138): NCBI GI NO: 7435131 NR Description: phosphoprotein phosphatase (EC 3
  misc_feature (1)..(137): NCBI GI NO: 1346763 NR Description: SERINE/THREONINE PROTEIN PHOSPHATASE PP1
  misc_feature (1)..(137): NCBI GI NO: 18413493 NR Description: protein phosphatase type 1
  misc_feature (1)..(137): NCBI GI NO: 15222607 NR Description: phosphoprotein phosphatase-type 1 catalyticsubunit
  misc_feature (1)..(137): NCBI GI NO: 1346760 NR Description: Serine/threonine protein phosphatase PP1 isozyme 6
  misc_feature (1)..(140): NCBI GI NO: 25752372 NR Description: phosphoprotein phosphatase (EC 3
  misc_feature (1)..(136): NCBI GI NO: 1346753 NR Description: SERINE/THREONINE PROTEIN PHOSPHATASE PP1 ISOZYME 2
  misc_feature (1)..(136): NCBI GI NO: 1346750 NR Description: SERINE/THREONINE PROTEIN PHOSPHATASE PP1 ISOZYME 1
  misc_feature (1)..(136): NCBI GI NO: 4506005 NR Description: protein phosphatase 1
  misc_feature (1)..(136): NCBI GI NO: 27884151 NR Description: SI:zC214P16
MDQIRNISPPVDVPDVGLLCDLLWSDPDKEIVGWGDNDRGVSYTFGADIVAEFLQKHDLDLICRAHQVVEDGYEFFANRQLVTIFSAPNYCGEFDNAGALMSIDDSLVCSFQILKPSEKKRKAGAENMPKPGTPPRKIKISVTRI

SEQ ID NO: 33233 - DNA, 919 bp, Zea mays subsp. mays
  misc_feature (1)..(919): Ceres Seq. ID no. 12351094
gtgcactctctcctacgactcccacttcctctaccagcctagggcctaggctaccaccccagtgcgaaggaagtcagagctctccgcctccgccggcggggctcgatactgatgggtgtcttcgggacctcgcgtcctgcctccgtcaccctctgcgccttcctcacattcctcaacctcttcgccttccttctcgccgtcggcgccgagcgccgccgcagcaccgggaaggtggtgccggacgagtacgacgagcggtcctactgcctctacgacaccgacgcctccacggtctacggcgtttccgctttcttcgtgctgctgctccagcaggccattgtcaccgccgccacgcgttgcctttgcttcggccccgtgctctcctcccgcggctgcgccgtcaccgcattcgtcctctcctgggcaacgtttctcatcgcagaagcctgcctcataggaggatcggtgaggaacgcaaagcacaccaagtatctaggctactacacgaagcatgacctggtgtcgtgcgccaccctccgcaagggagtctttgcggccgccgctgcgatgatgctcgtcaacctcttggcgtcccttgtgtgctgctggagctactcgaaagccgcgacgggcgggttcatgaagcaccagaatgaggtcggagtgggcatgacggattacggccttgacaggggcgtttctgggccctgagtgagttggctggaaccttgttggcgtctgtgctgcagtaggcgtctcacctgtggtgtaatattatcgtcgaaatgtatgtgagtgaagttccgttctttctctacggtcggtgcgaatggtataccagaactgtgctctggaatgtgctagtcagtgatgatgttgtatggttcgtgattttatatctgtgaaaaaatgtggtagc

SEQ ID NO: 33234 - protein, 199 aa, Zea mays subsp. mays
  peptide (1)..(199): Ceres Seq. ID no. 12351095
  misc_feature (11)..(188): NCBI GI NO: 18408976 NR Description: expressed protein; protein id: At1g68220
  misc_feature (10)..(190): NCBI GI NO: 38016521 NR Description: fiber protein Fb34 [Gossypium barbadense]
  misc_feature (10)..(186): NCBI GI NO: 34394069 NR Description: unknown protein
  misc_feature (10)..(174): NCBI GI NO: 18404242 NR Description: expressed protein; protein id: At1g52910
  misc_feature (10)..(171): NCBI GI NO: 18400781 NR Description: expressed protein; protein id: At3g15480
  misc_feature (10)..(190): NCBI GI NO: 18391509 NR Description: expressed protein; protein id: At1g13380
  misc_feature (10)..(172): NCBI GI NO: 18416991 NR Description: Expressed protein; protein id: At4g27435
  misc_feature (10)..(188): NCBI GI NO: 38344206 NR Description: OSJNBa0064G10.22
  misc_feature (10)..(171): NCBI GI NO: 18407003 NR Description: Expressed protein; protein id: At1g61065
  misc_feature (10)..(161): NCBI GI NO: 21554630 NR Description: unknown [Arabidopsis thaliana]
MGVFGTSRPASVTLCAFLTFLNLFAFLLAVGAERRRSTGKVVPDEYDERSYCLYDTDASTVYGVSAFFVLLLQQAIVTAATRCLCFGPVLSSRGCAVTAFVLSWATFLIAEACLIGGSVRNAKHTKYLGYYTKHDLVSCATLRKGVFAAAAAMMLVNLLASLVCCWSYSKAATGGFMKHQNEVGVGMTDYGLDRGVSGP

SEQ ID NO: 33235 - protein, 170 aa, Zea mays subsp. mays
  peptide (1)..(170): Ceres Seq. ID no. 12351096
ALSPTTPTSSTSLGPRLPPQCEGSQSSPPPPAGLDTDGCLRDLASCLRHPLRLPHIPQPLRLPSRRRRRAPPQHREGGAGRVRRAVLLPLRHRRLHGLRRFRFLRAAAPAGHCHRRHALPLLRPRALLPRLRRHRIRPLLGNVSHRRSLPHRRIGEERKAHQVSRLLHEA

SEQ ID NO: 33236 - DNA, 587 bp, Zea mays subsp. mays
  misc_feature (1)..(587): Ceres Seq. ID no. 12353408
aatagtttctctcctgccacttttgcgagcttacttcacgcacgccgccgcagccgccgccgctacagcccgcacctcgcttcctctcccgtcgccgagatgacgaagcgaaccaagaaggccggaattgttggcaaatatggaaccaggtatggtgctagcttgcgtaagcaaatcaagaagatggaggtatctcagcactccaagtatttctgtgagttctgtgggaagtttgctgtgaagaggaaagcggttgggatttggggatgcaaggactgtgggaaggtcaaggccggtggtgcttataccatgaacactgctagtgcggtcactgtcaggagcacgatccgtcgcttgagggagcagactgaagcatgatccgtcgcttgtcaggcatactggggtccactatattggctgtttagccgagacagtactccagcatttttgggttatgctctaggatctctaaaagttgggtgctaagatttctacttgtttaccgttgtgaaaatttcacaagtgatatctgatcctattactatcttgatgacgtcaaatttgcttctggtttctaccctttggtc

SEQ ID NO: 33237 - protein, 125 aa, Zea mays subsp. mays
  peptide (1)..(125): Ceres Seq. ID no. 12353409
  misc_feature (35)..(125): NCBI GI NO: 34911166 NR Description: putative 60S ribosomal protein L37a
  misc_feature (34)..(124): NCBI GI NO: 6831607 NR Description: 60S ribosomal protein L37a
  misc_feature (34)..(125): NCBI GI NO: 6831602 NR Description: 60S RIBOSOMAL PROTEIN L37A
  misc_feature (34)..(125): NCBI GI NO: 15228411 NR Description: putative 60S ribosomal protein L37a
  misc_feature (34)..(124): NCBI GI NO: 18411538 NR Description: Expressed protein; protein id: At3g60245
  misc_feature (34)..(124): NCBI GI NO: 1173045 NR Description: 60S RIBOSOMAL PROTEIN L37A
  misc_feature (39)..(124): NCBI GI NO: 11358898 NR Description: translation initiation factor eIF-4 gamma homologF27H5
  misc_feature (34)..(125): NCBI GI NO: 6093889 NR Description: 60S RIBOSOMAL PROTEIN L37A
  misc_feature (34)..(121): NCBI GI NO: 7441206 NR Description: ribosomal protein L37a
  misc_feature (34)..(122): NCBI GI NO: 33637090 NR Description: N1 [Toxoplasma gondii]
NSFSPATFASLLHARRRSRRRYSPHLASSPVAEMTKRTKKAGIVGKYGTRYGASLRKQIKKMEVSQHSKYFCEFCGKFAVKRKAVGIWGCKDCGKVKAGGAYTMNTASAVTVRSTIRRLREQTEA

SEQ ID NO: 33238 - protein, 92 aa, Zea mays subsp. mays
  peptide (1)..(92): Ceres Seq. ID no. 12353410
  misc_feature (2)..(92): NCBI GI NO: 34911166 NR Description: putative 60S ribosomal protein L37a
  misc_feature (1)..(91): NCBI GI NO: 6831607 NR Description: 60S ribosomal protein L37a
  misc_feature (1)..(92): NCBI GI NO: 6831602 NR Description: 60S RIBOSOMAL PROTEIN L37A
  misc_feature (1)..(92): NCBI GI NO: 15228411 NR Description: putative 60S ribosomal protein L37a
  misc_feature (1)..(91): NCBI GI NO: 18411538 NR Description: Expressed protein; protein id: At3g60245
  misc_feature (1)..(91): NCBI GI NO: 1173045 NR Description: 60S RIBOSOMAL PROTEIN L37A
  misc_feature (6)..(91): NCBI GI NO: 11358898 NR Description: translation initiation factor eIF-4 gamma homologF27H5
  misc_feature (1)..(92): NCBI GI NO: 6093889 NR Description: 60S RIBOSOMAL PROTEIN L37A
  misc_feature (1)..(88): NCBI GI NO: 7441206 NR Description: ribosomal protein L37a
  misc_feature (1)..(89): NCBI GI NO: 33637090 NR Description: N1 [Toxoplasma gondii]
MTKRTKKAGIVGKYGTRYGASLRKQIKKMEVSQHSKYFCEFCGKFAVKRKAVGIWGCKDCGKVKAGGAYTMNTASAVTVRSTIRRLREQTEA

SEQ ID NO: 33239 - protein, 64 aa, Zea mays subsp. mays
  peptide (1)..(64): Ceres Seq. ID no. 12353411
  misc_feature (1)..(64): NCBI GI NO: 34911166 NR Description: putative 60S ribosomal protein L37a
  misc_feature (1)..(63): NCBI GI NO: 6831607 NR Description: 60S ribosomal protein L37a
  misc_feature (1)..(64): NCBI GI NO: 6831602 NR Description: 60S RIBOSOMAL PROTEIN L37A
  misc_feature (1)..(64): NCBI GI NO: 15228411 NR Description: putative 60S ribosomal protein L37a
  misc_feature (1)..(63): NCBI GI NO: 18411538 NR Description: Expressed protein; protein id: At3g60245
  misc_feature (1)..(63): NCBI GI NO: 1173045 NR Description: 60S RIBOSOMAL PROTEIN L37A
  misc_feature (1)..(63): NCBI GI NO: 11358898 NR Description: translation initiation factor eIF-4 gamma homologF27H5
  misc_feature (1)..(64): NCBI GI NO: 6093889 NR Description: 60S RIBOSOMAL PROTEIN L37A
  misc_feature (1)..(60): NCBI GI NO: 7441206 NR Description: ribosomal protein L37a
  misc_feature (1)..(61): NCBI GI NO: 33637090 NR Description: N1 [Toxoplasma gondii]
MEVSQHSKYFCEFCGKFAVKRKAVGIWGCKDCGKVKAGGAYTMNTASAVTVRSTIRRLREQTEA

SEQ ID NO: 33240 - DNA, 929 bp, Zea mays subsp. mays
  misc_feature (1)..(929): Ceres Seq. ID no. 12361987
gcacgagaccattacctagaacatcctaatcgaaaatgctcaaccgctacatgcacctctcgggccgcttccacatgcgcgaggtggagcgcaccgtgcagcgcctcatccgcgacggggtgatagtgcacgcgccggcgagcccgttccacggcttcgtctacgtcgccttccaggagcgcgccaccgccatcgcgcacggcaacacggcgcgcctcgtgggcgcgcgcggggccgggggacgccgctctcgcgcgcatctgcggcaccgtcgccgccgacgagaagcggcacgaggcggcgtacacccgcgtcgtgggcaagttcttcgaggccgacccggacgccgccgtgcgcgccatggcgtacatgatgcggcgccggatcgacatgcccactgtgctcatcaacgacggccgccacagcagcggcgacttctacgctcgcttcgtcgccatcgcgcagcaggccggcacgtacacggtttccgactaccgcgccattctcgagcacttcatacggcagtggggcgtcgaggaacttgcggcggggctcaccggcgaggggaggcgcgcgcgggactacctgtgcgcgctgccgcacaagataaagaggatggaagagaaggcccacgatagagcggtcaaagcacaaaagaaacccacacccatccccatcaactggatcttcgataggaccattcctgtcattctaccttagtgtttatctttttcgatctttgtttgggtatctatgctgttattgtaagctaattccatggaccttgatagcgtcgttcatgcctacgtgtcgatagcatcattagtgtcgttctacccttaatcctgttatgccacgttaggtaccatttttttccataagagaatatttacaaatttataatttgttggatcgaggtgatacagggg

SEQ ID NO: 33241 - protein, 200 aa, Zea mays subsp. mays
  peptide (1)..(200): Ceres Seq. ID no. 12361988
  misc_feature (1)..(68): NCBI GI NO: 38637315 NR Description: putative Acyl-
  misc_feature (1)..(66): NCBI GI NO: 30089750 NR Description: putative stearoyl-acyl-carrier protein desaturase
  misc_feature (1)..(66): NCBI GI NO: 15232941 NR Description: putative stearoyl-acyl carrier protein desaturase
  misc_feature (1)..(66): NCBI GI NO: 34222062 NR Description: At3g02610 [Arabidopsis thaliana]
  misc_feature (1)..(66): NCBI GI NO: 15237307 NR Description: stearoyl-acyl carrier protein desaturase
  misc_feature (1)..(66): NCBI GI NO: 15232942 NR Description: putative stearoyl-acyl carrier protein desaturase
  misc_feature (1)..(66): NCBI GI NO: 1304409 NR Description: myristyl-ACP desaturase
  misc_feature (1)..(66): NCBI GI NO: 6983690 NR Description: AE9 stearoyl-ACP desaturase [Gossypium hirsutum]
  misc_feature (1)..(66): NCBI GI NO: 3915031 NR Description: Acyl-
  misc_feature (1)..(66): NCBI GI NO: 533086 NR Description: precursor delta-9-stearoyl-acyl carrier proteindesaturase
MLNRYMHLSGRFHMREVERTVQRLIRDGVIVHAPASPFHGFVYVAFQERATAIAHGNTARLVGARGAGGRRSRAHLRHRRRRREAARGGVHPRRGQVLRGRPGRRRARHGVHDAAPDRHAHCAHQRRPPQQRRLLRSLRRHRAAGRHVHGFRLPRHSRALHTAVGRRGTCGGAHRRGEARAGLPVRAAAQDKEDGREGPR

SEQ ID NO: 33242 - protein, 195 aa, Zea mays subsp. mays
  peptide (1)..(195): Ceres Seq. ID no. 12361989
  misc_feature (1)..(63): NCBI GI NO: 38637315 NR Description: putative Acyl-
  misc_feature (1)..(61): NCBI GI NO: 30089750 NR Description: putative stearoyl-acyl-carrier protein desaturase
  misc_feature (1)..(61): NCBI GI NO: 15232941 NR Description: putative stearoyl-acyl carrier protein desaturase
  misc_feature (1)..(61): NCBI GI NO: 34222062 NR Description: At3g02610 [Arabidopsis thaliana]
  misc_feature (1)..(61): NCBI GI NO: 15237307 NR Description: stearoyl-acyl carrier protein desaturase
  misc_feature (1)..(61): NCBI GI NO: 15232942 NR Description: putative stearoyl-acyl carrier protein desaturase
  misc_feature (1)..(61): NCBI GI NO: 1304409 NR Description: myristyl-ACP desaturase
  misc_feature (1)..(61): NCBI GI NO: 6983690 NR Description: AE9 stearoyl-ACP desaturase [Gossypium hirsutum]
  misc_feature (1)..(61): NCBI GI NO: 3915031 NR Description: Acyl-
  misc_feature (1)..(61): NCBI GI NO: 533086 NR Description: precursor delta-9-stearoyl-acyl carrier proteindesaturase
MHLSGRFHMREVERTVQRLIRDGVIVHAPASPFHGFVYVAFQERATAIAHGNTARLVGARGAGGRRSRAHLRHRRRRREAARGGVHPRRGQVLRGRPGRRRARHGVHDAAPDRHAHCAHQRRPPQQRRLLRSLRRHRAAGRHVHGFRLPRHSRALHTAVGRRGTCGGAHRRGEARAGLPVRAAAQDKEDGREGPR

SEQ ID NO: 33243 - protein, 187 aa, Zea mays subsp. mays
  peptide (1)..(187): Ceres Seq. ID no. 12361990
  misc_feature (1)..(55): NCBI GI NO: 38637315 NR Description: putative Acyl-
  misc_feature (1)..(53): NCBI GI NO: 30089750 NR Description: putative stearoyl-acyl-carrier protein desaturase
  misc_feature (1)..(53): NCBI GI NO: 15232941 NR Description: putative stearoyl-acyl carrier protein desaturase
  misc_feature (1)..(53): NCBI GI NO: 34222062 NR Description: At3g02610 [Arabidopsis thaliana]
  misc_feature (1)..(53): NCBI GI NO: 15237307 NR Description: stearoyl-acyl carrier protein desaturase
  misc_feature (1)..(53): NCBI GI NO: 15232942 NR Description: putative stearoyl-acyl carrier protein desaturase
  misc_feature (1)..(53): NCBI GI NO: 1304409 NR Description: myristyl-ACP desaturase
  misc_feature (1)..(53): NCBI GI NO: 6983690 NR Description: AE9 stearoyl-ACP desaturase [Gossypium hirsutum]
  misc_feature (1)..(53): NCBI GI NO: 3915031 NR Description: Acyl-
  misc_feature (1)..(53): NCBI GI NO: 533086 NR Description: precursor delta-9-stearoyl-acyl carrier proteindesaturase
MREVERTVQRLIRDGVIVHAPASPFHGFVYVAFQERATAIAHGNTARLVGARGAGGRRSRAHLRHRRRRREAARGGVHPRRGQVLRGRPGRRRARHGVHDAAPDRHAHCAHQRRPPQQRRLLRSLRRHRAAGRHVHGFRLPRHSRALHTAVGRRGTCGGAHRRGEARAGLPVRAAAQDKEDGREGPR

SEQ ID NO: 33244 - DNA, 1485 bp, Zea mays subsp. mays
  misc_feature (1)..(1485): Ceres Seq. ID no. 12376376
aattcctaaacaaacgaacgcattctcctcccaaaccaccagacatattgcagtctgccgtagaagtgaaagggtttggtgaaaaattccggccgcctcagcgtcgcgaggtgggggacgagacgaagccagagcgccccaaacccaaaccccagaaccccgacatagggttacgccatcgccatgggatctgttgcctccgcagcagcgccaccttctcctcactcagcgctaccccaggagggcgcgccgccctatggccccgggctcgccgggatcctcccgcagacgtcagtgggagaggagaagaaggaggagaaggtggactacctcaacctcctctgccccgtgcccttcgaggagatccagcgcgaggctctcatgtctttgaagcctgaactttttgaaggattgaggtttgacttcacaaaagggttgaatcaaaagttttctcttagccacagcgtttttatgggctccttagaagttccagcccaggggtctgaaactattaaagttccaactgctcattatgaatttggtgccaattttttagatccaaagttaatgctcattggaagggtgatgacagatggaaggcttaatgctcgcgtgaaatgtgatttgacagacaatctgatgctgaaagtaaatgcacagcttacccaagaggcacattactcacaaggaatgtttaactttgactacaagggaagtgactatcgagcacaattccaaatagggaacaatgcattctatggtgcaaattatattcagagtgttactccgaacctatcaatgggaactgaaatgttctggcttggtcaccaaaggaagtctggaattggttttgcctgtcgctataacacggacaaaatggtgggcactctacaggtcgcaagcactggaatagttgccttaagttatgtccagaagatttctgagaaggtttcccttgcgtctgatttcatgtataaccatatgtcaagagacgtaacttccagctttggttacgattacttgcttaggcagtgccgtctaagaggcaaaattgactcgaatggtgttgttgcggcatatctggaggagaggttgaacatgggtgtcaactttcttctatctgctgagattgaccattgtaagaagaactacaagtttggtttcggaatgaccgtaggagagtaattctgctaaaacaattgctgagaagagcacatgaggactttcgcagtctgctttgcattgtatgttaagatacttcaggtctcagttttgattgatcaggttctgccccgtcgaaaaaatactagctgttgctgctttacagggttttgtctcagtgtattggtggttgtttattttcagctacttgagcatgggggccatgattctttgttcatcttggatgtaactagctgattggtgttccaatgaaaaaaaaaaaaaaaaaaaaaaaaaaaaaaaaaaaaaaaaaaaaaaaataaa

SEQ ID NO: 33245 - protein, 333 aa, Zea mays subsp. mays
  peptide (1)..(333): Ceres Seq. ID no. 12376377
  misc_feature (55)..(326): Pfam Name: Pfam Description:  Eukaryotic porin
  misc_feature (29)..(332): NCBI GI NO: 15231008 NR Description: membrane import protein, putative
  misc_feature (42)..(329): NCBI GI NO: 15222963 NR Description: hypothetical protein; protein id: At1g50400.1
  misc_feature (159)..(332): NCBI GI NO: 11994775 NR Description: membrane import protein-like
  misc_feature (29)..(128): NCBI GI NO: 11994775 NR Description: membrane import protein-like
  misc_feature (156)..(329): NCBI GI NO: 13162531 NR Description: Hypothetical protein [Arabidopsis thaliana]
  misc_feature (42)..(128): NCBI GI NO: 13162531 NR Description: Hypothetical protein [Arabidopsis thaliana]
  misc_feature (156)..(329): NCBI GI NO: 25405370 NR Description: hypothetical protein F14I3.2
  misc_feature (97)..(128): NCBI GI NO: 25405370 NR Description: hypothetical protein F14I3.2
  misc_feature (241)..(333): NCBI GI NO: 2982293 NR Description: ISP42-like protein [Picea mariana]
  misc_feature (1)..(276): NCBI GI NO: 34903264 NR Description: unnamed protein product
MGSVASAAAPPSPHSALPQEGAPPYGPGLAGILPQTSVGEEKKEEKVDYLNLLCPVPFEEIQREALMSLKPELFEGLRFDFTKGLNQKFSLSHSVFMGSLEVPAQGSETIKVPTAHYEFGANFLDPKLMLIGRVMTDGRLNARVKCDLTDNLMLKVNAQLTQEAHYSQGMFNFDYKGSDYRAQFQIGNNAFYGANYIQSVTPNLSMGTEMFWLGHQRKSGIGFACRYNTDKMVGTLQVASTGIVALSYVQKISEKVSLASDFMYNHMSRDVTSSFGYDYLLRQCRLRGKIDSNGVVAAYLEERLNMGVNFLLSAEIDHCKKNYKFGFGMTVGE

SEQ ID NO: 33246 - protein, 267 aa, Zea mays subsp. mays
  peptide (1)..(267): Ceres Seq. ID no. 12376378
  misc_feature (1)..(260): Pfam Name: Pfam Description:  Eukaryotic porin
  misc_feature (1)..(266): NCBI GI NO: 15231008 NR Description: membrane import protein, putative
  misc_feature (1)..(263): NCBI GI NO: 15222963 NR Description: hypothetical protein; protein id: At1g50400.1
  misc_feature (93)..(266): NCBI GI NO: 11994775 NR Description: membrane import protein-like
  misc_feature (1)..(62): NCBI GI NO: 11994775 NR Description: membrane import protein-like
  misc_feature (90)..(263): NCBI GI NO: 13162531 NR Description: Hypothetical protein [Arabidopsis thaliana]
  misc_feature (1)..(62): NCBI GI NO: 13162531 NR Description: Hypothetical protein [Arabidopsis thaliana]
  misc_feature (90)..(263): NCBI GI NO: 25405370 NR Description: hypothetical protein F14I3.2
  misc_feature (31)..(62): NCBI GI NO: 25405370 NR Description: hypothetical protein F14I3.2
  misc_feature (175)..(267): NCBI GI NO: 2982293 NR Description: ISP42-like protein [Picea mariana]
  misc_feature (1)..(210): NCBI GI NO: 34903264 NR Description: unnamed protein product
MSLKPELFEGLRFDFTKGLNQKFSLSHSVFMGSLEVPAQGSETIKVPTAHYEFGANFLDPKLMLIGRVMTDGRLNARVKCDLTDNLMLKVNAQLTQEAHYSQGMFNFDYKGSDYRAQFQIGNNAFYGANYIQSVTPNLSMGTEMFWLGHQRKSGIGFACRYNTDKMVGTLQVASTGIVALSYVQKISEKVSLASDFMYNHMSRDVTSSFGYDYLLRQCRLRGKIDSNGVVAAYLEERLNMGVNFLLSAEIDHCKKNYKFGFGMTVGE

SEQ ID NO: 33247 - protein, 237 aa, Zea mays subsp. mays
  peptide (1)..(237): Ceres Seq. ID no. 12376379
  misc_feature (1)..(230): Pfam Name: Pfam Description:  Eukaryotic porin
  misc_feature (1)..(236): NCBI GI NO: 15231008 NR Description: membrane import protein, putative
  misc_feature (1)..(233): NCBI GI NO: 15222963 NR Description: hypothetical protein; protein id: At1g50400.1
  misc_feature (63)..(236): NCBI GI NO: 11994775 NR Description: membrane import protein-like
  misc_feature (1)..(32): NCBI GI NO: 11994775 NR Description: membrane import protein-like
  misc_feature (60)..(233): NCBI GI NO: 13162531 NR Description: Hypothetical protein [Arabidopsis thaliana]
  misc_feature (1)..(32): NCBI GI NO: 13162531 NR Description: Hypothetical protein [Arabidopsis thaliana]
  misc_feature (60)..(233): NCBI GI NO: 25405370 NR Description: hypothetical protein F14I3.2
  misc_feature (1)..(32): NCBI GI NO: 25405370 NR Description: hypothetical protein F14I3.2
  misc_feature (145)..(237): NCBI GI NO: 2982293 NR Description: ISP42-like protein [Picea mariana]
  misc_feature (1)..(180): NCBI GI NO: 34903264 NR Description: unnamed protein product
MGSLEVPAQGSETIKVPTAHYEFGANFLDPKLMLIGRVMTDGRLNARVKCDLTDNLMLKVNAQLTQEAHYSQGMFNFDYKGSDYRAQFQIGNNAFYGANYIQSVTPNLSMGTEMFWLGHQRKSGIGFACRYNTDKMVGTLQVASTGIVALSYVQKISEKVSLASDFMYNHMSRDVTSSFGYDYLLRQCRLRGKIDSNGVVAAYLEERLNMGVNFLLSAEIDHCKKNYKFGFGMTVGE

SEQ ID NO: 33248 - DNA, 834 bp, Zea mays subsp. mays; identical to SEQ ID NO: 30966
  misc_feature (1)..(834): Ceres Seq. ID no. 12404684

SEQ ID NO: 33249 - protein, 177 aa, Zea mays subsp. mays; identical to SEQ ID NO: 30967
  peptide (1)..(177): Ceres Seq. ID no. 12404685

SEQ ID NO: 33250 - protein, 169 aa, Zea mays subsp. mays; identical to SEQ ID NO: 30968
  peptide (1)..(169): Ceres Seq. ID no. 12404686
  misc_feature (1)..(100): NCBI GI NO: 123549 NR Description: 17.5 KD CLASS II HEAT SHOCK PROTEIN
  misc_feature (1)..(100): NCBI GI NO: 123553 NR Description: 17.8 KD CLASS II HEAT SHOCK PROTEIN
  misc_feature (1)..(102): NCBI GI NO: 34906270 NR Description: putative heat shock protein, 18K - maize
  misc_feature (1)..(100): NCBI GI NO: 14009833 NR Description: small heat shock protein HSP17.8
  misc_feature (1)..(100): NCBI GI NO: 729762 NR Description: 17.0 KD CLASS II HEAT SHOCK PROTEIN (HSP 18)
  misc_feature (1)..(100): NCBI GI NO: 100790 NR Description: heat shock protein 17.3 - wheat
  misc_feature (1)..(100): NCBI GI NO: 5257560 NR Description: cytosolic class II low molecular weight heat shock
  misc_feature (1)..(100): NCBI GI NO: 123580 NR Description: 17.9 KD CLASS II HEAT SHOCK PROTEIN
  misc_feature (1)..(100): NCBI GI NO: 7441328 NR Description: heat shock protein 17.6 - tomato
  misc_feature (1)..(100): NCBI GI NO: 3336894 NR Description: Hsp20.2 protein [Lycopersicon peruvianum]

SEQ ID NO: 33251 - protein, 165 aa, Zea mays subsp. mays; identical to SEQ ID NO: 30969
  peptide (1)..(165): Ceres Seq. ID no. 12404687
  misc_feature (1)..(96): NCBI GI NO: 123549 NR Description: 17.5 KD CLASS II HEAT SHOCK PROTEIN
  misc_feature (1)..(96): NCBI GI NO: 123553 NR Description: 17.8 KD CLASS II HEAT SHOCK PROTEIN
  misc_feature (1)..(98): NCBI GI NO: 34906270 NR Description: putative heat shock protein, 18K - maize
  misc_feature (1)..(96): NCBI GI NO: 14009833 NR Description: small heat shock protein HSP17.8
  misc_feature (1)..(96): NCBI GI NO: 729762 NR Description: 17.0 KD CLASS II HEAT SHOCK PROTEIN (HSP 18)
  misc_feature (1)..(96): NCBI GI NO: 100790 NR Description: heat shock protein 17.3 - wheat
  misc_feature (1)..(96): NCBI GI NO: 5257560 NR Description: cytosolic class II low molecular weight heat shock
  misc_feature (1)..(96): NCBI GI NO: 123580 NR Description: 17.9 KD CLASS II HEAT SHOCK PROTEIN
  misc_feature (1)..(96): NCBI GI NO: 7441328 NR Description: heat shock protein 17.6 - tomato
  misc_feature (1)..(96): NCBI GI NO: 3336894 NR Description: Hsp20.2 protein [Lycopersicon peruvianum]

SEQ ID NO: 33252 - DNA, 990 bp, Zea mays subsp. mays
  misc_feature (1)..(990): Ceres Seq. ID no. 12345649
gctccctatccaatcttctcctccctccctcccccgcgtcgcggcaagacgacctcgccgctccctgcctccctctccccgccgcaggtgctggagatgcaggcgactgccgcctccttcctcgcccgcccactcccgcggcttcgccgcattggcagctggggagcggatgcggcggtggtgcgtgagggcgttatcgcgctccctctgcggctgcgggggccgcggtgctccattagcctctccatcggcgccggcgccggcgctggcgccgaagctgaccacgagttcagctacgagcatgttccggtgttccctagataccgaatacgagatccctacaagcttcttggtgttgatcgtgatgcatctgaagaagagatccgaggtgcgaggaatttccttattcaacagtatgctgggcatgaaccgagtgaagaagctattgaaggtgcttatgagaagataattatgaagagctaccagcagcggaagaagacaaaaattaacttgaaaaccaagttaaagaagagagtagaggaatccccttcatgggtcaaagcacttcttggttgctttgaggtgccatcgatggatattatctccagaagattgtttttctttgctttcattgctggatggagcatagcaacttctgcagagaatggacctgcatttcagctcgcgatatcgctattctcatgcatatatttcctcaacgaaaagatgaagaaccttctaagggcatcaaccactgggtttggaatacttgttggcggttggatcattggttctctactggttccactggtcccaacattcatcatcccaccttcatggtctctagagctacttacctcactagttgcttacattttcttgtttctgggatccactttcctgaaatgaatctgtttcaatcttgtaactggaactgttggatcttttgagagggaaattacgatgactgatctctggatttgagttttc

SEQ ID NO: 33253 - protein, 302 aa, Zea mays subsp. mays
  peptide (1)..(302): Ceres Seq. ID no. 12345650
  misc_feature (101)..(302): NCBI GI NO: 15237199 NR Description: putative protein; protein id: At5g23040.1
  misc_feature (189)..(302): NCBI GI NO: 37573058 NR Description: unknown protein
  misc_feature (58)..(302): NCBI GI NO: 11357625 NR Description: hypothetical protein F24M12
  misc_feature (60)..(302): NCBI GI NO: 18409276 NR Description: putative protein; protein id: At3g51140
  misc_feature (111)..(302): NCBI GI NO: 17230751 NR Description: hypothetical protein [Nostoc sp. PCC 7120]
  misc_feature (113)..(302): NCBI GI NO: 16329734 NR Description: unknown protein [Synechocystis sp. PCC 6803]
  misc_feature (114)..(302): NCBI GI NO: 23039527 NR Description: hypothetical protein
  misc_feature (111)..(302): NCBI GI NO: 23129945 NR Description: hypothetical protein [Nostoc punctiforme]
  misc_feature (112)..(294): NCBI GI NO: 37520608 NR Description: hypothetical protein glr1039
APYPIFSSLPPPRRGKTTSPLPASLSPPQVLEMQATAASFLARPLPRLRRIGSWGADAAVVREGVIALPLRLRGPRCSISLSIGAGAGAGAEADHEFSYEHVPVFPRYRIRDPYKLLGVDRDASEEEIRGARNFLIQQYAGHEPSEEAIEGAYEKIIMKSYQQRKKTKINLKTKLKKRVEESPSWVKALLGCFEVPSMDIISRRLFFFAFIAGWSIATSAENGPAFQLAISLFSCIYFLNEKMKNLLRASTTGFGILVGGWIIGSLLVPLVPTFIIPPSWSLELLTSLVAYIFLFLGSTFLK

SEQ ID NO: 33254 - protein, 270 aa, Zea mays subsp. mays
  peptide (1)..(270): Ceres Seq. ID no. 12345651
  misc_feature (69)..(270): NCBI GI NO: 15237199 NR Description: putative protein; protein id: At5g23040.1
  misc_feature (157)..(270): NCBI GI NO: 37573058 NR Description: unknown protein
  misc_feature (26)..(270): NCBI GI NO: 11357625 NR Description: hypothetical protein F24M12
  misc_feature (28)..(270): NCBI GI NO: 18409276 NR Description: putative protein; protein id: At3g51140
  misc_feature (79)..(270): NCBI GI NO: 17230751 NR Description: hypothetical protein [Nostoc sp. PCC 7120]
  misc_feature (81)..(270): NCBI GI NO: 16329734 NR Description: unknown protein [Synechocystis sp. PCC 6803]
  misc_feature (82)..(270): NCBI GI NO: 23039527 NR Description: hypothetical protein
  misc_feature (79)..(270): NCBI GI NO: 23129945 NR Description: hypothetical protein [Nostoc punctiforme]
  misc_feature (80)..(262): NCBI GI NO: 37520608 NR Description: hypothetical protein glr1039
MQATAASFLARPLPRLRRIGSWGADAAVVREGVIALPLRLRGPRCSISLSIGAGAGAGAEADHEFSYEHVPVFPRYRIRDPYKLLGVDRDASEEEIRGARNFLIQQYAGHEPSEEAIEGAYEKIIMKSYQQRKKTKINLKTKLKKRVEESPSWVKALLGCFEVPSMDIISRRLFFFAFIAGWSIATSAENGPAFQLAISLFSCIYFLNEKMKNLLRASTTGFGILVGGWIIGSLLVPLVPTFIIPPSWSLELLTSLVAYIFLFLGSTFLK

SEQ ID NO: 33255 - protein, 155 aa, Zea mays subsp. mays
  peptide (1)..(155): Ceres Seq. ID no. 12345652
LPIQSSPPSLPRVAARRPRRSLPPSPRRRCWRCRRLPPPSSPAHSRGFAALAAGERMRRWCVRALSRSLCGCGGRGAPLASPSAPAPALAPKLTTSSATSMFRCSLDTEYEIPTSFLVLIVMHLKKRSEVRGISLFNSMLGMNRVKKLLKVLMRR

SEQ ID NO: 33256 - DNA, 735 bp, Zea mays subsp. mays
  misc_feature (1)..(735): Ceres Seq. ID no. 12350308
ctttttttcattacccccacctccgtggcgaggctcccccacctactaatacctctcctctctcgctcgcctgtcgcctttgtattcgtcttgctccagccgccgtcggatcggatccgatccaaagcaagcagcagcagccggctcctcctccgcctcccgcagcagccacaccccgtccgtcaccagaggaagaggaggaggatgtcgggatcgaaggtgtacacccttgaggaggtggccaagcacaacaccaaggacgactgctggctcgtcatcggcggcaaggtgtacaatgtgaccaagtttctggaggaccaccctggaggtgatgatgtcctgctgtcttccactgccaaggatgctaccgatgatttcgaagatgtggggcacagcaccaccgcccgtgcaatgatggacgagtacctcgtcggtgagattgatgcggccacgatacccagtaaggtgaagtacacgccccccaagcagccgcactacaaccaggataagaccccggagttcgtcatcaagatcctccagtttttggtccccctggcaatactgggcctggctgttgctgtaaggatctacaccaagtcggaatctgcctagtcatctgaaccaagttagcgagggttgcatcttgtaccagagtcgcatgtcagaaacttgagtctttgctgtcatacggttatatttatatgagacttctatcggtaaaatgaaatggatgtc

SEQ ID NO: 33257 - protein, 203 aa, Zea mays subsp. mays
  peptide (1)..(203): Ceres Seq. ID no. 12350309
  misc_feature (74)..(148): Pfam Name: Pfam Description:  Cytochrome b5-like Heme/Steroid binding domain
  misc_feature (69)..(203): NCBI GI NO: 34905998 NR Description: putative cytochrome B5
  misc_feature (73)..(203): NCBI GI NO: 14719320 NR Description: cytochrome B5 [Oryza sativa]
  misc_feature (73)..(203): NCBI GI NO: 1345881 NR Description: Cytochrome b5
  misc_feature (72)..(200): NCBI GI NO: 15225731 NR Description: putative cytochrome b5; protein id: At2g32720.1
  misc_feature (69)..(203): NCBI GI NO: 1076621 NR Description: cytochrome b5 - common tobacco
  misc_feature (69)..(203): NCBI GI NO: 1345882 NR Description: CYTOCHROME B5
  misc_feature (69)..(202): NCBI GI NO: 1345879 NR Description: Cytochrome b5
  misc_feature (69)..(202): NCBI GI NO: 1345925 NR Description: Cytochrome b5, seed isoform
  misc_feature (72)..(202): NCBI GI NO: 2647949 NR Description: cytochrome b5 [Olea europaea]
  misc_feature (73)..(202): NCBI GI NO: 12229735 NR Description: Cytochrome b5
LFFITPTSVARLPHLLIPLLSRSPVAFVFVLLQPPSDRIRSKASSSSRLLLRLPQQPHPVRHQRKRRRMSGSKVYTLEEVAKHNTKDDCWLVIGGKVYNVTKFLEDHPGGDDVLLSSTAKDATDDFEDVGHSTTARAMMDEYLVGEIDAATIPSKVKYTPPKQPHYNQDKTPEFVIKILQFLVPLAILGLAVAVRIYTKSESA

SEQ ID NO: 33258 - protein, 135 aa, Zea mays subsp. mays
  peptide (1)..(135): Ceres Seq. ID no. 12350310
  misc_feature (6)..(80): Pfam Name: Pfam Description:  Cytochrome b5-like Heme/Steroid binding domain
  misc_feature (1)..(135): NCBI GI NO: 34905998 NR Description: putative cytochrome B5
  misc_feature (5)..(135): NCBI GI NO: 14719320 NR Description: cytochrome B5 [Oryza sativa]
  misc_feature (5)..(135): NCBI GI NO: 1345881 NR Description: Cytochrome b5
  misc_feature (4)..(132): NCBI GI NO: 15225731 NR Description: putative cytochrome b5; protein id: At2g32720.1
  misc_feature (1)..(135): NCBI GI NO: 1076621 NR Description: cytochrome b5 - common tobacco
  misc_feature (1)..(135): NCBI GI NO: 1345882 NR Description: CYTOCHROME B5
  misc_feature (1)..(134): NCBI GI NO: 1345879 NR Description: Cytochrome b5
  misc_feature (1)..(134): NCBI GI NO: 1345925 NR Description: Cytochrome b5, seed isoform
  misc_feature (4)..(134): NCBI GI NO: 2647949 NR Description: cytochrome b5 [Olea europaea]
  misc_feature (5)..(134): NCBI GI NO: 12229735 NR Description: Cytochrome b5
MSGSKVYTLEEVAKHNTKDDCWLVIGGKVYNVTKFLEDHPGGDDVLLSSTAKDATDDFEDVGHSTTARAMMDEYLVGEIDAATIPSKVKYTPPKQPHYNQDKTPEFVIKILQFLVPLAILGLAVAVRIYTKSESA

SEQ ID NO: 33259 - DNA, 769 bp, Zea mays subsp. mays
  misc_feature (1)..(769): Ceres Seq. ID no. 12342308
catgaggaaagcaaggcacaacttcaggctcgatgaggtcggaataagaaggcagttgaagatcgtctctcagattatcaagcgcaaagattcacacctgtataggcatctgcagaagttgcaggctgaggactgtttctttgtgtacagaatggtggtagttctcttcaggagagagctcacttttgagcagactgtgtgcttgtgggaggttatgtgggctgaccaggcagctatacgagccgggatcgggaggtccacctggggaaggataagactgcgtgctcccccaactgacgacttgctactctatgccatcgccgcttgtgtcctgcagaggaggaagctaataattgagaagtatagcagcatggacgagatactgcgagagtgcaacagcatggctgggcagctcgacgtctggaggctgctagatgatgcacatgacctggttgttaaccttcacgataaaatctgatctgggtggtgagtgctgctctttgctctaacggcggagcaggtgtaagcctcaacagaaggaaaaatattgtggttcctttaccacctactgaaagtattctattatctgctattcattcccagcacggaaccaacttctaggtatagagaatgttgttaacttagagtgaggactcgagtgtcctcgcaaagaaaatgctgaaagattgtttggtgttagtgaggcactgtaaactgttcgttgtttaacttgttataggcaaaaacagagtttcctgggatggcaccc

SEQ ID NO: 33260 - protein, 158 aa, Zea mays subsp. mays
  peptide (1)..(158): Ceres Seq. ID no. 12342309
  misc_feature (1)..(158): NCBI GI NO: 15238237 NR Description: GTPase activator protein of Rab-like small GTPases-like protein
  misc_feature (1)..(158): NCBI GI NO: 15229125 NR Description: GTPase activating -like protein
  misc_feature (1)..(158): NCBI GI NO: 37536102 NR Description: putative GTPase activating protein
  misc_feature (1)..(158): NCBI GI NO: 9759196 NR Description: GTPase activator protein of Rab-like small GTPases-like protein
  misc_feature (1)..(158): NCBI GI NO: 15238777 NR Description: GTPase activator protein of Rab-like small GTPases-like protein
  misc_feature (1)..(158): NCBI GI NO: 15238518 NR Description: GTPase activator-like protein of Rab-like smallGTPases
  misc_feature (1)..(74): NCBI GI NO: 30688016 NR Description: expressed protein [Arabidopsis thaliana]
  misc_feature (1)..(74): NCBI GI NO: 34893986 NR Description: P0672D08.1
  misc_feature (1)..(74): NCBI GI NO: 25407604 NR Description: hypothetical protein AT4g28550
  misc_feature (1)..(74): NCBI GI NO: 15225355 NR Description: unknown protein; protein id: At2g20440.1
MRKARHNFRLDEVGIRRQLKIVSQIIKRKDSHLYRHLQKLQAEDCFFVYRMVVVLFRRELTFEQTVCLWEVMWADQAAIRAGIGRSTWGRIRLRAPPTDDLLLYAIAACVLQRRKLIIEKYSSMDEILRECNSMAGQLDVWRLLDDAHDLVVNLHDKI

SEQ ID NO: 33261 - protein, 108 aa, Zea mays subsp. mays
  peptide (1)..(108): Ceres Seq. ID no. 12342310
  misc_feature (1)..(108): NCBI GI NO: 15238237 NR Description: GTPase activator protein of Rab-like small GTPases-like protein
  misc_feature (1)..(108): NCBI GI NO: 15229125 NR Description: GTPase activating -like protein
  misc_feature (1)..(108): NCBI GI NO: 37536102 NR Description: putative GTPase activating protein
  misc_feature (1)..(108): NCBI GI NO: 9759196 NR Description: GTPase activator protein of Rab-like small GTPases-like protein
  misc_feature (1)..(108): NCBI GI NO: 15238777 NR Description: GTPase activator protein of Rab-like small GTPases-like protein
  misc_feature (1)..(108): NCBI GI NO: 15238518 NR Description: GTPase activator-like protein of Rab-like smallGTPases
  misc_feature (1)..(24): NCBI GI NO: 30688016 NR Description: expressed protein [Arabidopsis thaliana]
  misc_feature (1)..(24): NCBI GI NO: 34893986 NR Description: P0672D08.1
  misc_feature (1)..(24): NCBI GI NO: 25407604 NR Description: hypothetical protein AT4g28550
  misc_feature (1)..(24): NCBI GI NO: 15225355 NR Description: unknown protein; protein id: At2g20440.1
MVVVLFRRELTFEQTVCLWEVMWADQAAIRAGIGRSTWGRIRLRAPPTDDLLLYAIAACVLQRRKLIIEKYSSMDEILRECNSMAGQLDVWRLLDDAHDLVVNLHDKI

SEQ ID NO: 33262 - protein, 87 aa, Zea mays subsp. mays
  peptide (1)..(87): Ceres Seq. ID no. 12342311
  misc_feature (1)..(87): NCBI GI NO: 15238237 NR Description: GTPase activator protein of Rab-like small GTPases-like protein
  misc_feature (1)..(87): NCBI GI NO: 15229125 NR Description: GTPase activating -like protein
  misc_feature (1)..(87): NCBI GI NO: 37536102 NR Description: putative GTPase activating protein
  misc_feature (1)..(87): NCBI GI NO: 9759196 NR Description: GTPase activator protein of Rab-like small GTPases-like protein
  misc_feature (1)..(87): NCBI GI NO: 15238777 NR Description: GTPase activator protein of Rab-like small GTPases-like protein
  misc_feature (1)..(87): NCBI GI NO: 15238518 NR Description: GTPase activator-like protein of Rab-like smallGTPases
MWADQAAIRAGIGRSTWGRIRLRAPPTDDLLLYAIAACVLQRRKLIIEKYSSMDEILRECNSMAGQLDVWRLLDDAHDLVVNLHDKI

SEQ ID NO: 33263 - DNA, 1191 bp, Zea mays subsp. mays
  misc_feature (1)..(1191): Ceres Seq. ID no. 12376280
gcacgagaccattacctagaacatcctaatcgaaaaattccattgacttgacacgctataaaatcccagctccatggccgcaaaccagcagctgcagcatcagcatcgttccatccatccatcctactatccagcttcagcccgggccagccgctccacagcagcaagcaagcaaggctgagaacgaacgaagcagcccgcatccgcatccatggccgccgtgctggtggcgaggcaggggcgcgagctgcagcggtacagccagagcacgggcgggcgcatcgtggtgggctgcatcccgtaccgcgtgcggcgcgacggcgagctggaggtgctggtgatcacgtcccagaaggggcacggcatgatgttccccaagggcgggtgggaggtggacgagtccatggacgaggccgcccggcgcgaggccctcgaggaggccggcgtgctcggcgacaccgagccggtcctcggcctctggcactacaagagccgccgctacgtggaccagacctacgagggcttcatgttcccgctccgcgtcgccgacgagctccaccagtggcccgagatggcgtcccgcaagcgcacctgggcaacggtgcagcaggcgatggacgggtgcccgcactggtggatgcgcgaggcgctggagcggctcgtcgcgcggcaagccgtgctgcagtctgccctctgatcgccgtcatcgactggggtaacaacagaggcggggaggcgcgaggcaccatgtgcgcacgccgccacggctctctctctctctctgtctcggtgcagcggcaggccggccggcccggcgttccgggtctggaatttggtcgccctcaccgggagagtcgaacggcgcgccgcgcggctcgtgtgctctggcgatgctttcttgtgaccccccctgaccccgaggcgcggagtcgtcgttggcaaataaaatcatcagatcgtttttagagggcggatggtttagacgaaatggaaaacaaaatctgaactggacgcctagtggaaggaaaagaaaaggaatagaacagcagcgcgaaacaattcggcgattctttcgagtaactgcacaaattgtaaaattttagtggtgactcgtttcttgaccttgggtggcaccgtggcagaattgttacgagctgttcaattcaaaaaagaagaagaagaaaaagtttc

SEQ ID NO: 33264 - protein, 161 aa, Zea mays subsp. mays
  peptide (1)..(161): Ceres Seq. ID no. 12376281
  misc_feature (23)..(153): Pfam Name: Pfam Description:  NUDIX domain
  misc_feature (5)..(157): NCBI GI NO: 15223919 NR Description: hypothetical protein; protein id: At1g14860.1
  misc_feature (5)..(153): NCBI GI NO: 18379275 NR Description: expressed protein; protein id: At2g01670
  misc_feature (5)..(153): NCBI GI NO: 21595695 NR Description: unknown [Arabidopsis thaliana]
  misc_feature (1)..(151): NCBI GI NO: 15221055 NR Description: unknown protein; protein id: At1g18300.1
  misc_feature (1)..(158): NCBI GI NO: 22330598 NR Description: unknown protein; protein id: At1g73540
  misc_feature (1)..(158): NCBI GI NO: 25367539 NR Description: unknown protein [imported] - Arabidopsis thaliana
  misc_feature (5)..(147): NCBI GI NO: 38175436 NR Description: MutT-like protein
  misc_feature (5)..(147): NCBI GI NO: 34900054 NR Description: MutT-like protein~contains ESTsAU085960
  misc_feature (5)..(147): NCBI GI NO: 18399682 NR Description: expressed protein; protein id: At3g12600.1
  misc_feature (3)..(151): NCBI GI NO: 18391450 NR Description: expressed protein; protein id: At1g12880
MAAVLVARQGRELQRYSQSTGGRIVVGCIPYRVRRDGELEVLVITSQKGHGMMFPKGGWEVDESMDEAARREALEEAGVLGDTEPVLGLWHYKSRRYVDQTYEGFMFPLRVADELHQWPEMASRKRTWATVQQAMDGCPHWWMREALERLVARQAVLQSAL

SEQ ID NO: 33265 - protein, 110 aa, Zea mays subsp. mays
  peptide (1)..(110): Ceres Seq. ID no. 12376282
  misc_feature (1)..(102): Pfam Name: Pfam Description:  NUDIX domain
  misc_feature (1)..(106): NCBI GI NO: 15223919 NR Description: hypothetical protein; protein id: At1g14860.1
  misc_feature (1)..(102): NCBI GI NO: 18379275 NR Description: expressed protein; protein id: At2g01670
  misc_feature (1)..(102): NCBI GI NO: 21595695 NR Description: unknown [Arabidopsis thaliana]
  misc_feature (1)..(100): NCBI GI NO: 15221055 NR Description: unknown protein; protein id: At1g18300.1
  misc_feature (1)..(107): NCBI GI NO: 22330598 NR Description: unknown protein; protein id: At1g73540
  misc_feature (1)..(107): NCBI GI NO: 25367539 NR Description: unknown protein [imported] - Arabidopsis thaliana
  misc_feature (1)..(96): NCBI GI NO: 38175436 NR Description: MutT-like protein
  misc_feature (1)..(96): NCBI GI NO: 34900054 NR Description: MutT-like protein~contains ESTsAU085960
  misc_feature (1)..(96): NCBI GI NO: 18399682 NR Description: expressed protein; protein id: At3g12600.1
  misc_feature (1)..(100): NCBI GI NO: 18391450 NR Description: expressed protein; protein id: At1g12880
MMFPKGGWEVDESMDEAARREALEEAGVLGDTEPVLGLWHYKSRRYVDQTYEGFMFPLRVADELHQWPEMASRKRTWATVQQAMDGCPHWWMREALERLVARQAVLQSAL

SEQ ID NO: 33266 - protein, 109 aa, Zea mays subsp. mays
  peptide (1)..(109): Ceres Seq. ID no. 12376283
  misc_feature (1)..(101): Pfam Name: Pfam Description:  NUDIX domain
  misc_feature (1)..(105): NCBI GI NO: 15223919 NR Description: hypothetical protein; protein id: At1g14860.1
  misc_feature (1)..(101): NCBI GI NO: 18379275 NR Description: expressed protein; protein id: At2g01670
  misc_feature (1)..(101): NCBI GI NO: 21595695 NR Description: unknown [Arabidopsis thaliana]
  misc_feature (1)..(99): NCBI GI NO: 15221055 NR Description: unknown protein; protein id: At1g18300.1
  misc_feature (1)..(106): NCBI GI NO: 22330598 NR Description: unknown protein; protein id: At1g73540
  misc_feature (1)..(106): NCBI GI NO: 25367539 NR Description: unknown protein [imported] - Arabidopsis thaliana
  misc_feature (1)..(95): NCBI GI NO: 38175436 NR Description: MutT-like protein
  misc_feature (1)..(95): NCBI GI NO: 34900054 NR Description: MutT-like protein~contains ESTsAU085960
  misc_feature (1)..(95): NCBI GI NO: 18399682 NR Description: expressed protein; protein id: At3g12600.1
  misc_feature (1)..(99): NCBI GI NO: 18391450 NR Description: expressed protein; protein id: At1g12880
MFPKGGWEVDESMDEAARREALEEAGVLGDTEPVLGLWHYKSRRYVDQTYEGFMFPLRVADELHQWPEMASRKRTWATVQQAMDGCPHWWMREALERLVARQAVLQSAL

SEQ ID NO: 33267 - DNA, 1310 bp, Zea mays subsp. mays
  misc_feature (1)..(1310): Ceres Seq. ID no. 12347716
catttaccactgaccctgtatttcgtgtcaccttgcgactccgacgaaccccaatcccgcgcgccggtgaccatggagttcatcgacccctgggactcccagtcccgcgctcgcgtcgtccattccggcgccaactccacttcgttctcctcctccaccgccaaagcacccctctccctccgccacgccgcatcttgcgccgccgcggccgtcgcacttctcgccgccgcgttctacctcctcccgacctaccagatcctctcctccctcctcatatggatcgcttcgtccctgctcctcgctcccttcgcgcccttgtcggccactggcggcgacatctccgtcggccgaggccgcgtcgttccggctccagaaccggccccagaacccacgccggaacccacgcccgccccccgccgcggccgtcgccagaacccagtcccgacgcccacaaaaccctcagatccgggcactccccccgtccaatcggccgcatcactgcatccgttgcagaaggcgacaactgcgggtggagccgtggtggacggcggcgagagggaggaggacgccggcgagtggactgaccaagagctggagctgctccggcggcagatggtgaagcacccggcgggtgagccccagcgctgggagaagatcgccgcggtgtttggcggccgccgcacgccggagaatgtcatccgggcggcaaagtcgggcgctcccgcggcgggaggaagctcgttcgagcagttcctacgcaagcggaagccgctcgatccgagggccgaggttgctgacactgcggacgatgcgggaggcgccgagagtgcggacgccgcttggagcgccggggatgaccgggccttgctgaatgctcttaaggagttcccgaaggacactgcaatgaggtgggagaaggtggcggcctctgtacccgggaagacaaaggccgcgtgcatgaagaggatcaccgagctcaagcgagacttcaggagcaccaagacggcatcggaagcagcaccataggcgaaacctgagaattttggtaggggtgccggactgaatgacatgcgctgcactggtttggctagcgaggaagaactttacatggctagctccagtgaaccatggaaacggcagaggattaactacactacggagagggccggagctatagaacagatcatgtaattttcctattgaactagagacagggtatcccttgatataggagaaactttgacttactactggacacatggcatgagacaggaagaacctgttcttgtttcaaactaaagcatgttttc

SEQ ID NO: 33268 - protein, 341 aa, Zea mays subsp. mays
  peptide (1)..(341): Ceres Seq. ID no. 12347717
  misc_feature (281)..(327): Pfam Name: Pfam Description:  Myb-like DNA-binding domain
  misc_feature (25)..(341): NCBI GI NO: 34905190 NR Description: P0498E12.13
  misc_feature (24)..(335): NCBI GI NO: 9758732 NR Description: gene_id:MFC19.9~unknown protein
  misc_feature (25)..(335): NCBI GI NO: 18422552 NR Description: expressed protein; protein id: At5g45420
  misc_feature (193)..(272): NCBI GI NO: 15229761 NR Description: putative cell division related protein
  misc_feature (262)..(335): NCBI GI NO: 15229761 NR Description: putative cell division related protein
  misc_feature (179)..(272): NCBI GI NO: 15239928 NR Description: cell division related protein-like
  misc_feature (268)..(334): NCBI GI NO: 15239928 NR Description: cell division related protein-like
  misc_feature (165)..(338): NCBI GI NO: 32766539 NR Description: Unknown (protein for IMAGE:2640354) [Danio rerio]
  misc_feature (192)..(271): NCBI GI NO: 4633127 NR Description: GlsA [Volvox carteri f. nagariensis]
  misc_feature (262)..(337): NCBI GI NO: 4633127 NR Description: GlsA [Volvox carteri f. nagariensis]
HLPLTLYFVSPCDSDEPQSRAPVTMEFIDPWDSQSRARVVHSGANSTSFSSSTAKAPLSLRHAASCAAAAVALLAAAFYLLPTYQILSSLLIWIASSLLLAPFAPLSATGGDISVGRGRVVPAPEPAPEPTPEPTPAPRRGRRQNPVPTPTKPSDPGTPPVQSAASLHPLQKATTAGGAVVDGGEREEDAGEWTDQELELLRRQMVKHPAGEPQRWEKIAAVFGGRRTPENVIRAAKSGAPAAGGSSFEQFLRKRKPLDPRAEVADTADDAGGAESADAAWSAGDDRALLNALKEFPKDTAMRWEKVAASVPGKTKAACMKRITELKRDFRSTKTASEAAP

SEQ ID NO: 33269 - protein, 317 aa, Zea mays subsp. mays
  peptide (1)..(317): Ceres Seq. ID no. 12347718
  misc_feature (257)..(303): Pfam Name: Pfam Description:  Myb-like DNA-binding domain
  misc_feature (1)..(317): NCBI GI NO: 34905190 NR Description: P0498E12.13
  misc_feature (1)..(311): NCBI GI NO: 9758732 NR Description: gene_id:MFC19.9~unknown protein
  misc_feature (1)..(311): NCBI GI NO: 18422552 NR Description: expressed protein; protein id: At5g45420
  misc_feature (169)..(248): NCBI GI NO: 15229761 NR Description: putative cell division related protein
  misc_feature (238)..(311): NCBI GI NO: 15229761 NR Description: putative cell division related protein
  misc_feature (155)..(248): NCBI GI NO: 15239928 NR Description: cell division related protein-like
  misc_feature (244)..(310): NCBI GI NO: 15239928 NR Description: cell division related protein-like
  misc_feature (141)..(314): NCBI GI NO: 32766539 NR Description: Unknown (protein for IMAGE:2640354) [Danio rerio]
  misc_feature (168)..(247): NCBI GI NO: 4633127 NR Description: GlsA [Volvox carteri f. nagariensis]
  misc_feature (238)..(313): NCBI GI NO: 4633127 NR Description: GlsA [Volvox carteri f. nagariensis]
MEFIDPWDSQSRARVVHSGANSTSFSSSTAKAPLSLRHAASCAAAAVALLAAAFYLLPTYQILSSLLIWIASSLLLAPFAPLSATGGDISVGRGRVVPAPEPAPEPTPEPTPAPRRGRRQNPVPTPTKPSDPGTPPVQSAASLHPLQKATTAGGAVVDGGEREEDAGEWTDQELELLRRQMVKHPAGEPQRWEKIAAVFGGRRTPENVIRAAKSGAPAAGGSSFEQFLRKRKPLDPRAEVADTADDAGGAESADAAWSAGDDRALLNALKEFPKDTAMRWEKVAASVPGKTKAACMKRITELKRDFRSTKTASEAAP

SEQ ID NO: 33270 - protein, 193 aa, Zea mays subsp. mays
  peptide (1)..(193): Ceres Seq. ID no. 12347719
FTTDPVFRVTLRLRRTPIPRAGDHGVHRPLGLPVPRSRRPFRRQLHFVLLLHRQSTPLPPPRRILRRRGRRTSRRRVLPPPDLPDPLLPPHMDRFVPAPRSLRALVGHWRRHLRRPRPRRSGSRTGPRTHAGTHARPPPRPSPEPSPDAHKTLRSGHSPRPIGRITASVAEGDNCGWSRGGRRREGGGRRRVD

SEQ ID NO: 33271 - DNA, 1162 bp, Zea mays subsp. mays; identical to SEQ ID NO: 30340
  misc_feature (1)..(1162): Ceres Seq. ID no. 12344858

SEQ ID NO: 33272 - protein, 180 aa, Zea mays subsp. mays; identical to SEQ ID NO: 30341
  peptide (1)..(180): Ceres Seq. ID no. 12344859
  misc_feature (51)..(179): Pfam Name: Pfam Description:  Mpp10 protein
  misc_feature (79)..(179): NCBI GI NO: 35210494 NR Description: aspartic acid-rich protein aspolin2
  misc_feature (79)..(179): NCBI GI NO: 23481405 NR Description: hypothetical protein [Plasmodium yoelii yoelii]
  misc_feature (76)..(172): NCBI GI NO: 35210492 NR Description: aspartic acid-rich protein aspolin1
  misc_feature (76)..(172): NCBI GI NO: 35210494 NR Description: aspartic acid-rich protein aspolin2
  misc_feature (69)..(172): NCBI GI NO: 33284873 NR Description: SI:bZ1G18
  misc_feature (79)..(172): NCBI GI NO: 35210492 NR Description: aspartic acid-rich protein aspolin1
  misc_feature (79)..(172): NCBI GI NO: 35210492 NR Description: aspartic acid-rich protein aspolin1
  misc_feature (79)..(172): NCBI GI NO: 35210492 NR Description: aspartic acid-rich protein aspolin1
  misc_feature (79)..(172): NCBI GI NO: 35210492 NR Description: aspartic acid-rich protein aspolin1
  misc_feature (79)..(172): NCBI GI NO: 35210492 NR Description: aspartic acid-rich protein aspolin1

SEQ ID NO: 33273 - protein, 143 aa, Zea mays subsp. mays; identical to SEQ ID NO: 30342
  peptide (1)..(143): Ceres Seq. ID no. 12344860

SEQ ID NO: 33274 - protein, 132 aa, Zea mays subsp. mays; identical to SEQ ID NO: 30343
  peptide (1)..(132): Ceres Seq. ID no. 12344861

SEQ ID NO: 33275 - DNA, 740 bp, Zea mays subsp. mays
  misc_feature (1)..(740): Ceres Seq. ID no. 12404680
aacacaggcaccacagctgagagacgatagaagcacgcagcagctgaaagggaggggaactaggaatgaaggggagcaaggtccacgagcacgaggcagacgtccccgcctccgacctctgggcgatctacggctccctccgcgccgcgagactcctgccggagctgctcccgcacgtgctcgccaaggtggagctcgtcagcggcgacggcggtgttggtaccatcttgcagctaatatttcctcccggtgagtataagatacgtgtgtatgctgccataatatctttgatgttggatatgctaagatactagtagtaaagttttaattgctctgctccgctccgctcctagggattcctgggctacagagttacaaggagaagttcatcaaagttgacaacgagaactatatcaaggaggcagaagccattgatggcgacattttgaagctggggttcgaggcatacatgatacggtttgagatcattccaaaaggggccaattcgtctgtcatcaggtcgactatcgagtatgtgattgctgatgcgcacccggagctcgaagctatggtgagcacagcaactttggctgaaactgctcagaaattttccgagtttgctaaggcgaagtaggtcccataaggaatgtcttgaaatatatatatatatatctcgagagcggagtttatgtttatcatgaaacaagtgaaatacagtttcagcgctttcgtgttgcgcc

SEQ ID NO: 33276 - protein, 83 aa, Zea mays subsp. mays
  peptide (1)..(83): Ceres Seq. ID no. 12404681
TQAPQLRDDRSTQQLKGRGTRNEGEQGPRARGRRPRLRPLGDLRLPPRRETPAGAAPARARQGGARQRRRRCWYHLAANISSR

SEQ ID NO: 33277 - protein, 82 aa, Zea mays subsp. mays
  peptide (1)..(82): Ceres Seq. ID no. 12404682
  misc_feature (1)..(63): Pfam Name: Pfam Description:  Pathogenesis-related protein Bet v I family
  misc_feature (1)..(62): NCBI GI NO: 38347061 NR Description: OSJNBa0006A01.2
  misc_feature (1)..(64): NCBI GI NO: 38347062 NR Description: OSJNBa0006A01.3
MKGSKVHEHEADVPASDLWAIYGSLRAARLLPELLPHVLAKVELVSGDGGVGTILQLIFPPGEYKIRVYAAIISLMLDMLRY

SEQ ID NO: 33278 - protein, 54 aa, Zea mays subsp. mays
  peptide (1)..(54): Ceres Seq. ID no. 12404683
  misc_feature (1)..(52): NCBI GI NO: 38347061 NR Description: OSJNBa0006A01.2
  misc_feature (1)..(52): NCBI GI NO: 38347062 NR Description: OSJNBa0006A01.3
MIRFEIIPKGANSSVIRSTIEYVIADAHPELEAMVSTATLAETAQKFSEFAKAK

SEQ ID NO: 33279 - DNA, 923 bp, Zea mays subsp. mays
  misc_feature (1)..(923): Ceres Seq. ID no. 12342226
acaaaagttttagttccaactgggagagctagcatggcaagttcgcgctgctttgagaacccgccggtgctggagccggccagcggaggaggcgaggtggttgacgacttcggcgggcagaaggcctacgtcagcggctccgccgggtccaaggccgccgtcgtcctcatctccgacgccttcgggttcgaagcgccaaacctgaggaagatagccgacaaagttgcttcgctcggttacttcgttgtggtgcccgatttcctgcatggggatccatatgaccccagcaataatgcccatagcaatcctggaacgtggatacagtcgcacaatccgcaaacggcattcgaagaggcaaaaccggtaattgcggctataaaggagaagggtgtgtcgagcatcggagctgcaggttactgttggggcgcaaaggtggttgtggaactggcgaaagttcacgagatccaggctgctgtgttggcacacccttctttactaactgtcgatgatatgaaagatgtcaagtgccccatttccatacttggagctgaaatcgacaggtcagccccgcctgaattgctaaagcagtttgagcaagttctttcagcgaaccccgaggtcgatcactttgtcaaggtttttcctggcgtagcgcatggatgggctgtgaggtacagcgacgacgacgcagcggctgtcacgagtgcggaggaagctttgcgcgacatgagccactggttcaacaagtacctgaactgaattatgtggcggcatatgtgcgtgcaataagctcctaatggtgaacattatgcagggcccccatgctatgcgtgtgttttaaaagtcctcttagtggtggtatttgtactggtctcttacgcaatttttataacatttatcgagaataaagtgatgacacggtg

SEQ ID NO: 33280 - protein, 252 aa, Zea mays subsp. mays
  peptide (1)..(252): Ceres Seq. ID no. 12342227
  misc_feature (42)..(251): Pfam Name: Pfam Description:  Dienelactone hydrolase family
  misc_feature (12)..(251): NCBI GI NO: 18403820 NR Description: expressed protein; protein id: At3g23600
  misc_feature (12)..(251): NCBI GI NO: 18403812 NR Description: expressed protein; protein id: At3g23570
  misc_feature (12)..(251): NCBI GI NO: 24899687 NR Description: Unknown protein [Arabidopsis thaliana]
  misc_feature (3)..(251): NCBI GI NO: 40253303 NR Description: putative Endo-1,3;1,4-beta-D-glucanase precursor
  misc_feature (8)..(251): NCBI GI NO: 40253306 NR Description: putative Endo-1,3;1,4-beta-D-glucanase precursor
  misc_feature (69)..(251): NCBI GI NO: 9294513 NR Description: contains similarity to endo-1
  misc_feature (13)..(207): NCBI GI NO: 8928122 NR Description: Endo-1,3;1,4-beta-D-glucanase precursor
  misc_feature (81)..(251): NCBI GI NO: 40253308 NR Description: Endo-1,3
  misc_feature (41)..(252): NCBI GI NO: 38181938 NR Description: Unknown (protein for MGC:76315)
  misc_feature (41)..(251): NCBI GI NO: 31712014 NR Description: RIKEN cDNA 2310016A09 [Mus musculus]
TKVLVPTGRASMASSRCFENPPVLEPASGGGEVVDDFGGQKAYVSGSAGSKAAVVLISDAFGFEAPNLRKIADKVASLGYFVVVPDFLHGDPYDPSNNAHSNPGTWIQSHNPQTAFEEAKPVIAAIKEKGVSSIGAAGYCWGAKVVVELAKVHEIQAAVLAHPSLLTVDDMKDVKCPISILGAEIDRSAPPELLKQFEQVLSANPEVDHFVKVFPGVAHGWAVRYSDDDAAAVTSAEEALRDMSHWFNKYLN

SEQ ID NO: 33281 - protein, 241 aa, Zea mays subsp. mays
  peptide (1)..(241): Ceres Seq. ID no. 12342228
  misc_feature (31)..(240): Pfam Name: Pfam Description:  Dienelactone hydrolase family
  misc_feature (1)..(240): NCBI GI NO: 18403820 NR Description: expressed protein; protein id: At3g23600
  misc_feature (1)..(240): NCBI GI NO: 18403812 NR Description: expressed protein; protein id: At3g23570
  misc_feature (1)..(240): NCBI GI NO: 24899687 NR Description: Unknown protein [Arabidopsis thaliana]
  misc_feature (1)..(240): NCBI GI NO: 40253303 NR Description: putative Endo-1,3;1,4-beta-D-glucanase precursor
  misc_feature (1)..(240): NCBI GI NO: 40253306 NR Description: putative Endo-1,3;1,4-beta-D-glucanase precursor
  misc_feature (58)..(240): NCBI GI NO: 9294513 NR Description: contains similarity to endo-1
  misc_feature (2)..(196): NCBI GI NO: 8928122 NR Description: Endo-1,3;1,4-beta-D-glucanase precursor
  misc_feature (70)..(240): NCBI GI NO: 40253308 NR Description: Endo-1,3
  misc_feature (30)..(241): NCBI GI NO: 38181938 NR Description: Unknown (protein for MGC:76315)
  misc_feature (30)..(240): NCBI GI NO: 31712014 NR Description: RIKEN cDNA 2310016A09 [Mus musculus]
MASSRCFENPPVLEPASGGGEVVDDFGGQKAYVSGSAGSKAAVVLISDAFGFEAPNLRKIADKVASLGYFVVVPDFLHGDPYDPSNNAHSNPGTWIQSHNPQTAFEEAKPVIAAIKEKGVSSIGAAGYCWGAKVVVELAKVHEIQAAVLAHPSLLTVDDMKDVKCPISILGAEIDRSAPPELLKQFEQVLSANPEVDHFVKVFPGVAHGWAVRYSDDDAAAVTSAEEALRDMSHWFNKYLN

SEQ ID NO: 33282 - DNA, 771 bp, Zea mays subsp. mays
  misc_feature (1)..(771): Ceres Seq. ID no. 13492223
gcgaaaacgcgagcgctgcggaacaacgatggcgacgatgtctcttgccgcggcgtcacccctcgcctccattccccgcggcatcgccgctcaggctccttgcgcggcattcctgtccatccgcttaggtggcgcgacggcgacgcggttcgctggactggcggtggcctcgcagccagcggagcgtcgcgccgcggcgatggtcgcgatggcgaagagggagcaggagctggaggagatccgggccatgacgacggaacagatggaagaggaggtggtagacctcaagggggagcttttcctgctccgccttaagcgctcggcgcgccaggagttcaagaacagcgagttcagccgcatgcgcaagaggattgctcgtatgctaaccgtgaaaagagagcgggaaattgaacaaggaatcaataaaagattgtctaggaagcttgataggaaatggaagcagagcattgtggtcagaccaccaccatctctaagggggaacaaagaggagtagaaagccgcaaaaagagggcaatgtgcaaaagtcgtttcatgcgagtgttgcaggaaggtcccttcatgatttcaacccttattgcgttgttatgtattccatgtttacattttgctaagcattgctatctgaatctgaatttcagttgttagtctcttctgtaaattttgacttatttaaatttacacttctatctgtgttatcagtaattgaggatggccagtcatttgcacctggaaggtgcatgcttccttgcc

SEQ ID NO: 33283 - protein, 170 aa, Zea mays subsp. mays
  peptide (1)..(170): Ceres Seq. ID no. 13492224
  misc_feature (10)..(170): NCBI GI NO: 5739218 NR Description: ribosomal protein L29 [Zea mays]
  misc_feature (10)..(170): NCBI GI NO: 15238369 NR Description: ribosomal protein L29p family
  misc_feature (73)..(138): NCBI GI NO: 21283890 NR Description: 50S ribosomal protein L29
RKRERCGTTMATMSLAAASPLASIPRGIAAQAPCAAFLSIRLGGATATRFAGLAVASQPAERRAAAMVAMAKREQELEEIRAMTTEQMEEEVVDLKGELFLLRLKRSARQEFKNSEFSRMRKRIARMLTVKREREIEQGINKRLSRKLDRKWKQSIVVRPPPSLRGNKEE

SEQ ID NO: 33284 - protein, 161 aa, Zea mays subsp. mays
  peptide (1)..(161): Ceres Seq. ID no. 13492225
  misc_feature (1)..(161): NCBI GI NO: 5739218 NR Description: ribosomal protein L29 [Zea mays]
  misc_feature (1)..(161): NCBI GI NO: 15238369 NR Description: ribosomal protein L29p family
  misc_feature (64)..(129): NCBI GI NO: 21283890 NR Description: 50S ribosomal protein L29
MATMSLAAASPLASIPRGIAAQAPCAAFLSIRLGGATATRFAGLAVASQPAERRAAAMVAMAKREQELEEIRAMTTEQMEEEVVDLKGELFLLRLKRSARQEFKNSEFSRMRKRIARMLTVKREREIEQGINKRLSRKLDRKWKQSIVVRPPPSLRGNKEE

SEQ ID NO: 33285 - protein, 158 aa, Zea mays subsp. mays
  peptide (1)..(158): Ceres Seq. ID no. 13492226
  misc_feature (1)..(158): NCBI GI NO: 5739218 NR Description: ribosomal protein L29 [Zea mays]
  misc_feature (1)..(158): NCBI GI NO: 15238369 NR Description: ribosomal protein L29p family
  misc_feature (61)..(126): NCBI GI NO: 21283890 NR Description: 50S ribosomal protein L29
MSLAAASPLASIPRGIAAQAPCAAFLSIRLGGATATRFAGLAVASQPAERRAAAMVAMAKREQELEEIRAMTTEQMEEEVVDLKGELFLLRLKRSARQEFKNSEFSRMRKRIARMLTVKREREIEQGINKRLSRKLDRKWKQSIVVRPPPSLRGNKEE

SEQ ID NO: 33286 - DNA, 1136 bp, Zea mays subsp. mays
  misc_feature (1)..(1136): Ceres Seq. ID no. 12411807
atcctcgctggctatacgtctcccctccgcgcacaaaaaccctagcacgcaggcgcagccaggcctgcacccaaagcttccggagaattcctcccttgccccgccgtcgcatcctcttcgaagttcgaatcgaatcgcgccgcgatcacccacctcatggcggacaaggagcctgtcgtggagcggccagaggcgggtgaggaggaggaggacgcctcagccgccgccgccgcgggggaggaggaggacacgggcgcccaggtggctcccatcgtgcggcttgaggaggtagccgtcaccaccggcgaggaggacgaggacgtcctgctcgacatgaaggcgaagctgtaccgattcgacaaagacggtaaccaatggaaggaacggggcacgggcgctgtcaagcttctcaagcacaagcagaccggcaaggtccgcctagtcatgcgccaggctaaaacgcttaagatctgcgcgaaccacctcgtggcctccaccacgaagatgcaggagcatgcgggcagcgacaagtcgtgtgtttggcacgctgctgactttgccgatggcgaacttaaggaggagatgtttgccatcaggtttggttcggtagaaaactgcaagaagttcaaggagttggttgaggagatagctgagtcgcttacaaagaacgagggcaaggaaggtgaagatggtggttccacggctggattgctggcgaagctcactgtgagcgagggcaaatctgagggaagtggcaagtctgagtccactgattctggcaaagtgactgaaaccaaagccgacacagccccagctgagtagttggtgtggttgcacttgcacgcagattcgcctggtgctgaactagtttgtctgtccgcgtccagtggaagtttggtgccctttagccatggaatacgattgctatcatttgggcccgggccgagttggaggagtctcaggtgttcggtctggtttggtccgggcttgattttgctaaaaacttgggagtccatgggggttgggaacgtttgatatgtgagtcgctagtatttaactgcatggatcgttgtggattgcggtaaattcataaagtggaccctatatattttttatttcgttcaatacacattcat

SEQ ID NO: 33287 - protein, 221 aa, Zea mays subsp. mays
  peptide (1)..(221): Ceres Seq. ID no. 12411808
  misc_feature (46)..(167): Pfam Name: Pfam Description:  RanBP1 domain
  misc_feature (1)..(216): NCBI GI NO: 15222310 NR Description: Ran-binding protein
  misc_feature (1)..(216): NCBI GI NO: 2058282 NR Description: atranbp1a [Arabidopsis thaliana]
  misc_feature (5)..(216): NCBI GI NO: 14091665 NR Description: Ran binding protein-1 [Lycopersicon esculentum]
  misc_feature (7)..(214): NCBI GI NO: 2058284 NR Description: atranbp1b [Arabidopsis thaliana]
  misc_feature (7)..(214): NCBI GI NO: 15227700 NR Description: Ran binding protein
  misc_feature (1)..(216): NCBI GI NO: 5106769 NR Description: Ran-binding protein siRanBP [Arabidopsis thaliana]
  misc_feature (12)..(214): NCBI GI NO: 20260400 NR Description: Ran binding protein [Arabidopsis thaliana]
  misc_feature (16)..(221): NCBI GI NO: 8843780 NR Description: contains similarity to small GTPase Ran bindingprotein 1~gene_id:MZN1
  misc_feature (16)..(221): NCBI GI NO: 30697102 NR Description: Ran binding protein 1 homolog - like
  misc_feature (13)..(203): NCBI GI NO: 20891965 NR Description: RAN binding protein 1 [Mus musculus]
MADKEPVVERPEAGEEEEDASAAAAAGEEEDTGAQVAPIVRLEEVAVTTGEEDEDVLLDMKAKLYRFDKDGNQWKERGTGAVKLLKHKQTGKVRLVMRQAKTLKICANHLVASTTKMQEHAGSDKSCVWHAADFADGELKEEMFAIRFGSVENCKKFKELVEEIAESLTKNEGKEGEDGGSTAGLLAKLTVSEGKSEGSGKSESTDSGKVTETKADTAPAE

SEQ ID NO: 33288 - protein, 162 aa, Zea mays subsp. mays
  peptide (1)..(162): Ceres Seq. ID no. 12411809
  misc_feature (1)..(108): Pfam Name: Pfam Description:  RanBP1 domain
  misc_feature (1)..(157): NCBI GI NO: 15222310 NR Description: Ran-binding protein
  misc_feature (1)..(157): NCBI GI NO: 2058282 NR Description: atranbp1a [Arabidopsis thaliana]
  misc_feature (1)..(157): NCBI GI NO: 14091665 NR Description: Ran binding protein-1 [Lycopersicon esculentum]
  misc_feature (1)..(155): NCBI GI NO: 2058284 NR Description: atranbp1b [Arabidopsis thaliana]
  misc_feature (1)..(155): NCBI GI NO: 15227700 NR Description: Ran binding protein
  misc_feature (1)..(157): NCBI GI NO: 5106769 NR Description: Ran-binding protein siRanBP [Arabidopsis thaliana]
  misc_feature (1)..(155): NCBI GI NO: 20260400 NR Description: Ran binding protein [Arabidopsis thaliana]
  misc_feature (1)..(162): NCBI GI NO: 8843780 NR Description: contains similarity to small GTPase Ran bindingprotein 1~gene_id:MZN1
  misc_feature (1)..(162): NCBI GI NO: 30697102 NR Description: Ran binding protein 1 homolog - like
  misc_feature (1)..(144): NCBI GI NO: 20891965 NR Description: RAN binding protein 1 [Mus musculus]
MKAKLYRFDKDGNQWKERGTGAVKLLKHKQTGKVRLVMRQAKTLKICANHLVASTTKMQEHAGSDKSCVWHAADFADGELKEEMFAIRFGSVENCKKFKELVEEIAESLTKNEGKEGEDGGSTAGLLAKLTVSEGKSEGSGKSESTDSGKVTETKADTAPAE

SEQ ID NO: 33289 - protein, 125 aa, Zea mays subsp. mays
  peptide (1)..(125): Ceres Seq. ID no. 12411810
  misc_feature (1)..(71): Pfam Name: Pfam Description:  RanBP1 domain
  misc_feature (1)..(120): NCBI GI NO: 15222310 NR Description: Ran-binding protein
  misc_feature (1)..(120): NCBI GI NO: 2058282 NR Description: atranbp1a [Arabidopsis thaliana]
  misc_feature (1)..(120): NCBI GI NO: 14091665 NR Description: Ran binding protein-1 [Lycopersicon esculentum]
  misc_feature (1)..(118): NCBI GI NO: 2058284 NR Description: atranbp1b [Arabidopsis thaliana]
  misc_feature (1)..(118): NCBI GI NO: 15227700 NR Description: Ran binding protein
  misc_feature (1)..(120): NCBI GI NO: 5106769 NR Description: Ran-binding protein siRanBP [Arabidopsis thaliana]
  misc_feature (1)..(118): NCBI GI NO: 20260400 NR Description: Ran binding protein [Arabidopsis thaliana]
  misc_feature (1)..(125): NCBI GI NO: 8843780 NR Description: contains similarity to small GTPase Ran bindingprotein 1~gene_id:MZN1
  misc_feature (1)..(125): NCBI GI NO: 30697102 NR Description: Ran binding protein 1 homolog - like
  misc_feature (1)..(107): NCBI GI NO: 20891965 NR Description: RAN binding protein 1 [Mus musculus]
MRQAKTLKICANHLVASTTKMQEHAGSDKSCVWHAADFADGELKEEMFAIRFGSVENCKKFKELVEEIAESLTKNEGKEGEDGGSTAGLLAKLTVSEGKSEGSGKSESTDSGKVTETKADTAPAE

SEQ ID NO: 33290 - DNA, 1135 bp, Zea mays subsp. mays
  misc_feature (1)..(1135): Ceres Seq. ID no. 12408002
acgacgccgccaccacctgccccagcagcggcacgctccgacaacgtcgaccatggcggtgcgggcgcgggggctggggagtctgttccctgctagatccagtagatggccgactcatcgaggccctccgtgaacatcatctgcgccggtcgtctgctcggctgcagtggattaggtgagcggggttccggtagaggattgtttagtttgggattctaggttcctcgctcccgtgccggagacgacgctagacgatgaggtcagtgccgcggcggcgcggcgcgtcgcagagatgaaggcgcggaagcggtccgagcggcgcacctacctggtggccgccgtgatgtccaggctcggggtcacgtccatggccgtcgccgccgtgtactatcgcttcagctggcaaatggagggcggcgcggtcccggtgagcgagatgttcggcacgtttgcgctctccgtcggcgcggcggtcgggatggagttctgggcgcggtgggcgcaccgggcgctatggcacgcctccctgtggcacatgcacgagtcgcaccaccggtcgtgcgagggcccattcgagctcaacgacgtgttcgccatcgtcaacgccgtgccggccatctccctcctcggtgacgtcgcgagcagatacaccatatggacaattttgagggcgtcccgtatgggctcttcctgggaccaaaggagctggaggaggtcggtggcctggacgagctggaaaaggagctcgcgcgaatcggccagaccatctgatggatttgtccggattccggcgcggcgatctccgctccgctccgtgattccggcgcagcctcatggttggggagccgacgaccagaacctccagaagggatttggtttggatgcgcgagcgtagatcttgacctgcatttcggatggtctgtggaggcatagctcgtacctggagatgtctggtgccatggaattacttttcttttcttcttttcctgacattttcatgccggcgtctttatttgtggagacgtcgcacgttctggcccctgtattactgttcttatggctaggattctgtatataacttgtagagacatgttatgaaccaccagctcaatgaagctaaaaattcggtggttgg

SEQ ID NO: 33291 - protein, 200 aa, Zea mays subsp. mays
  peptide (1)..(200): Ceres Seq. ID no. 12408003
  misc_feature (50)..(112): Pfam Name: Pfam Description:  Carotene hydroxylase
  misc_feature (1)..(112): NCBI GI NO: 11245486 NR Description: beta-carotene hydroxylase [Citrus unshiu]
  misc_feature (1)..(112): NCBI GI NO: 33145986 NR Description: beta-carotene hydroxylase [Crocus sativus]
  misc_feature (1)..(112): NCBI GI NO: 9988836 NR Description: beta-carotene hydroxylase [Citrus unshiu]
  misc_feature (1)..(112): NCBI GI NO: 2956717 NR Description: beta-carotene hydroxylase 2 [Capsicum annuum]
  misc_feature (1)..(112): NCBI GI NO: 21734857 NR Description: beta-carotene hydroxylase [Vitis vinifera]
  misc_feature (1)..(112): NCBI GI NO: 5870600 NR Description: beta-carotene hydroxylase
  misc_feature (1)..(112): NCBI GI NO: 37536402 NR Description: putative beta-carotene hydroxylase
  misc_feature (1)..(112): NCBI GI NO: 5870598 NR Description: beta-carotene hydroxylase
  misc_feature (1)..(110): NCBI GI NO: 2956671 NR Description: beta-carotene hydrolase [Capsicum annuum]
  misc_feature (1)..(112): NCBI GI NO: 9971820 NR Description: beta hydroxylase [Tagetes erecta]
MKARKRSERRTYLVAAVMSRLGVTSMAVAAVYYRFSWQMEGGAVPVSEMFGTFALSVGAAVGMEFWARWAHRALWHASLWHMHESHHRSCEGPFELNDVFAIVNAVPAISLLGDVASRYTIWTILRASRMGSSWDQRSWRRSVAWTSWKRSSRESARPSDGFVRIPARRSPLRSVIPAQPHGWGADDQNLQKGFGLDARA

SEQ ID NO: 33292 - protein, 183 aa, Zea mays subsp. mays
  peptide (1)..(183): Ceres Seq. ID no. 12408004
  misc_feature (33)..(95): Pfam Name: Pfam Description:  Carotene hydroxylase
  misc_feature (1)..(95): NCBI GI NO: 11245486 NR Description: beta-carotene hydroxylase [Citrus unshiu]
  misc_feature (1)..(95): NCBI GI NO: 33145986 NR Description: beta-carotene hydroxylase [Crocus sativus]
  misc_feature (1)..(95): NCBI GI NO: 9988836 NR Description: beta-carotene hydroxylase [Citrus unshiu]
  misc_feature (1)..(95): NCBI GI NO: 2956717 NR Description: beta-carotene hydroxylase 2 [Capsicum annuum]
  misc_feature (1)..(95): NCBI GI NO: 21734857 NR Description: beta-carotene hydroxylase [Vitis vinifera]
  misc_feature (1)..(95): NCBI GI NO: 5870600 NR Description: beta-carotene hydroxylase
  misc_feature (1)..(95): NCBI GI NO: 37536402 NR Description: putative beta-carotene hydroxylase
  misc_feature (1)..(95): NCBI GI NO: 5870598 NR Description: beta-carotene hydroxylase
  misc_feature (1)..(93): NCBI GI NO: 2956671 NR Description: beta-carotene hydrolase [Capsicum annuum]
  misc_feature (1)..(95): NCBI GI NO: 9971820 NR Description: beta hydroxylase [Tagetes erecta]
MSRLGVTSMAVAAVYYRFSWQMEGGAVPVSEMFGTFALSVGAAVGMEFWARWAHRALWHASLWHMHESHHRSCEGPFELNDVFAIVNAVPAISLLGDVASRYTIWTILRASRMGSSWDQRSWRRSVAWTSWKRSSRESARPSDGFVRIPARRSPLRSVIPAQPHGWGADDQNLQKGFGLDARA

SEQ ID NO: 33293 - protein, 175 aa, Zea mays subsp. mays
  peptide (1)..(175): Ceres Seq. ID no. 12408005
  misc_feature (25)..(87): Pfam Name: Pfam Description:  Carotene hydroxylase
  misc_feature (1)..(87): NCBI GI NO: 11245486 NR Description: beta-carotene hydroxylase [Citrus unshiu]
  misc_feature (1)..(87): NCBI GI NO: 33145986 NR Description: beta-carotene hydroxylase [Crocus sativus]
  misc_feature (1)..(87): NCBI GI NO: 9988836 NR Description: beta-carotene hydroxylase [Citrus unshiu]
  misc_feature (1)..(87): NCBI GI NO: 2956717 NR Description: beta-carotene hydroxylase 2 [Capsicum annuum]
  misc_feature (1)..(87): NCBI GI NO: 21734857 NR Description: beta-carotene hydroxylase [Vitis vinifera]
  misc_feature (1)..(87): NCBI GI NO: 5870600 NR Description: beta-carotene hydroxylase
  misc_feature (1)..(87): NCBI GI NO: 37536402 NR Description: putative beta-carotene hydroxylase
  misc_feature (1)..(87): NCBI GI NO: 5870598 NR Description: beta-carotene hydroxylase
  misc_feature (1)..(85): NCBI GI NO: 2956671 NR Description: beta-carotene hydrolase [Capsicum annuum]
  misc_feature (1)..(87): NCBI GI NO: 9971820 NR Description: beta hydroxylase [Tagetes erecta]
MAVAAVYYRFSWQMEGGAVPVSEMFGTFALSVGAAVGMEFWARWAHRALWHASLWHMHESHHRSCEGPFELNDVFAIVNAVPAISLLGDVASRYTIWTILRASRMGSSWDQRSWRRSVAWTSWKRSSRESARPSDGFVRIPARRSPLRSVIPAQPHGWGADDQNLQKGFGLDARA

SEQ ID NO: 33294 - DNA, 1682 bp, Zea mays subsp. mays; identical to SEQ ID NO: 23374
  misc_feature (1)..(1682): Ceres Seq. ID no. 13577771

SEQ ID NO: 33295 - protein, 319 aa, Zea mays subsp. mays; identical to SEQ ID NO: 23375
  peptide (1)..(319): Ceres Seq. ID no. 13577772
  misc_feature (8)..(271): Pfam Name: Pfam Description:  Thiolase, N-terminal domain
  misc_feature (1)..(301): NCBI GI NO: 8777413 NR Description: acetyl-CoA C-acetyltransferase
  misc_feature (1)..(301): NCBI GI NO: 30695411 NR Description: acetyl-CoA C-acetyltransferase
  misc_feature (10)..(301): NCBI GI NO: 30695409 NR Description: acetyl-CoA C-acetyltransferase
  misc_feature (1)..(301): NCBI GI NO: 34894172 NR Description: putative acetoacyl-CoA-thiolase
  misc_feature (1)..(311): NCBI GI NO: 15238793 NR Description: acetoacyl-CoA-thiolase; protein id: At5g47720
  misc_feature (1)..(311): NCBI GI NO: 30695277 NR Description: acetyl-CoA C-acetyltransferase
  misc_feature (2)..(301): NCBI GI NO: 16417944 NR Description: acetyl Co-A acetyltransferase [Hevea brasiliensis]
  misc_feature (1)..(301): NCBI GI NO: 7433657 NR Description: acetyl-CoA C-acetyltransferase (EC 2
  misc_feature (10)..(314): NCBI GI NO: 19113478 NR Description: acetyl-coa acetyltransferase (EC 2.3.1.9)
  misc_feature (10)..(314): NCBI GI NO: 11257345 NR Description: probable acetyl-CoA C-acetyltransferase (EC2

SEQ ID NO: 33296 - protein, 299 aa, Zea mays subsp. mays; identical to SEQ ID NO: 23376
  peptide (1)..(299): Ceres Seq. ID no. 13577773
  misc_feature (1)..(251): Pfam Name: Pfam Description:  Thiolase, N-terminal domain
  misc_feature (1)..(281): NCBI GI NO: 8777413 NR Description: acetyl-CoA C-acetyltransferase
  misc_feature (1)..(281): NCBI GI NO: 30695411 NR Description: acetyl-CoA C-acetyltransferase
  misc_feature (1)..(281): NCBI GI NO: 30695409 NR Description: acetyl-CoA C-acetyltransferase
  misc_feature (1)..(281): NCBI GI NO: 34894172 NR Description: putative acetoacyl-CoA-thiolase
  misc_feature (1)..(291): NCBI GI NO: 15238793 NR Description: acetoacyl-CoA-thiolase; protein id: At5g47720
  misc_feature (1)..(291): NCBI GI NO: 30695277 NR Description: acetyl-CoA C-acetyltransferase
  misc_feature (1)..(281): NCBI GI NO: 16417944 NR Description: acetyl Co-A acetyltransferase [Hevea brasiliensis]
  misc_feature (1)..(281): NCBI GI NO: 7433657 NR Description: acetyl-CoA C-acetyltransferase (EC 2
  misc_feature (1)..(294): NCBI GI NO: 19113478 NR Description: acetyl-coa acetyltransferase (EC 2.3.1.9)
  misc_feature (1)..(294): NCBI GI NO: 11257345 NR Description: probable acetyl-CoA C-acetyltransferase (EC2

SEQ ID NO: 33297 - protein, 221 aa, Zea mays subsp. mays; identical to SEQ ID NO: 23377
  peptide (1)..(221): Ceres Seq. ID no. 13577774
  misc_feature (1)..(173): Pfam Name: Pfam Description:  Thiolase, N-terminal domain
  misc_feature (1)..(203): NCBI GI NO: 8777413 NR Description: acetyl-CoA C-acetyltransferase
  misc_feature (1)..(203): NCBI GI NO: 30695411 NR Description: acetyl-CoA C-acetyltransferase
  misc_feature (1)..(203): NCBI GI NO: 30695409 NR Description: acetyl-CoA C-acetyltransferase
  misc_feature (1)..(203): NCBI GI NO: 34894172 NR Description: putative acetoacyl-CoA-thiolase
  misc_feature (1)..(213): NCBI GI NO: 15238793 NR Description: acetoacyl-CoA-thiolase; protein id: At5g47720
  misc_feature (1)..(213): NCBI GI NO: 30695277 NR Description: acetyl-CoA C-acetyltransferase
  misc_feature (1)..(203): NCBI GI NO: 16417944 NR Description: acetyl Co-A acetyltransferase [Hevea brasiliensis]
  misc_feature (1)..(203): NCBI GI NO: 7433657 NR Description: acetyl-CoA C-acetyltransferase (EC 2
  misc_feature (1)..(216): NCBI GI NO: 19113478 NR Description: acetyl-coa acetyltransferase (EC 2.3.1.9)
  misc_feature (1)..(216): NCBI GI NO: 11257345 NR Description: probable acetyl-CoA C-acetyltransferase (EC2

SEQ ID NO: 33298 - DNA, 625 bp, Zea mays subsp. mays
  misc_feature (1)..(625): Ceres Seq. ID no. 12414401
aaaggaggcactggacgcggacatccaggaccgcgtcatgaaggagcgggagatgcagagctacatcgcggagcgcgagcgcgaggttgccgagagggaggccgcgtggaaggccgagctctcccgccgcgaggctgagatcgcgaggcaggaggcgaggctgaaggtggagagggagaacctggagaaagagaagagcgtcctcatggggacggcttcgagccaggacagccaagacggagcgctggagatcaccgtcagcggcgagaagtacaggtgcctccggttctcgaaggcgaagaagtgagaggttgaaccagaacgacacagtcactcagggtcaggggggtagtggtacaccgaaatctcagtttggaggctagtgtaagagtatctgtcaatctggcacacaggctgtcgctgtacgtgctggtttgatgctcactgcgtcgtgcgtcctcattgatgatttaacgatagggtcattgaaccagcgcacaacctgagaaaatggttgcgctgtccgtcctggggtcacggtagcatgaacctcacaactgataacctctgtttcggacggatacaatcgggttgaatgggagcctttcgtgtgcatgtggaaggt

SEQ ID NO: 33299 - protein, 101 aa, Zea mays subsp. mays
  peptide (1)..(101): Ceres Seq. ID no. 12414402
  misc_feature (1)..(101): NCBI GI NO: 18398390 NR Description: expressed protein; protein id: At2g17350
  misc_feature (1)..(90): NCBI GI NO: 25371273 NR Description: hypothetical protein At2g17350
KEALDADIQDRVMKEREMQSYIAEREREVAEREAAWKAELSRREAEIARQEARLKVERENLEKEKSVLMGTASSQDSQDGALEITVSGEKYRCLRFSKAKK

SEQ ID NO: 33300 - protein, 89 aa, Zea mays subsp. mays
  peptide (1)..(89): Ceres Seq. ID no. 12414403
  misc_feature (1)..(89): NCBI GI NO: 18398390 NR Description: expressed protein; protein id: At2g17350
  misc_feature (1)..(78): NCBI GI NO: 25371273 NR Description: hypothetical protein At2g17350
MKEREMQSYIAEREREVAEREAAWKAELSRREAEIARQEARLKVERENLEKEKSVLMGTASSQDSQDGALEITVSGEKYRCLRFSKAKK

SEQ ID NO: 33301 - protein, 84 aa, Zea mays subsp. mays
  peptide (1)..(84): Ceres Seq. ID no. 12414404
  misc_feature (1)..(84): NCBI GI NO: 18398390 NR Description: expressed protein; protein id: At2g17350
  misc_feature (1)..(73): NCBI GI NO: 25371273 NR Description: hypothetical protein At2g17350
MQSYIAEREREVAEREAAWKAELSRREAEIARQEARLKVERENLEKEKSVLMGTASSQDSQDGALEITVSGEKYRCLRFSKAKK

SEQ ID NO: 33302 - DNA, 592 bp, Zea mays subsp. mays
  misc_feature (1)..(592): Ceres Seq. ID no. 12566495
aaaaagcccaaacccgcatctacgttctactcccactcgcggtcgcggtagccggcggcggcggaggaggaaagcaggcaggccatggcgtcgtcgtcgtcgaccccggcggccgtccgcgagatgcagaaggatctcgaggtccaggccaacgccctcagcaagatccagaaagacatcgccaagaaccaccaggtccgcaagcagtacaccatccaggtcggcgagaacgagctcgtcctcaaggagctggagctgctcagcgatggggccaacgtgtacaagctcatcggaccggtgctggtcaagcaggacctcgcggaggccaaggccaacgtcaagaagcgcatcgagtacatctccgcagagctgaagcggatggatcgggcgctcaaagacttggaggaaaagcaaaacagcaagaaggaatcgatattcaagttgcagcagaggatgcaggctgtacaagctaaggcttagacaactgtttgttggttgcaactagtccaaggccatgcttcatttcatcccaattccctccaggtttttttttggtggggaggaatcaggtgtctgatgttctcgtctccgc

SEQ ID NO: 33303 - protein, 156 aa, Zea mays subsp. mays
  peptide (1)..(156): Ceres Seq. ID no. 12566496
KAQTRIYVLLPLAVAVAGGGGGGKQAGHGVVVVDPGGRPRDAEGSRGPGQRPQQDPERHRQEPPGPQAVHHPGRRERARPQGAGAAQRWGQRVQAHRTGAGQAGPRGGQGQRQEAHRVHLRRAEADGSGAQRLGGKAKQQEGIDIQVAAEDAGCTS

SEQ ID NO: 33304 - protein, 131 aa, Zea mays subsp. mays
  peptide (1)..(131): Ceres Seq. ID no. 12566497
  misc_feature (18)..(125): Pfam Name: Pfam Description:  KE2 family protein
  misc_feature (4)..(129): NCBI GI NO: 30691134 NR Description: hydrophilic protein -related
  misc_feature (4)..(129): NCBI GI NO: 26450257 NR Description: unknown protein [Arabidopsis thaliana]
  misc_feature (4)..(96): NCBI GI NO: 25403096 NR Description: probable hydrophilic protein, 29542-30030
  misc_feature (14)..(131): NCBI GI NO: 33585747 NR Description: Unknown (protein for MGC:66282) [Danio rerio]
  misc_feature (14)..(131): NCBI GI NO: 27704620 NR Description: similar to H2-K region expressed gene 2
  misc_feature (14)..(129): NCBI GI NO: 6754128 NR Description: H2-K region expressed gene 2 [Mus musculus]
  misc_feature (14)..(129): NCBI GI NO: 7657162 NR Description: HLA class II region expressed gene KE2
  misc_feature (14)..(129): NCBI GI NO: 24667085 NR Description: CG7770-PA [Drosophila melanogaster]
  misc_feature (14)..(129): NCBI GI NO: 38048503 NR Description: similar to Drosophila melanogaster CG7770
  misc_feature (13)..(130): NCBI GI NO: 39582756 NR Description: Hypothetical protein CBG21902
MASSSSTPAAVREMQKDLEVQANALSKIQKDIAKNHQVRKQYTIQVGENELVLKELELLSDGANVYKLIGPVLVKQDLAEAKANVKKRIEYISAELKRMDRALKDLEEKQNSKKESIFKLQQRMQAVQAKA

SEQ ID NO: 33305 - protein, 123 aa, Zea mays subsp. mays
  peptide (1)..(123): Ceres Seq. ID no. 12566498
  misc_feature (1)..(122): Pfam Name: Pfam Description:  Cupin
  misc_feature (6)..(120): NCBI GI NO: 29250446 NR Description: GLP_39_87477_88058 [Giardia lamblia ATCC 50803]
  misc_feature (1)..(123): NCBI GI NO: 14017923 NR Description: KIAA1853 protein [Homo sapiens]
  misc_feature (8)..(123): NCBI GI NO: 23490106 NR Description: FHA domain, putative [Plasmodium yoelii yoelii]
  misc_feature (8)..(123): NCBI GI NO: 17137528 NR Description: CG4602-PA [Drosophila melanogaster]
  misc_feature (19)..(123): NCBI GI NO: 7949115 NR Description: Ser/Arg-related nuclear matrix protein
  misc_feature (8)..(123): NCBI GI NO: 7532408 NR Description: splicing factor SRp54 [Drosophila melanogaster]
  misc_feature (10)..(123): NCBI GI NO: 5821145 NR Description: RNA binding protein [Homo sapiens]
  misc_feature (10)..(123): NCBI GI NO: 5821143 NR Description: RNA binding protein [Homo sapiens]
  misc_feature (19)..(123): NCBI GI NO: 23274133 NR Description: Similar to serine/arginine repetitive matrix 1
KSPNPHLRSTPTRGRGSRRRRRRKAGRPWRRRRRPRRPSARCRRISRSRPTPSARSRKTSPRTTRSASSTPSRSARTSSSSRSWSCSAMGPTCTSSSDRCWSSRTSRRPRPTSRSASSTSPQS

SEQ ID NO: 33306 - DNA, 1295 bp, Zea mays subsp. mays
  misc_feature (1)..(1295): Ceres Seq. ID no. 12366636
aggctcaatcgatcagactccttttaactccaccactccattgtccattccctggctgcctctcgttgctgttgttgttgctgctcttctctaccttgctttcccccaataggcctctctgcactcttgagcttctttgccttgttggacttggtagctgtggcgctgcagaaatgggcgctccctaccacctccaatcaccaagaaccatcataaccaaggtaatgagcatgaagcagctgccaccggccctgccacagccgccgccggtggatcagtccgaggtaaccgagcagacaccggtgctgccacggtcgcagccggtggatccacccacgataaccgggcagccacaggcgccgcggcagccagcgcgggcgccttccaagttaatcctgcaaccgcgccagcggacctcgccggcgatgtggtgcgcggccatcggctgcttcgccttcagcatcctcctcatcgtcgcaggcgtcgtcaccctggtcgtcttcctggcggtgaagccgaggccgccgtccttcgacgccgccaacgccatcctcaacagcgtctacgtggactcgccggccccctacttcaacaatgacatgacgctcgttgccaacgtctccaaccccaaccgggagatcgacttggtgttccggtccgccactgtcgagctcttcttccaggacaggcccatggccgtgcaggcgctgcctccgttcgcgcagcggcgaggccagtcccagctcctgaacatgcacctgctctccagccgggtcctgctgccgccccaggtggcggtaaagatggtggaccaggtgaggagcaacagggtggtgtacacgatcagaggcgccttcaaagtggaggccaggttcaggttcggccactactcgtactggatgtacacggtctgtcagctggaactcactgcccctccttctggagttcttgttgcccggagatgcacaacaaaatgactggctctagaaaaaatcccctcgttttcttttgttattatatatcaaatcttagctatttttatactgatgatggaaatggcccgagaacagcggaacgtacctattgttgattcatgtgaattcgaagttggttcttcagctttgtcgatctcttggctgctcagttgttgctgcgtcctagtggctagctgcaacaacacacagtaggtcagtagcttagatcttaagcaacctgaacagagttcaacaaagtgtgtaatgtacagcatagaactctttgcttgagtgtaagcagtacagtggattttttttctc

SEQ ID NO: 33307 - protein, 324 aa, Zea mays subsp. mays
  peptide (1)..(324): Ceres Seq. ID no. 12366637
  misc_feature (85)..(324): NCBI GI NO: 15241117 NR Description: unknown protein; protein id: At5g56050.1
  misc_feature (164)..(324): NCBI GI NO: 15236740 NR Description: hypothetical protein; protein id: At4g26490.1
  misc_feature (76)..(324): NCBI GI NO: 15231546 NR Description: hypothetical protein; protein id: At3g26350.1
  misc_feature (63)..(324): NCBI GI NO: 15222151 NR Description: hypothetical protein; protein id: At1g13050.1
  misc_feature (99)..(322): NCBI GI NO: 20804932 NR Description: P0456E05.10
  misc_feature (78)..(321): NCBI GI NO: 20804896 NR Description: P0497A05.21
  misc_feature (132)..(323): NCBI GI NO: 15242362 NR Description: unknown protein; protein id: At5g45320.1
AQSIRLLLTPPLHCPFPGCLSLLLLLLLFSTLLSPNRPLCTLELLCLVGLGSCGAAEMGAPYHLQSPRTIITKVMSMKQLPPALPQPPPVDQSEVTEQTPVLPRSQPVDPPTITGQPQAPRQPARAPSKLILQPRQRTSPAMWCAAIGCFAFSILLIVAGVVTLVVFLAVKPRPPSFDAANAILNSVYVDSPAPYFNNDMTLVANVSNPNREIDLVFRSATVELFFQDRPMAVQALPPFAQRRGQSQLLNMHLLSSRVLLPPQVAVKMVDQVRSNRVVYTIRGAFKVEARFRFGHYSYWMYTVCQLELTAPPSGVLVARRCTTK

SEQ ID NO: 33308 - protein, 267 aa, Zea mays subsp. mays
  peptide (1)..(267): Ceres Seq. ID no. 12366638
  misc_feature (28)..(267): NCBI GI NO: 15241117 NR Description: unknown protein; protein id: At5g56050.1
  misc_feature (107)..(267): NCBI GI NO: 15236740 NR Description: hypothetical protein; protein id: At4g26490.1
  misc_feature (19)..(267): NCBI GI NO: 15231546 NR Description: hypothetical protein; protein id: At3g26350.1
  misc_feature (6)..(267): NCBI GI NO: 15222151 NR Description: hypothetical protein; protein id: At1g13050.1
  misc_feature (42)..(265): NCBI GI NO: 20804932 NR Description: P0456E05.10
  misc_feature (21)..(264): NCBI GI NO: 20804896 NR Description: P0497A05.21
  misc_feature (75)..(266): NCBI GI NO: 15242362 NR Description: unknown protein; protein id: At5g45320.1
MGAPYHLQSPRTIITKVMSMKQLPPALPQPPPVDQSEVTEQTPVLPRSQPVDPPTITGQPQAPRQPARAPSKLILQPRQRTSPAMWCAAIGCFAFSILLIVAGVVTLVVFLAVKPRPPSFDAANAILNSVYVDSPAPYFNNDMTLVANVSNPNREIDLVFRSATVELFFQDRPMAVQALPPFAQRRGQSQLLNMHLLSSRVLLPPQVAVKMVDQVRSNRVVYTIRGAFKVEARFRFGHYSYWMYTVCQLELTAPPSGVLVARRCTTK

SEQ ID NO: 33309 - protein, 250 aa, Zea mays subsp. mays
  peptide (1)..(250): Ceres Seq. ID no. 12366639
  misc_feature (11)..(250): NCBI GI NO: 15241117 NR Description: unknown protein; protein id: At5g56050.1
  misc_feature (90)..(250): NCBI GI NO: 15236740 NR Description: hypothetical protein; protein id: At4g26490.1
  misc_feature (2)..(250): NCBI GI NO: 15231546 NR Description: hypothetical protein; protein id: At3g26350.1
  misc_feature (1)..(250): NCBI GI NO: 15222151 NR Description: hypothetical protein; protein id: At1g13050.1
  misc_feature (25)..(248): NCBI GI NO: 20804932 NR Description: P0456E05.10
  misc_feature (4)..(247): NCBI GI NO: 20804896 NR Description: P0497A05.21
  misc_feature (58)..(249): NCBI GI NO: 15242362 NR Description: unknown protein; protein id: At5g45320.1
MSMKQLPPALPQPPPVDQSEVTEQTPVLPRSQPVDPPTITGQPQAPRQPARAPSKLILQPRQRTSPAMWCAAIGCFAFSILLIVAGVVTLVVFLAVKPRPPSFDAANAILNSVYVDSPAPYFNNDMTLVANVSNPNREIDLVFRSATVELFFQDRPMAVQALPPFAQRRGQSQLLNMHLLSSRVLLPPQVAVKMVDQVRSNRVVYTIRGAFKVEARFRFGHYSYWMYTVCQLELTAPPSGVLVARRCTTK

SEQ ID NO: 33310 - DNA, 948 bp, Zea mays subsp. mays
  misc_feature (1)..(948): Ceres Seq. ID no. 12413666
gcatttgcgcagcaaaaaggaggaaaaagtgaggagaaagaagagaggaaacaggaaagagtacaactcggcggcgacaccaccgctcgcagcctcccgccgcgatggcgatgcgttcgctcgccaggctccaccgccaactctccccttctctcctccaccgccatagcacacggcgtgggtggcctcccgcttctgacgcggcctttctctggcgcgggctcgcctcgtcatcaccttccgcggccggtcgggagaagagctcgagacggactttggggtaccttctcggcgttgcggtcgccatggtcggcgcctcgtacgccgccgtaccgctataccgtcgcttctgccaggctaccggctacggcggcaccgtccaacgacgcgagagtgtggaggagaagatctcacggcatgctcgagacggaactacgacatcacgagaaataattgttcaatttaatgctgatgttgctgatggaatgccgtggaagttcatccctacacagagagaggtcagggttaaacctggtgaaagtgctcttgctttttatactgctgagaatcgcagttcagctccaattactggtgtatccacgtataatgttgctcctatgaaggctgcgatttacttcaataagatacaatgtttctgctttgaggagcaaacacttcttcctggagaacagattgacatgccagtattcttctatatcgatcctgagtttgagacagaccccaaaatggacggggtgaacaatatcgttctttcgtacacattcttcaaggtgaacgatagttagaaaacgtgccaacagcattgttgtattaggaaaacaacacttgaacaatccatatgcagatatgctgcggaatagcatctcatgtaacaccaagagttttttttttgatagttagctcacatttgtctatggagaattttgc

SEQ ID NO: 33311 - protein, 233 aa, Zea mays subsp. mays
  peptide (1)..(233): Ceres Seq. ID no. 12413667
  misc_feature (75)..(230): Pfam Name: Pfam Description:  Cytochrome c oxidase assembly protein  CtaG / Cox11
  misc_feature (5)..(233): NCBI GI NO: 28301938 NR Description: putative cytochrome c oxidase assembly protein
  misc_feature (38)..(232): NCBI GI NO: 15217755 NR Description: hypothetical protein; protein id: At1g02410.1
  misc_feature (38)..(232): NCBI GI NO: 25310029 NR Description: hypothetical protein T6A9
  misc_feature (3)..(233): NCBI GI NO: 24581944 NR Description: CG31648-PA [Drosophila melanogaster]
  misc_feature (54)..(232): NCBI GI NO: 11466506 NR Description: component involved in Haem biosynthesis
  misc_feature (42)..(233): NCBI GI NO: 4758034 NR Description: COX11 homolog
  misc_feature (42)..(233): NCBI GI NO: 21264410 NR Description: Cytochrome c oxidase assembly protein COX11
  misc_feature (42)..(233): NCBI GI NO: 39841021 NR Description: RIKEN cDNA 2010004I09 [Mus musculus]
  misc_feature (42)..(233): NCBI GI NO: 34873027 NR Description: similar to COX11 homolog
  misc_feature (53)..(229): NCBI GI NO: 19114191 NR Description: putative cytochrome c oxidase assembly protein
MAMRSLARLHRQLSPSLLHRHSTRRGWPPASDAAFLWRGLASSSPSAAGREKSSRRTLGYLLGVAVAMVGASYAAVPLYRRFCQATGYGGTVQRRESVEEKISRHARDGTTTSREIIVQFNADVADGMPWKFIPTQREVRVKPGESALAFYTAENRSSAPITGVSTYNVAPMKAAIYFNKIQCFCFEEQTLLPGEQIDMPVFFYIDPEFETDPKMDGVNNIVLSYTFFKVNDS

SEQ ID NO: 33312 - protein, 231 aa, Zea mays subsp. mays
  peptide (1)..(231): Ceres Seq. ID no. 12413668
  misc_feature (73)..(228): Pfam Name: Pfam Description:  Cytochrome c oxidase assembly protein  CtaG / Cox11
  misc_feature (3)..(231): NCBI GI NO: 28301938 NR Description: putative cytochrome c oxidase assembly protein
  misc_feature (36)..(230): NCBI GI NO: 15217755 NR Description: hypothetical protein; protein id: At1g02410.1
  misc_feature (36)..(230): NCBI GI NO: 25310029 NR Description: hypothetical protein T6A9
  misc_feature (1)..(231): NCBI GI NO: 24581944 NR Description: CG31648-PA [Drosophila melanogaster]
  misc_feature (52)..(230): NCBI GI NO: 11466506 NR Description: component involved in Haem biosynthesis
  misc_feature (40)..(231): NCBI GI NO: 4758034 NR Description: COX11 homolog
  misc_feature (40)..(231): NCBI GI NO: 21264410 NR Description: Cytochrome c oxidase assembly protein COX11
  misc_feature (40)..(231): NCBI GI NO: 39841021 NR Description: RIKEN cDNA 2010004I09 [Mus musculus]
  misc_feature (40)..(231): NCBI GI NO: 34873027 NR Description: similar to COX11 homolog
  misc_feature (51)..(227): NCBI GI NO: 19114191 NR Description: putative cytochrome c oxidase assembly protein
MRSLARLHRQLSPSLLHRHSTRRGWPPASDAAFLWRGLASSSPSAAGREKSSRRTLGYLLGVAVAMVGASYAAVPLYRRFCQATGYGGTVQRRESVEEKISRHARDGTTTSREIIVQFNADVADGMPWKFIPTQREVRVKPGESALAFYTAENRSSAPITGVSTYNVAPMKAAIYFNKIQCFCFEEQTLLPGEQIDMPVFFYIDPEFETDPKMDGVNNIVLSYTFFKVNDS

SEQ ID NO: 33313 - protein, 166 aa, Zea mays subsp. mays
  peptide (1)..(166): Ceres Seq. ID no. 12413669
  misc_feature (8)..(163): Pfam Name: Pfam Description:  Cytochrome c oxidase assembly protein  CtaG / Cox11
  misc_feature (1)..(166): NCBI GI NO: 28301938 NR Description: putative cytochrome c oxidase assembly protein
  misc_feature (1)..(165): NCBI GI NO: 15217755 NR Description: hypothetical protein; protein id: At1g02410.1
  misc_feature (1)..(165): NCBI GI NO: 25310029 NR Description: hypothetical protein T6A9
  misc_feature (1)..(166): NCBI GI NO: 24581944 NR Description: CG31648-PA [Drosophila melanogaster]
  misc_feature (1)..(165): NCBI GI NO: 11466506 NR Description: component involved in Haem biosynthesis
  misc_feature (1)..(166): NCBI GI NO: 4758034 NR Description: COX11 homolog
  misc_feature (1)..(166): NCBI GI NO: 21264410 NR Description: Cytochrome c oxidase assembly protein COX11
  misc_feature (1)..(166): NCBI GI NO: 39841021 NR Description: RIKEN cDNA 2010004I09 [Mus musculus]
  misc_feature (1)..(166): NCBI GI NO: 34873027 NR Description: similar to COX11 homolog
  misc_feature (1)..(162): NCBI GI NO: 19114191 NR Description: putative cytochrome c oxidase assembly protein
MVGASYAAVPLYRRFCQATGYGGTVQRRESVEEKISRHARDGTTTSREIIVQFNADVADGMPWKFIPTQREVRVKPGESALAFYTAENRSSAPITGVSTYNVAPMKAAIYFNKIQCFCFEEQTLLPGEQIDMPVFFYIDPEFETDPKMDGVNNIVLSYTFFKVNDS

SEQ ID NO: 33314 - DNA, 1097 bp, Zea mays subsp. mays; identical to SEQ ID NO: 25504
  misc_feature (1)..(1097): Ceres Seq. ID no. 13494437

SEQ ID NO: 33315 - protein, 225 aa, Zea mays subsp. mays; identical to SEQ ID NO: 25505
  peptide (1)..(225): Ceres Seq. ID no. 13494438
  misc_feature (70)..(141): Pfam Name: Pfam Description:  linker histone H1 and H5 family
  misc_feature (1)..(225): NCBI GI NO: 6006363 NR Description: ESTs AU078183
  misc_feature (26)..(220): NCBI GI NO: 7439658 NR Description: histone H1, stress-inducible - tomato
  misc_feature (27)..(220): NCBI GI NO: 23506611 NR Description: histone H1D [Nicotiana tabacum]
  misc_feature (22)..(220): NCBI GI NO: 7595978 NR Description: histone H1 variant [Lycopersicon chilense]
  misc_feature (21)..(220): NCBI GI NO: 27529850 NR Description: stress-inducible H1 histone-like protein
  misc_feature (27)..(220): NCBI GI NO: 729668 NR Description: Histone H1
  misc_feature (27)..(220): NCBI GI NO: 5726575 NR Description: histone H1C [Nicotiana tabacum]
  misc_feature (77)..(215): NCBI GI NO: 7489483 NR Description: histone H1 homolog - rice
  misc_feature (1)..(225): NCBI GI NO: 2623960 NR Description: histone H1 [Apium graveolens]
  misc_feature (15)..(225): NCBI GI NO: 13540391 NR Description: histone H1 [Pisum sativum]

SEQ ID NO: 33316 - protein, 149 aa, Zea mays subsp. mays; identical to SEQ ID NO: 25506
  peptide (1)..(149): Ceres Seq. ID no. 13494439
  misc_feature (1)..(65): Pfam Name: Pfam Description:  linker histone H1 and H5 family
  misc_feature (1)..(149): NCBI GI NO: 6006363 NR Description: ESTs AU078183
  misc_feature (1)..(144): NCBI GI NO: 7439658 NR Description: histone H1, stress-inducible - tomato
  misc_feature (1)..(144): NCBI GI NO: 23506611 NR Description: histone H1D [Nicotiana tabacum]
  misc_feature (1)..(144): NCBI GI NO: 7595978 NR Description: histone H1 variant [Lycopersicon chilense]
  misc_feature (1)..(144): NCBI GI NO: 27529850 NR Description: stress-inducible H1 histone-like protein
  misc_feature (1)..(144): NCBI GI NO: 729668 NR Description: Histone H1
  misc_feature (1)..(144): NCBI GI NO: 5726575 NR Description: histone H1C [Nicotiana tabacum]
  misc_feature (1)..(139): NCBI GI NO: 7489483 NR Description: histone H1 homolog - rice
  misc_feature (1)..(149): NCBI GI NO: 2623960 NR Description: histone H1 [Apium graveolens]
  misc_feature (1)..(149): NCBI GI NO: 13540391 NR Description: histone H1 [Pisum sativum]

SEQ ID NO: 33317 - protein, 125 aa, Zea mays subsp. mays; identical to SEQ ID NO: 25507
  peptide (1)..(125): Ceres Seq. ID no. 13494440
  misc_feature (1)..(125): NCBI GI NO: 6006363 NR Description: ESTs AU078183
  misc_feature (1)..(120): NCBI GI NO: 7439658 NR Description: histone H1, stress-inducible - tomato
  misc_feature (1)..(120): NCBI GI NO: 23506611 NR Description: histone H1D [Nicotiana tabacum]
  misc_feature (1)..(120): NCBI GI NO: 7595978 NR Description: histone H1 variant [Lycopersicon chilense]
  misc_feature (1)..(120): NCBI GI NO: 27529850 NR Description: stress-inducible H1 histone-like protein
  misc_feature (1)..(120): NCBI GI NO: 729668 NR Description: Histone H1
  misc_feature (1)..(120): NCBI GI NO: 5726575 NR Description: histone H1C [Nicotiana tabacum]
  misc_feature (1)..(115): NCBI GI NO: 7489483 NR Description: histone H1 homolog - rice
  misc_feature (1)..(125): NCBI GI NO: 2623960 NR Description: histone H1 [Apium graveolens]
  misc_feature (1)..(125): NCBI GI NO: 13540391 NR Description: histone H1 [Pisum sativum]

SEQ ID NO: 33318 - DNA, 576 bp, Zea mays subsp. mays
  misc_feature (1)..(576): Ceres Seq. ID no. 13498290
ttgtagaactgtgggcgaagcaaggcaggctcattaggatgcacgagcaagcatcagcgatcgtcaggtatgagctaagtcgaatatcagctggtgtgttcattgcacttggtaaaggaaaagtgcagtgtcgtggtgacgtacgaagcctcctctttcatggatggttcagcacaatgttgttggattttggctggcttcagcgctgccccaaaggtctcgacctaagatcgttggaggagaatttagggcgaggccttttaaccctccctctcaggcagcagcaatgtttgttcgaggaatggttccagttctatgcgaccaaaggacccgagtgtccgaaccttattagagctttccaggtatggtggagaaggtctttcattagatcattggtagaacctcaaaactaagtttttccttgatgtactagtatgttgcgtgtatgatttgtaaaattgcaactgttctgatgacccttaaaaatgttttttcgtttgtagtttagttcttcccattgtatgtgaatagctggatgaatttgcttgaggataacatctgcggcgtggagtatgt

SEQ ID NO: 33319 - protein, 136 aa, Zea mays subsp. mays
  peptide (1)..(136): Ceres Seq. ID no. 13498291
  misc_feature (1)..(135): NCBI GI NO: 34900946 NR Description: putative PRLI-interacting factor G
  misc_feature (1)..(133): NCBI GI NO: 38347118 NR Description: OSJNBa0009K15.15
  misc_feature (1)..(131): NCBI GI NO: 18397316 NR Description: f13j11 PRLI-interacting factor G -related
  misc_feature (1)..(131): NCBI GI NO: 21553858 NR Description: unknown [Arabidopsis thaliana]
  misc_feature (1)..(131): NCBI GI NO: 25338924 NR Description: hypothetical protein At2g13690
  misc_feature (1)..(131): NCBI GI NO: 39104567 NR Description: putative f13j11 PRLI-interacting factor G
  misc_feature (1)..(131): NCBI GI NO: 11139264 NR Description: PRLI-interacting factor G [Arabidopsis thaliana]
  misc_feature (1)..(134): NCBI GI NO: 15238599 NR Description: expressed protein [Arabidopsis thaliana]
  misc_feature (4)..(135): NCBI GI NO: 32488518 NR Description: OSJNBa0011J08.25
  misc_feature (1)..(129): NCBI GI NO: 38230508 NR Description: predicted protein [Populus alba x Populus tremula]
VELWAKQGRLIRMHEQASAIVRYELSRISAGVFIALGKGKVQCRGDVRSLLFHGWFSTMLLDFGWLQRCPKGLDLRSLEENLGRGLLTLPLRQQQCLFEEWFQFYATKGPECPNLIRAFQVWWRRSFIRSLVEPQN

SEQ ID NO: 33320 - protein, 124 aa, Zea mays subsp. mays
  peptide (1)..(124): Ceres Seq. ID no. 13498292
  misc_feature (1)..(123): NCBI GI NO: 34900946 NR Description: putative PRLI-interacting factor G
  misc_feature (1)..(121): NCBI GI NO: 38347118 NR Description: OSJNBa0009K15.15
  misc_feature (1)..(119): NCBI GI NO: 18397316 NR Description: f13j11 PRLI-interacting factor G -related
  misc_feature (1)..(119): NCBI GI NO: 21553858 NR Description: unknown [Arabidopsis thaliana]
  misc_feature (1)..(119): NCBI GI NO: 25338924 NR Description: hypothetical protein At2g13690
  misc_feature (1)..(119): NCBI GI NO: 39104567 NR Description: putative f13j11 PRLI-interacting factor G
  misc_feature (1)..(119): NCBI GI NO: 11139264 NR Description: PRLI-interacting factor G [Arabidopsis thaliana]
  misc_feature (1)..(122): NCBI GI NO: 15238599 NR Description: expressed protein [Arabidopsis thaliana]
  misc_feature (1)..(123): NCBI GI NO: 32488518 NR Description: OSJNBa0011J08.25
  misc_feature (1)..(117): NCBI GI NO: 38230508 NR Description: predicted protein [Populus alba x Populus tremula]
MHEQASAIVRYELSRISAGVFIALGKGKVQCRGDVRSLLFHGWFSTMLLDFGWLQRCPKGLDLRSLEENLGRGLLTLPLRQQQCLFEEWFQFYATKGPECPNLIRAFQVWWRRSFIRSLVEPQN

SEQ ID NO: 33321 - protein, 78 aa, Zea mays subsp. mays
  peptide (1)..(78): Ceres Seq. ID no. 13498293
  misc_feature (1)..(77): NCBI GI NO: 34900946 NR Description: putative PRLI-interacting factor G
  misc_feature (1)..(75): NCBI GI NO: 38347118 NR Description: OSJNBa0009K15.15
  misc_feature (1)..(73): NCBI GI NO: 18397316 NR Description: f13j11 PRLI-interacting factor G -related
  misc_feature (1)..(73): NCBI GI NO: 25338924 NR Description: hypothetical protein At2g13690
  misc_feature (1)..(73): NCBI GI NO: 21553858 NR Description: unknown [Arabidopsis thaliana]
  misc_feature (1)..(73): NCBI GI NO: 39104567 NR Description: putative f13j11 PRLI-interacting factor G
  misc_feature (1)..(73): NCBI GI NO: 11139264 NR Description: PRLI-interacting factor G [Arabidopsis thaliana]
  misc_feature (1)..(76): NCBI GI NO: 15238599 NR Description: expressed protein [Arabidopsis thaliana]
  misc_feature (1)..(77): NCBI GI NO: 32488518 NR Description: OSJNBa0011J08.25
  misc_feature (1)..(71): NCBI GI NO: 38230508 NR Description: predicted protein [Populus alba x Populus tremula]
MLLDFGWLQRCPKGLDLRSLEENLGRGLLTLPLRQQQCLFEEWFQFYATKGPECPNLIRAFQVWWRRSFIRSLVEPQN

SEQ ID NO: 33322 - DNA, 1001 bp, Zea mays subsp. mays
  misc_feature (1)..(1001): Ceres Seq. ID no. 13492971
ctcaggctctcagctcagctgcgtcctcctgccacccatggcaaacgcttctctgcaatccttccttctcccgcacgaccattctttcgccggcgccggcggcagccgtgacggctccgcgtccgccgtgcacaagctctccaccaacaccagcggcagcatttccttcaggctctacaccaaaacctccccctcggtgacagcagcctcagccaccaattcgtcagctccgactccagttgccccggcatctgcaccagcggcaggggacgaagaagaagaagaaggcccctctctcgacctcctccgccgccagctcgccgcgggcgactaccggcaggcggacgagaccacgcgggcgctgatcatcgacctcgccggcgagcccgcgaggcgccgagggtacgtcttcttctccgaggtccagttcatcccggccgaggacctcgccgccatcgacgggctctggaaggagcacagcggcggcaggttcgggtacagcgtgcagcggcggctctgggagaagtcgcggcgcgacttcacccgcttcttcatccgggtcggctggatgaggaagctggacacggaggtggagcagtacaactacagggccttccccgacgagttcatgtgggaattgacggacgacacgcccgagggacacctgccgctcaccaacgccctcaggggcacgcagctcctggcgaacatcctcacccacccggccttccaggaggaggaccagggagacggagctgctgctgcagaagagagtgcaaacaccaaagatgataacaaagggagggagagacccaggtccatgagagatttcaagcctgattattctttttgattcaggctggcgaaggaaaccaaaaaaaaaaggggcatgggagtttgtggtgcagagatgctggcatggtgtaattgatttaaaagatcatgtatccgtagttctgtttgggttacttttgtcttaaaacatgcatggaagcttgtgt

SEQ ID NO: 33323 - protein, 283 aa, Zea mays subsp. mays
  peptide (1)..(283): Ceres Seq. ID no. 13492972
  misc_feature (53)..(283): NCBI GI NO: 17380924 NR Description: unknown protein [Arabidopsis thaliana]
  misc_feature (53)..(283): NCBI GI NO: 15231674 NR Description: expressed protein [Arabidopsis thaliana]
  misc_feature (53)..(283): NCBI GI NO: 32816239 NR Description: GUN4 mutant [Arabidopsis thaliana]
  misc_feature (99)..(240): NCBI GI NO: 30468073 NR Description: ORF155 [Cyanidioschyzon merolae]
  misc_feature (102)..(245): NCBI GI NO: 23042866 NR Description: hypothetical protein
  misc_feature (94)..(243): NCBI GI NO: 22299137 NR Description: ORF_ID:tlr1594~hypothetical protein
  misc_feature (94)..(245): NCBI GI NO: 16329174 NR Description: hypothetical protein [Synechocystis sp. PCC 6803]
  misc_feature (96)..(245): NCBI GI NO: 17229318 NR Description: hypothetical protein [Nostoc sp. PCC 7120]
  misc_feature (114)..(243): NCBI GI NO: 11465668 NR Description: ORF238 [Porphyra purpurea]
  misc_feature (102)..(241): NCBI GI NO: 33865601 NR Description: conserved hypothetical protein
SGSQLSCVLLPPMANASLQSFLLPHDHSFAGAGGSRDGSASAVHKLSTNTSGSISFRLYTKTSPSVTAASATNSSAPTPVAPASAPAAGDEEEEEGPSLDLLRRQLAAGDYRQADETTRALIIDLAGEPARRRGYVFFSEVQFIPAEDLAAIDGLWKEHSGGRFGYSVQRRLWEKSRRDFTRFFIRVGWMRKLDTEVEQYNYRAFPDEFMWELTDDTPEGHLPLTNALRGTQLLANILTHPAFQEEDQGDGAAAAEESANTKDDNKGRERPRSMRDFKPDYSF

SEQ ID NO: 33324 - protein, 271 aa, Zea mays subsp. mays
  peptide (1)..(271): Ceres Seq. ID no. 13492973
  misc_feature (41)..(271): NCBI GI NO: 17380924 NR Description: unknown protein [Arabidopsis thaliana]
  misc_feature (41)..(271): NCBI GI NO: 15231674 NR Description: expressed protein [Arabidopsis thaliana]
  misc_feature (41)..(271): NCBI GI NO: 32816239 NR Description: GUN4 mutant [Arabidopsis thaliana]
  misc_feature (87)..(228): NCBI GI NO: 30468073 NR Description: ORF155 [Cyanidioschyzon merolae]
  misc_feature (90)..(233): NCBI GI NO: 23042866 NR Description: hypothetical protein
  misc_feature (82)..(231): NCBI GI NO: 22299137 NR Description: ORF_ID:tlr1594~hypothetical protein
  misc_feature (82)..(233): NCBI GI NO: 16329174 NR Description: hypothetical protein [Synechocystis sp. PCC 6803]
  misc_feature (84)..(233): NCBI GI NO: 17229318 NR Description: hypothetical protein [Nostoc sp. PCC 7120]
  misc_feature (102)..(231): NCBI GI NO: 11465668 NR Description: ORF238 [Porphyra purpurea]
  misc_feature (90)..(229): NCBI GI NO: 33865601 NR Description: conserved hypothetical protein
MANASLQSFLLPHDHSFAGAGGSRDGSASAVHKLSTNTSGSISFRLYTKTSPSVTAASATNSSAPTPVAPASAPAAGDEEEEEGPSLDLLRRQLAAGDYRQADETTRALIIDLAGEPARRRGYVFFSEVQFIPAEDLAAIDGLWKEHSGGRFGYSVQRRLWEKSRRDFTRFFIRVGWMRKLDTEVEQYNYRAFPDEFMWELTDDTPEGHLPLTNALRGTQLLANILTHPAFQEEDQGDGAAAAEESANTKDDNKGRERPRSMRDFKPDYSF

SEQ ID NO: 33325 - DNA, 904 bp, Zea mays subsp. mays
  misc_feature (1)..(904): Ceres Seq. ID no. 12403630
aattctggttctagggagcccgcaggaaggcacctctgcggcgaccagcgtgaagaaaggggatcggaacgcctccatctcaaaccccacgaaggcacgaaccctctcttcctaggttcatcgttcctcctccgcgtccttccttccctccgcagcgcggcgcggcgcggcgcgatgatacagctgctcttcacgctgctagcggcggagggcgccgtggcggcggtgctactcttcaagacgccgctgcggaggctggccgtgctcgcgctcgaccacctcaagcggggccgcgggcccgtcatggtgcgcaccatcgcggccaccgtgcttgtcgtgctcgcatccagtctccacagcatggccaagatccgcggccacgccgagggggagctcgacggctccggggtcgtggggctcacccccaccgaccaggtccttcttgcgcgacacctcctcgaggcgtcactcatgggatactccttattccttgctttagtcattgaccggctgcacaactatgtcaaagaaaatcgaaggctcaggaagaaattggaagaggtgttgaaacagaataaggcactagaagaagcaacaaatggaaagctagaagagaacaggcctgaccagaaagacctttcccatgccaaggataattaacaatgacatgcgctcaagaaactccctgccatcactgcctatgcctgaataggatgccggtcactgatgttctccctgttgagaattagcattggtaaatgaatgctcggttacaacgtgctaaatcctttgcatctggccaaatttgtaaataagcactgggtgatgcccatcagtaaacacatgatgctactgctgttaaactaaatgtggcaaatttcataatgctaggtattgttctcgg

SEQ ID NO: 33326 - protein, 219 aa, Zea mays subsp. mays
  peptide (1)..(219): Ceres Seq. ID no. 12403631
  misc_feature (62)..(205): Pfam Name: Pfam Description:  B-cell receptor-associated protein 31-like
  misc_feature (59)..(205): NCBI GI NO: 9759015 NR Description: gene_id:K16E1.4~unknown protein
  misc_feature (59)..(205): NCBI GI NO: 18422225 NR Description: expressed protein; protein id: At5g42570
  misc_feature (59)..(205): NCBI GI NO: 21553655 NR Description: unknown [Arabidopsis thaliana]
  misc_feature (59)..(205): NCBI GI NO: 22655198 NR Description: unknown protein [Arabidopsis thaliana]
  misc_feature (59)..(205): NCBI GI NO: 30682503 NR Description: expressed protein [Arabidopsis thaliana]
  misc_feature (59)..(214): NCBI GI NO: 15239667 NR Description: putative protein; protein id: At5g48660.1
  misc_feature (59)..(219): NCBI GI NO: 34897474 NR Description: unknown protein
  misc_feature (59)..(219): NCBI GI NO: 15231412 NR Description: unknown protein; protein id: At3g07190.1
  misc_feature (59)..(193): NCBI GI NO: 18402620 NR Description: expressed protein; protein id: At3g20450
NSGSREPAGRHLCGDQREERGSERLHLKPHEGTNPLFLGSSFLLRVLPSLRSAARRGAMIQLLFTLLAAEGAVAAVLLFKTPLRRLAVLALDHLKRGRGPVMVRTIAATVLVVLASSLHSMAKIRGHAEGELDGSGVVGLTPTDQVLLARHLLEASLMGYSLFLALVIDRLHNYVKENRRLRKKLEEVLKQNKALEEATNGKLEENRPDQKDLSHAKDN

SEQ ID NO: 33327 - protein, 161 aa, Zea mays subsp. mays
  peptide (1)..(161): Ceres Seq. ID no. 12403632
  misc_feature (4)..(147): Pfam Name: Pfam Description:  B-cell receptor-associated protein 31-like
  misc_feature (1)..(147): NCBI GI NO: 9759015 NR Description: gene_id:K16E1.4~unknown protein
  misc_feature (1)..(147): NCBI GI NO: 18422225 NR Description: expressed protein; protein id: At5g42570
  misc_feature (1)..(147): NCBI GI NO: 21553655 NR Description: unknown [Arabidopsis thaliana]
  misc_feature (1)..(147): NCBI GI NO: 22655198 NR Description: unknown protein [Arabidopsis thaliana]
  misc_feature (1)..(147): NCBI GI NO: 30682503 NR Description: expressed protein [Arabidopsis thaliana]
  misc_feature (1)..(156): NCBI GI NO: 15239667 NR Description: putative protein; protein id: At5g48660.1
  misc_feature (1)..(161): NCBI GI NO: 34897474 NR Description: unknown protein
  misc_feature (1)..(161): NCBI GI NO: 15231412 NR Description: unknown protein; protein id: At3g07190.1
  misc_feature (1)..(135): NCBI GI NO: 18402620 NR Description: expressed protein; protein id: At3g20450
MIQLLFTLLAAEGAVAAVLLFKTPLRRLAVLALDHLKRGRGPVMVRTIAATVLVVLASSLHSMAKIRGHAEGELDGSGVVGLTPTDQVLLARHLLEASLMGYSLFLALVIDRLHNYVKENRRLRKKLEEVLKQNKALEEATNGKLEENRPDQKDLSHAKDN

SEQ ID NO: 33328 - protein, 118 aa, Zea mays subsp. mays
  peptide (1)..(118): Ceres Seq. ID no. 12403633
  misc_feature (1)..(104): Pfam Name: Pfam Description:  B-cell receptor-associated protein 31-like
  misc_feature (1)..(104): NCBI GI NO: 9759015 NR Description: gene_id:K16E1.4~unknown protein
  misc_feature (1)..(104): NCBI GI NO: 18422225 NR Description: expressed protein; protein id: At5g42570
  misc_feature (1)..(104): NCBI GI NO: 21553655 NR Description: unknown [Arabidopsis thaliana]
  misc_feature (1)..(104): NCBI GI NO: 22655198 NR Description: unknown protein [Arabidopsis thaliana]
  misc_feature (1)..(104): NCBI GI NO: 30682503 NR Description: expressed protein [Arabidopsis thaliana]
  misc_feature (1)..(113): NCBI GI NO: 15239667 NR Description: putative protein; protein id: At5g48660.1
  misc_feature (1)..(118): NCBI GI NO: 34897474 NR Description: unknown protein
  misc_feature (1)..(118): NCBI GI NO: 15231412 NR Description: unknown protein; protein id: At3g07190.1
  misc_feature (1)..(92): NCBI GI NO: 18402620 NR Description: expressed protein; protein id: At3g20450
MVRTIAATVLVVLASSLHSMAKIRGHAEGELDGSGVVGLTPTDQVLLARHLLEASLMGYSLFLALVIDRLHNYVKENRRLRKKLEEVLKQNKALEEATNGKLEENRPDQKDLSHAKDN

SEQ ID NO: 33329 - DNA, 1426 bp, Zea mays subsp. mays
  misc_feature (1)..(1426): Ceres Seq. ID no. 12341231
gaacttgaactggagaggcagtagccagagtgtgagctgacggcggacgtgctcgcctctcctctcctcacatttccggctcccctctccgcattccatggcaccgcattaccggtatttttagccgccggaggagacgggttgcgtagagagagggaaaaccagagctcctgactgttcctctctccctcctcacgggcgggctccgtctgttccgtccatccaccgccccggtcgtctcccggccagatccctctcctgcaaggtttctttgcgagtggccggagaagatgatgggcgggttcctctccagggtcctcctgctggcttttggctatgcctatcctgcctatgaatgctacaagaccgttgaactgaacaaaccacagattgagcagctcatattttggtgtcagtattggattttagttgccctgttgacagttttggagagatttggagattttacaatatcatggctaccgttttactcagaagcaaaggtgttgttctttgtatatttgtggtaccctaagacaaagggaactacgtatgtttatggaactttctttaagccatatatttctcagcatgagaatgaaatcgaccgaaatcttcttgagctcagagctcgagccaccgatatggttgtcctttacttccataaggctgcttcggtagggcaaaatactttctttgacgttttaaaatatgttgctgcccagtccccttctcggaaatcaagactgcaccctcatcaggaaccacagcagcagcaaccacaagtgcaggtggagctgcagcagccgcaaccacaaaaacaagcagcacctgttatgcgcagaggagcatctattgctgctcggcaagcagcaatggcacagcaatctctggagactatacccgttccatcttcacccaagatcaagcgtcaaacatcagggagacctggttcggtggcatccacaaagcctgcagcagctgcatccacaccaaaacctggcggtagcccaaagaaaggtgaggtcaaacctgctgtcgacccagttcaaactccagccacaagtgcagattcaccaaaatccgagcctagcgccccaccactttctgagaccgaaggagtagacaacatggcaatcgatgaggtcagtggtgatgctgcagagggcgcggaagagcttgaccctgcgctcgaggagacgccgatggaggagacaatccgtgtgacgcgcgccaagctaaggaggcgcaccgccaccgaggattctgctgggaattagctgcatgccgttgttttccctgcacattgtattgatctttttccgagttttaggctcacatgttgtttgctggaatggagatatgttgttgttcacttggttcttgtgacacagagttaattatcttatttccgtgctttcttagt

SEQ ID NO: 33330 - protein, 329 aa, Zea mays subsp. mays
  peptide (1)..(329): Ceres Seq. ID no. 12341232
  misc_feature (2)..(98): Pfam Name: Pfam Description:  TB2/DP1, HVA22 family
  misc_feature (136)..(327): NCBI GI NO: 37531658 NR Description: putative Magnaporthe grisea pathogenicity protein
  misc_feature (1)..(166): NCBI GI NO: 37531658 NR Description: putative Magnaporthe grisea pathogenicity protein
  misc_feature (1)..(152): NCBI GI NO: 21671921 NR Description: Putative protein with HVA22 domain
  misc_feature (1)..(322): NCBI GI NO: 18394805 NR Description: expressed protein; protein id: At1g19950
  misc_feature (1)..(322): NCBI GI NO: 21553483 NR Description: pathogenicity protein PATH531-like protein
  misc_feature (1)..(275): NCBI GI NO: 18422223 NR Description: expressed protein; protein id: At5g42560
  misc_feature (1)..(275): NCBI GI NO: 21553813 NR Description: unknown [Arabidopsis thaliana]
  misc_feature (12)..(322): NCBI GI NO: 25513732 NR Description: T20H2.26 protein - Arabidopsis thaliana
  misc_feature (5)..(275): NCBI GI NO: 9759014 NR Description: gene_id:K16E1.3~unknown protein
  misc_feature (12)..(169): NCBI GI NO: 15222332 NR Description: hypothetical protein; protein id: At1g75700.1
MMGGFLSRVLLLAFGYAYPAYECYKTVELNKPQIEQLIFWCQYWILVALLTVLERFGDFTISWLPFYSEAKVLFFVYLWYPKTKGTTYVYGTFFKPYISQHENEIDRNLLELRARATDMVVLYFHKAASVGQNTFFDVLKYVAAQSPSRKSRLHPHQEPQQQQPQVQVELQQPQPQKQAAPVMRRGASIAARQAAMAQQSLETIPVPSSPKIKRQTSGRPGSVASTKPAAAASTPKPGGSPKKGEVKPAVDPVQTPATSADSPKSEPSAPPLSETEGVDNMAIDEVSGDAAEGAEELDPALEETPMEETIRVTRAKLRRRTATEDSAGN

SEQ ID NO: 33331 - protein, 328 aa, Zea mays subsp. mays
  peptide (1)..(328): Ceres Seq. ID no. 12341233
  misc_feature (1)..(97): Pfam Name: Pfam Description:  TB2/DP1, HVA22 family
  misc_feature (135)..(326): NCBI GI NO: 37531658 NR Description: putative Magnaporthe grisea pathogenicity protein
  misc_feature (1)..(165): NCBI GI NO: 37531658 NR Description: putative Magnaporthe grisea pathogenicity protein
  misc_feature (1)..(151): NCBI GI NO: 21671921 NR Description: Putative protein with HVA22 domain
  misc_feature (1)..(321): NCBI GI NO: 18394805 NR Description: expressed protein; protein id: At1g19950
  misc_feature (1)..(321): NCBI GI NO: 21553483 NR Description: pathogenicity protein PATH531-like protein
  misc_feature (1)..(274): NCBI GI NO: 18422223 NR Description: expressed protein; protein id: At5g42560
  misc_feature (1)..(274): NCBI GI NO: 21553813 NR Description: unknown [Arabidopsis thaliana]
  misc_feature (11)..(321): NCBI GI NO: 25513732 NR Description: T20H2.26 protein - Arabidopsis thaliana
  misc_feature (4)..(274): NCBI GI NO: 9759014 NR Description: gene_id:K16E1.3~unknown protein
  misc_feature (11)..(168): NCBI GI NO: 15222332 NR Description: hypothetical protein; protein id: At1g75700.1
MGGFLSRVLLLAFGYAYPAYECYKTVELNKPQIEQLIFWCQYWILVALLTVLERFGDFTISWLPFYSEAKVLFFVYLWYPKTKGTTYVYGTFFKPYISQHENEIDRNLLELRARATDMVVLYFHKAASVGQNTFFDVLKYVAAQSPSRKSRLHPHQEPQQQQPQVQVELQQPQPQKQAAPVMRRGASIAARQAAMAQQSLETIPVPSSPKIKRQTSGRPGSVASTKPAAAASTPKPGGSPKKGEVKPAVDPVQTPATSADSPKSEPSAPPLSETEGVDNMAIDEVSGDAAEGAEELDPALEETPMEETIRVTRAKLRRRTATEDSAGN

SEQ ID NO: 33332 - protein, 211 aa, Zea mays subsp. mays
  peptide (1)..(211): Ceres Seq. ID no. 12341234
  misc_feature (18)..(209): NCBI GI NO: 37531658 NR Description: putative Magnaporthe grisea pathogenicity protein
  misc_feature (1)..(48): NCBI GI NO: 37531658 NR Description: putative Magnaporthe grisea pathogenicity protein
  misc_feature (1)..(34): NCBI GI NO: 21671921 NR Description: Putative protein with HVA22 domain
  misc_feature (1)..(204): NCBI GI NO: 18394805 NR Description: expressed protein; protein id: At1g19950
  misc_feature (1)..(204): NCBI GI NO: 21553483 NR Description: pathogenicity protein PATH531-like protein
  misc_feature (1)..(157): NCBI GI NO: 18422223 NR Description: expressed protein; protein id: At5g42560
  misc_feature (1)..(157): NCBI GI NO: 21553813 NR Description: unknown [Arabidopsis thaliana]
  misc_feature (1)..(204): NCBI GI NO: 25513732 NR Description: T20H2.26 protein - Arabidopsis thaliana
  misc_feature (1)..(157): NCBI GI NO: 9759014 NR Description: gene_id:K16E1.3~unknown protein
  misc_feature (1)..(51): NCBI GI NO: 15222332 NR Description: hypothetical protein; protein id: At1g75700.1
MVVLYFHKAASVGQNTFFDVLKYVAAQSPSRKSRLHPHQEPQQQQPQVQVELQQPQPQKQAAPVMRRGASIAARQAAMAQQSLETIPVPSSPKIKRQTSGRPGSVASTKPAAAASTPKPGGSPKKGEVKPAVDPVQTPATSADSPKSEPSAPPLSETEGVDNMAIDEVSGDAAEGAEELDPALEETPMEETIRVTRAKLRRRTATEDSAGN

SEQ ID NO: 33333 - DNA, 1695 bp, Zea mays subsp. mays
  misc_feature (1)..(1695): Ceres Seq. ID no. 12406091
gcacgagaccattacctagaacatcctaatcaaaaagcaaaactcgactccacgcgtcgcccttcttctccggagagatcgttttaatagccccgtaccaaatccaattcgtctctcctcaccggagaacagaaacgatacggttaatagatatagcgaagaagggcagcaccaccagtagcagcagccatgcccgctcgcgctcgatggcgactcctcgcgctgccgctcgcgctcttactcgttgccgggtcggcgcatggcctcgtgaagccggaggcagccgcggcgcccaagccccccgtccccaaggccatatcggacctgagggacgcgatcgtgaaggggctgggattccaggccgaggggctcaaggtgtccgggttcgacgtgcgagacgcgctcgtggggcacgcggtggcgtacgagttcgacatcgaggtcggcaggaaggtcctaccggtgcgcctgctggaggacgtcagccggtgggacttcgtcgacctccccatcttccgttcccaggccgacgctgacgatacggcgctcgccgagatccggcgggccgggagggggagcatcgttgagcctaccctgccgccctttcagctcgccgggcccatggagctctggatccagaacggcgacgacgtcaggcttgccttgccgcatgatgtggacgctggtaccttgaagaaggttgttctttctgatggtgcagtcgtaacagtgaagggtgctagagctgtgagcctccgtttgccgcttgaattaccacttcctctcaaccgtaccacttacaagggtcgcctctcaagcctgatatccatcgcacaagccctgcgtggtgcagcccggtctaatcagaaacccctgctctctcttcgcgttgagggtccagtttccttgtcctcgactccttccatgtctcccaaggacaagctcaagctcaaacggttggccccaggccaagtggagctctcctcacaggcgggggcaatccctgctatcaccgaagacgaggatgaaccacataaccctggattgtggcctcttttgtctctgaatggttcagatggcagcctgcaggggtttgaggagctattggcctcagtacttggaaagaaggcaggcgagaagggtaccttcaagctactgaaggcacgggcctcggctcaaacctatgtcaagatggcattcacggtggagaagaagcttgctgaaggggatgtgaactggtcaaatattccagaatggaagacgaagcccaagaggatgagagcacactacgaagtccttgctcgagtggaggagggtcaggcgatccctgagaggatagcgcaggtacagcctttccaggccaacgaggccatgtcggagagtgtgctcaccggcaacgtcacgaggtcgaagatggaaatcgtccatccaccgccggtttacttcactctctgagtgagcgaagaactggatgctgtttgatgttctcttcagagctactacacgttgggtggtgggtagtttacgctggctcgtaggcaacaaagttgtacaagcggcaagagtttgttgcctatacactgactgcgttgacatgaatattgacgttctatgtgtactgaaaggctggcaagcctttaatattatcaattggaataatgaggaataagaaaaatctgtacatctttagagggc

SEQ ID NO: 33334 - protein, 421 aa, Zea mays subsp. mays
  peptide (1)..(421): Ceres Seq. ID no. 12406092
  misc_feature (1)..(421): NCBI GI NO: 34909866 NR Description: OSJNBb0053G03.14
  misc_feature (11)..(421): NCBI GI NO: 28393303 NR Description: unknown protein [Arabidopsis thaliana]
  misc_feature (286)..(421): NCBI GI NO: 15237724 NR Description: putative protein; protein id: At5g64510.1
  misc_feature (281)..(378): NCBI GI NO: 7489145 NR Description: hypothetical protein (clone NF24) - common tobacco
  misc_feature (228)..(421): NCBI GI NO: 18401665 NR Description: expressed protein; protein id: At1g47310
  misc_feature (28)..(189): NCBI GI NO: 18401665 NR Description: expressed protein; protein id: At1g47310
  misc_feature (228)..(421): NCBI GI NO: 21536788 NR Description: unknown [Arabidopsis thaliana]
  misc_feature (28)..(189): NCBI GI NO: 21536788 NR Description: unknown [Arabidopsis thaliana]
MPARARWRLLALPLALLLVAGSAHGLVKPEAAAAPKPPVPKAISDLRDAIVKGLGFQAEGLKVSGFDVRDALVGHAVAYEFDIEVGRKVLPVRLLEDVSRWDFVDLPIFRSQADADDTALAEIRRAGRGSIVEPTLPPFQLAGPMELWIQNGDDVRLALPHDVDAGTLKKVVLSDGAVVTVKGARAVSLRLPLELPLPLNRTTYKGRLSSLISIAQALRGAARSNQKPLLSLRVEGPVSLSSTPSMSPKDKLKLKRLAPGQVELSSQAGAIPAITEDEDEPHNPGLWPLLSLNGSDGSLQGFEELLASVLGKKAGEKGTFKLLKARASAQTYVKMAFTVEKKLAEGDVNWSNIPEWKTKPKRMRAHYEVLARVEEGQAIPERIAQVQPFQANEAMSESVLTGNVTRSKMEIVHPPPVYFTL

SEQ ID NO: 33335 - protein, 277 aa, Zea mays subsp. mays
  peptide (1)..(277): Ceres Seq. ID no. 12406093
  misc_feature (1)..(277): NCBI GI NO: 34909866 NR Description: OSJNBb0053G03.14
  misc_feature (1)..(277): NCBI GI NO: 28393303 NR Description: unknown protein [Arabidopsis thaliana]
  misc_feature (142)..(277): NCBI GI NO: 15237724 NR Description: putative protein; protein id: At5g64510.1
  misc_feature (137)..(234): NCBI GI NO: 7489145 NR Description: hypothetical protein (clone NF24) - common tobacco
  misc_feature (84)..(277): NCBI GI NO: 18401665 NR Description: expressed protein; protein id: At1g47310
  misc_feature (1)..(45): NCBI GI NO: 18401665 NR Description: expressed protein; protein id: At1g47310
  misc_feature (84)..(277): NCBI GI NO: 21536788 NR Description: unknown [Arabidopsis thaliana]
  misc_feature (1)..(45): NCBI GI NO: 21536788 NR Description: unknown [Arabidopsis thaliana]
MELWIQNGDDVRLALPHDVDAGTLKKVVLSDGAVVTVKGARAVSLRLPLELPLPLNRTTYKGRLSSLISIAQALRGAARSNQKPLLSLRVEGPVSLSSTPSMSPKDKLKLKRLAPGQVELSSQAGAIPAITEDEDEPHNPGLWPLLSLNGSDGSLQGFEELLASVLGKKAGEKGTFKLLKARASAQTYVKMAFTVEKKLAEGDVNWSNIPEWKTKPKRMRAHYEVLARVEEGQAIPERIAQVQPFQANEAMSESVLTGNVTRSKMEIVHPPPVYFTL

SEQ ID NO: 33336 - DNA, 793 bp, Zea mays subsp. mays
  misc_feature (1)..(793): Ceres Seq. ID no. 12355690
aaaccctagaaagctcttaaaaagcccccaggggccagggctagcagcggcggcgtatccctaatcccacctccagtctctgggcaccaaatttccggcggcgatggcggcggctgtggcgaggtcagggttccggcgcatgttctccgtctctgccttcgcgccgccgaaggcgcccgccgcgcgccccaaggccgacccatcccccaacctcttcgtctccggcttaagcaagcgtaccacaagtgaaggacttagagaagcctttgcggagtttggtgaagttttgcatgctcgagttgtgaccgatcgtgtcagtgggttttctaagggatttggctttgtaaggtatgctacgaccgaagaggcagccaagggaatagagggaaaggatggaaagttccttgatggatgggttatttttgcggaatacgctaaacccagaccaccaccggaggaaacagggatgaattcgcagccccagcagtcatggggagctccatcaggttcctggggtgcacagtagatgaagtgatattgtgagagcccctccctgtcccagccctagggctcgtagcggatcgtgagggatgattttgtgtggtgtgtcgcaggtgtgaaatgcctttgttgtcccaatattcctaccgtgttgggggtggtcgcttgctcgcgtccacgtctttcacatgaattggttactgtggtagttgtagttctggatacggtaccaaaacaaaagtattgctgtcaacaatctgcaacagccgggaaaacagtcgaaaacctttgc

SEQ ID NO: 33337 - protein, 140 aa, Zea mays subsp. mays; identical to SEQ ID NO: 28305
  peptide (1)..(140): Ceres Seq. ID no. 12355691
  misc_feature (37)..(108): Pfam Name: a.k.a. RRM, RBD, or RNP domain Pfam Description: RNA recognition motif.
  misc_feature (2)..(140): NCBI GI NO: 38636774 NR Description: putative RNA recognition motif
  misc_feature (1)..(129): NCBI GI NO: 34898598 NR Description: P0534A03.25
  misc_feature (1)..(133): NCBI GI NO: 15239676 NR Description: RRM-containing protein; protein id: At5g54580
  misc_feature (8)..(116): NCBI GI NO: 15224298 NR Description: RRM-containing protein; protein id: At2g37510
  misc_feature (17)..(114): NCBI GI NO: 15219486 NR Description: RRM-containing RNA-binding protein, putative
  misc_feature (3)..(114): NCBI GI NO: 15239958 NR Description: RRM-containing protein; protein id: At5g06210
  misc_feature (34)..(140): NCBI GI NO: 34906972 NR Description: putative glycine-rich RNA-binding protein 2
  misc_feature (4)..(138): NCBI GI NO: 21388662 NR Description: glycine-rich RNA-binding protein
  misc_feature (1)..(114): NCBI GI NO: 38344030 NR Description: OJ991214_12.1
  misc_feature (34)..(99): NCBI GI NO: 19881711 NR Description: Putative RNA-binding protein [Oryza sativa]

SEQ ID NO: 33338 - protein, 128 aa, Zea mays subsp. mays; identical to SEQ ID NO: 28306
  peptide (1)..(128): Ceres Seq. ID no. 12355692
  misc_feature (25)..(96): Pfam Name: a.k.a. RRM, RBD, or RNP domain Pfam Description: RNA recognition motif.
  misc_feature (1)..(128): NCBI GI NO: 38636774 NR Description: putative RNA recognition motif
  misc_feature (1)..(117): NCBI GI NO: 34898598 NR Description: P0534A03.25
  misc_feature (1)..(121): NCBI GI NO: 15239676 NR Description: RRM-containing protein; protein id: At5g54580
  misc_feature (1)..(104): NCBI GI NO: 15224298 NR Description: RRM-containing protein; protein id: At2g37510
  misc_feature (5)..(102): NCBI GI NO: 15219486 NR Description: RRM-containing RNA-binding protein, putative
  misc_feature (1)..(102): NCBI GI NO: 15239958 NR Description: RRM-containing protein; protein id: At5g06210
  misc_feature (22)..(128): NCBI GI NO: 34906972 NR Description: putative glycine-rich RNA-binding protein 2
  misc_feature (1)..(126): NCBI GI NO: 21388662 NR Description: glycine-rich RNA-binding protein
  misc_feature (1)..(102): NCBI GI NO: 38344030 NR Description: OJ991214_12.1
  misc_feature (22)..(87): NCBI GI NO: 19881711 NR Description: Putative RNA-binding protein [Oryza sativa]

SEQ ID NO: 33339 - DNA, 1134 bp, Zea mays subsp. mays
  misc_feature (1)..(1134): Ceres Seq. ID no. 12350920
atcaagcacaagcacgccacgcgatccacacacggcaagcaacgcccagggctcgtgctcgccccgcgacccgcgaaagatctgtgctggttcgctcgctcgctcgcgccgcgccgccgcgtgggggtgccgatgagctgcgcggggcaggccggcgggtggctgctcgactacgcgctggtggagtaggagatccagggctccgagttcatctacatggtcgacgacccggccgtctccagcgtgatactggggtttgatgctcccaggaaagaggacggcgtccaggacaaccccggcgccaagaagagatcccggccggagtccagcgcgccacccggcaccaaggcttgccgtgagaagctccggcgagacaggctcaacgaaaggttcaacgagctctgtgccatcttggaacccggcaagccacccaaggccgacaaagtcgctatcctaagcgacgctgcccgtctcctgaaccagctgcagggcgaggcccagaagcttaagcaatcgaacgaatcgctccaggagtccatcaagagtcttaaggctgagaagtccgagctgcgagacgagaagacgaggctcaaggctgagaaggagaggttggagcagatgctcaagggcgtcgtcagccacgccgcggtggctgctccggggcccttcgtcccgcaccctgctgcggtcgctccatctttccaccaccacccggcggcgtttgctcaggctggaaagttcgtcccgtaccccagctacccgccgccggctgcgttctggcagtggataccgccgacgtccctcgacacgaccaaggaccccgcacactggccgccggtcgcctagccgacctaccacctcaccgtggcatcattcatcggtgatgcgttgccgtgtgtactgaatttgatcgaagcatgcctgaaaaaagaaaccttggctgctgctcgtgtcaaggacgtgatgtgctgaagttcaggcgatctaggtcggctggagaagtctatgtaacagccataatgctaaagcaatgaaagtgatatattaattgaatcgggctagtgtttcctgaaactacggttatttagacattgcctggaaggctagaacaatgcaaacttgggtaacattgtg

SEQ ID NO: 33340 - protein, 209 aa, Zea mays subsp. mays
  peptide (1)..(209): Ceres Seq. ID no. 12350921
  misc_feature (41)..(91): Pfam Name: Pfam Description:  Helix-loop-helix DNA-binding domain
  misc_feature (1)..(209): NCBI GI NO: 21592325 NR Description: bHLH transcription factor, putative
  misc_feature (1)..(209): NCBI GI NO: 15239706 NR Description: bHLH protein; protein id: At5g54680
  misc_feature (1)..(209): NCBI GI NO: 15223710 NR Description: bHLH protein; protein id: At1g51070
  misc_feature (20)..(209): NCBI GI NO: 32352190 NR Description: hypothetical protein
  misc_feature (1)..(209): NCBI GI NO: 20127030 NR Description: putative bHLH transcription factor
  misc_feature (1)..(209): NCBI GI NO: 22331274 NR Description: bHLH protein; protein id: At3g23210
  misc_feature (23)..(209): NCBI GI NO: 29367409 NR Description: helix-loop-helix-like protein
  misc_feature (23)..(209): NCBI GI NO: 38636768 NR Description: helix-loop-helix-like protein
  misc_feature (16)..(183): NCBI GI NO: 18414212 NR Description: bHLH protein; protein id: At4g14410
  misc_feature (16)..(183): NCBI GI NO: 30682847 NR Description: bHLH protein [Arabidopsis thaliana]
MVDDPAVSSVILGFDAPRKEDGVQDNPGAKKRSRPESSAPPGTKACREKLRRDRLNERFNELCAILEPGKPPKADKVAILSDAARLLNQLQGEAQKLKQSNESLQESIKSLKAEKSELRDEKTRLKAEKERLEQMLKGVVSHAAVAAPGPFVPHPAAVAPSFHHHPAAFAQAGKFVPYPSYPPPAAFWQWIPPTSLDTTKDPAHWPPVA

SEQ ID NO: 33341 - DNA, 772 bp, Zea mays subsp. mays
  misc_feature (1)..(772): Ceres Seq. ID no. 12379466
aacgcactgctaaaagagctcgacgactacgttgtatgctgatcgattcgtctccgatctcctccttcgaccgccgccaccttcgtctccgagactccgacgatgtcctccgccgccgatgaggatgcgttgtcgtctgacaaggggaagaagagggaggaggacggcactgacgggaggagccaacgtcaggagggtgtcgaggtggccgacgggaaagtggatctaggagacctgtacggcgcggcggcggggtgggtagaggcgcggaccagctgcccgcacatcggcaccatgccacccgctggtgctgacgacctcgcgcgcgtgccttcgcccgactctccgtgctccagatgtaatcaccctgctgaaaactggttatgcttcatatgcaaagatgtgctttgcagccgttttatcaacaaacatatgttgtgccatcatcaagaaactggtcactgtcttgctttgagcttcagtgatctgtcagtttggtgtttctcatgtgattcatacctagatgttcaagccattttagaattgcgcccagtgtatgaagttgcacatttgttgaagtttggacaacgtccaccatttcgatcacttgatgtacaggattctggcactggtgaaagtggaagtgtgtcaagggcttagttatatgtattccagtaatgagtttcttttcatgatacttcaatcagattcagacagacagttgtctactatcctggcatttcttaagctgcagtgcaatataattcatttg

SEQ ID NO: 33342 - protein, 185 aa, Zea mays subsp. mays
  peptide (1)..(185): Ceres Seq. ID no. 12379467
  misc_feature (83)..(153): Pfam Name: Pfam Description:  Zn-finger in ubiquitin-hydrolases and other protein
  misc_feature (34)..(169): NCBI GI NO: 26984073 NR Description: hypothetical protein [Arabidopsis thaliana]
  misc_feature (1)..(165): NCBI GI NO: 34933421 NR Description: histone deacetylase 6 [Rattus norvegicus]
  misc_feature (59)..(160): NCBI GI NO: 27882614 NR Description: Similar to histone deacetylase 6 [Xenopus laevis]
  misc_feature (59)..(165): NCBI GI NO: 11360193 NR Description: hypothetical protein DKFZp566E044.1 - human
  misc_feature (59)..(165): NCBI GI NO: 15489272 NR Description: histone deacetylase 6 [Homo sapiens]
  misc_feature (59)..(165): NCBI GI NO: 7108921 NR Description: GR AF-1 specific histone deacetylase
  misc_feature (1)..(165): NCBI GI NO: 27370650 NR Description: histone deacetylase 6 [Mus musculus]
  misc_feature (59)..(165): NCBI GI NO: 10720024 NR Description: Histone deacetylase 6 (HD6)
  misc_feature (59)..(165): NCBI GI NO: 13128864 NR Description: histone deacetylase 6 [Homo sapiens]
  misc_feature (1)..(165): NCBI GI NO: 7513783 NR Description: probable histone deacetylase (EC 3
MSSAADEDALSSDKGKKREEDGTDGRSQRQEGVEVADGKVDLGDLYGAAAGWVEARTSCPHIGTMPPAGADDLARVPSPDSPCSRCNHPAENWLCFICKDVLCSRFINKHMLCHHQETGHCLALSFSDLSVWCFSCDSYLDVQAILELRPVYEVAHLLKFGQRPPFRSLDVQDSGTGESGSVSRA

SEQ ID NO: 33343 - protein, 121 aa, Zea mays subsp. mays
  peptide (1)..(121): Ceres Seq. ID no. 12379468
  misc_feature (19)..(89): Pfam Name: Pfam Description:  Zn-finger in ubiquitin-hydrolases and other protein
  misc_feature (1)..(105): NCBI GI NO: 26984073 NR Description: hypothetical protein [Arabidopsis thaliana]
  misc_feature (1)..(101): NCBI GI NO: 34933421 NR Description: histone deacetylase 6 [Rattus norvegicus]
  misc_feature (1)..(96): NCBI GI NO: 27882614 NR Description: Similar to histone deacetylase 6 [Xenopus laevis]
  misc_feature (1)..(101): NCBI GI NO: 11360193 NR Description: hypothetical protein DKFZp566E044.1 - human
  misc_feature (1)..(101): NCBI GI NO: 15489272 NR Description: histone deacetylase 6 [Homo sapiens]
  misc_feature (1)..(101): NCBI GI NO: 7108921 NR Description: GR AF-1 specific histone deacetylase
  misc_feature (1)..(101): NCBI GI NO: 27370650 NR Description: histone deacetylase 6 [Mus musculus]
  misc_feature (1)..(101): NCBI GI NO: 10720024 NR Description: Histone deacetylase 6 (HD6)
  misc_feature (1)..(101): NCBI GI NO: 13128864 NR Description: histone deacetylase 6 [Homo sapiens]
  misc_feature (1)..(101): NCBI GI NO: 7513783 NR Description: probable histone deacetylase (EC 3
MPPAGADDLARVPSPDSPCSRCNHPAENWLCFICKDVLCSRFINKHMLCHHQETGHCLALSFSDLSVWCFSCDSYLDVQAILELRPVYEVAHLLKFGQRPPFRSLDVQDSGTGESGSVSRA

SEQ ID NO: 33344 - DNA, 1064 bp, Zea mays subsp. mays
  misc_feature (1)..(1064): Ceres Seq. ID no. 13494390
  misc_feature (892)..(892): n is a, c, t, g, unknown, or other
gaacctcctccactccagcacgtacaagagctctcgccaaagcctaaatttagctacgacccgcgtagcttctcacgtactcaccacccatggcgaagccaagtagctacggtcttgcgcttcttgcttgcgccgccgtcgccgctgcggtcgccggcggaacgcagttcacggtcggcggcgcccaatggctggagcgtgcccgccgccggcgcggagcccttcaatgcttgggcggagaggacgaggtttcagatcggagacgccctagtgttcgtgtaccccaaggaccaagacgcggtgctgctggtggagccggcgggctacaacgcgtgcaacacgtcgtcgtacgtgaggaagttcgacgacggcgacaccgtggtcgcgctcgacagcgccggcccgctcttcttcatcagtggcgtcgaggccaactgccgcgccgacgagaagctcatcgtcatggtcctcgccgcccgcagcaacggcaccggcgcgccggctccgagcacggcgcccccgcctccggctcccgccagctccgcgccgcccacgccggcgtcgcccgctcctaagggcgcccccccgaccacggcggcgtcgcctccgccgccctcggcctctgctcccgcaacgacaccggccacgccgccgcccgccgcgtcggcggcgccccctgctccgagggcgtcgtcaaccccgccgcctccatctgccccggccggtgccccgccggcgcccgcggcaagctctccggctccgagcgcacatggggcgacggataactccacgggcacgccgtcgtcgcctcccgccggctcctccaaggacaagaacggcgccgccttcacggtggccacaggtttggccagctcgttcggaacctgcatcncttgtacgccatgcttgctctctgaagtgaagtgggccgccgtggaagactccagtaaatatgtgtgtgtttacgtgtaatttaattgagacatgcgatttgtgcatgttattgctagatcttgcattcgttttccgccggatgaataagaaatcaaccattcgttattcct

SEQ ID NO: 33345 - protein, 323 aa, Zea mays subsp. mays
  peptide (1)..(323): Ceres Seq. ID no. 13494391
  misc_feature (65)..(150): Pfam Name: Pfam Description:  Plastocyanin-like domain
  misc_feature (63)..(258): NCBI GI NO: 34903678 NR Description: B1015E06.24
  misc_feature (72)..(272): NCBI GI NO: 34903678 NR Description: B1015E06.24
  misc_feature (73)..(272): NCBI GI NO: 15238868 NR Description: hypothetical protein [Arabidopsis thaliana]
  misc_feature (73)..(281): NCBI GI NO: 15234164 NR Description: expressed protein [Arabidopsis thaliana]
  misc_feature (73)..(281): NCBI GI NO: 21592865 NR Description: unknown [Arabidopsis thaliana]
  misc_feature (73)..(272): NCBI GI NO: 28396618 NR Description: phytocyanin protein, PUP2 [Arabidopsis thaliana]
  misc_feature (64)..(223): NCBI GI NO: 18402674 NR Description: plastocyanin-like domain containing protein
  misc_feature (64)..(209): NCBI GI NO: 21618177 NR Description: unknown [Arabidopsis thaliana]
  misc_feature (65)..(233): NCBI GI NO: 34908784 NR Description: P0415A04.29
  misc_feature (63)..(283): NCBI GI NO: 3914142 NR Description: EARLY NODULIN 20 PRECURSOR (N-20)
  misc_feature (298)..(298): Xaa is any aa, unknown or other
EPPPLQHVQELSPKPKFSYDPRSFSRTHHPWRSQVATVLRFLLAPPSPLRSPAERSSRSAAPNGWSVPAAGAEPFNAWAERTRFQIGDALVFVYPKDQDAVLLVEPAGYNACNTSSYVRKFDDGDTVVALDSAGPLFFISGVEANCRADEKLIVMVLAARSNGTGAPAPSTAPPPPAPASSAPPTPASPAPKGAPPTTAASPPPPSASAPATTPATPPPAASAAPPAPRASSTPPPPSAPAGAPPAPAASSPAPSAHGATDNSTGTPSSPPAGSSKDKNGAAFTVATGLASSFGTCIXCTPCLLSEVKWAAVEDSSKYVCVYV

SEQ ID NO: 33346 - protein, 169 aa, Zea mays subsp. mays
  peptide (1)..(169): Ceres Seq. ID no. 13494392
  misc_feature (13)..(117): Pfam Name: Pfam Description:  Extensin-like region
  misc_feature (1)..(104): NCBI GI NO: 34903678 NR Description: B1015E06.24
  misc_feature (1)..(118): NCBI GI NO: 34903678 NR Description: B1015E06.24
  misc_feature (1)..(118): NCBI GI NO: 15238868 NR Description: hypothetical protein [Arabidopsis thaliana]
  misc_feature (1)..(127): NCBI GI NO: 15234164 NR Description: expressed protein [Arabidopsis thaliana]
  misc_feature (1)..(127): NCBI GI NO: 21592865 NR Description: unknown [Arabidopsis thaliana]
  misc_feature (1)..(118): NCBI GI NO: 28396618 NR Description: phytocyanin protein, PUP2 [Arabidopsis thaliana]
  misc_feature (1)..(69): NCBI GI NO: 18402674 NR Description: plastocyanin-like domain containing protein
  misc_feature (1)..(55): NCBI GI NO: 21618177 NR Description: unknown [Arabidopsis thaliana]
  misc_feature (1)..(79): NCBI GI NO: 34908784 NR Description: P0415A04.29
  misc_feature (1)..(129): NCBI GI NO: 3914142 NR Description: EARLY NODULIN 20 PRECURSOR (N-20)
  misc_feature (144)..(144): Xaa is any aa, unknown or other
MVLAARSNGTGAPAPSTAPPPPAPASSAPPTPASPAPKGAPPTTAASPPPPSASAPATTPATPPPAASAAPPAPRASSTPPPPSAPAGAPPAPAASSPAPSAHGATDNSTGTPSSPPAGSSKDKNGAAFTVATGLASSFGTCIXCTPCLLSEVKWAAVEDSSKYVCVYV

SEQ ID NO: 33347 - protein, 161 aa, Zea mays subsp. mays
  peptide (1)..(161): Ceres Seq. ID no. 13494393
MAKPSSYGLALLACAAVAAAVAGGTQFTVGGAQWLERARRRRGALQCLGGEDEVSDRRRPSVRVPQGPRRGAAGGAGGLQRVQHVVVREEVRRRRHRGRARQRRPALLHQWRRGQLPRRREAHRHGPRRPQQRHRRAGSEHGAPASGSRQLRAAHAGVARS

SEQ ID NO: 33348 - DNA, 1662 bp, Zea mays subsp. mays
  misc_feature (1)..(1662): Ceres Seq. ID no. 12413861
acagtcaactgtgttctagacagttgagttcaaaaaggtgaggcggcgagatcgaatcaagcggagcggagcctacacatggcgatggcgctgcgtcggctgctgcttcctctcctcctcctcgtactcttaggtctgcggccgcagagctgcgtcgccagtggcggaggtggaggggagccggcggagttcgagatacctcgggacgggagcgtgctggagcttgacgagagcaacttcgaggcggcggtgcgcgcagccgaattcctcttcgtcgacttctacgctccctggtgcggccactgcaagcgcctcgccccgcagttagatgaggctgctgcagtgctagctggactgagcacgcccgtccttgtggctaaagtaaatgctgacaaatacaagaagctcggctctaaatatggagtagatgggttccctactttgatgttttttgaccatggagtgccctcggagtacacgggttcaaggaaggctgatgtgctagttgagaaccttaagaagcttgttgcacctgatgtttctgtccttgagtcggactcgtcaattaacggctttgttcaagcagctggcatcaattttccattgtttattgggtttggaatggatgagtcattgattgttgaatatggagcgaagtacaagaagaaggcatggttttcaacagcaaaggatttctctgaggatgtgatggttgtgtatgattttgacaaggttccagcgttggtttctgttaacccaaaatataatgagcagagtgtattctatggcccgtttgaaggaacttttctggaagattttataaggcaatccctactgcctgcaactgtgcccatcaatagagagacagtaaagctattgaaagatgatgggaggaaagttgttcttacaatcttggaggatgaatcagatgaaagctctctgcagctaataaaagtgttgaggtctgccgccaatgcaaaccatgatttagtgttcggatatgtgggagtcaaacagtgggaggagttcaccgagacttttgatgtgaaggtttcgcagctgccaaagattgttgtctgggacacaaaagaggagtacgaagtggttgagggttcagagagtttcatagaaggtgactatggatcccaagtcagtcgatttctagagggatatagggaaggaagaacaacaaagaagaaagtgggccgtggttccccaacactgctcggccttaacgcggtatacatcctcgtcctgttggtcgccgttctcgttgttttgatgtatttttccgcgcaaggcgaggaggatcatcagccaagaagagcccatgaggactgacagcaatctgagatggcttagattcaaggcgttgatccggaggctgccgagttatttttgaaggggggtaacatataacatctgatggacaaattttcctgatcttcatttcacgtgccctagggtcgagttttagatatttgttgcagagctatgcatgagctcccctgtgtttctcttgaacccttgaagtttttggacttgttacttgaggaccgggtttcctcaggtttatgtcattgtaattattcggcactttgtaacatagcattcatgtgttatatttgagacccttggagaaacgacttctatagattgaac

SEQ ID NO: 33349 - protein, 420 aa, Zea mays subsp. mays
  peptide (1)..(420): Ceres Seq. ID no. 12413862
  misc_feature (43)..(303): Pfam Name: Pfam Description:  Calsequestrin
  misc_feature (10)..(417): NCBI GI NO: 38344940 NR Description: OSJNBa0084A10.16
  misc_feature (43)..(417): NCBI GI NO: 8778373 NR Description: F15O4.20 [Arabidopsis thaliana]
  misc_feature (43)..(417): NCBI GI NO: 18399786 NR Description: protein disulfide isomerase, putative
  misc_feature (39)..(392): NCBI GI NO: 12025459 NR Description: protein disulfide isomerase [Bombyx mori]
  misc_feature (40)..(392): NCBI GI NO: 129731 NR Description: PROTEIN DISULFIDE ISOMERASE PRECURSOR
  misc_feature (46)..(392): NCBI GI NO: 202549 NR Description: iodothyronine 5' monodeiodinase
  misc_feature (36)..(382): NCBI GI NO: 27819775 NR Description: RH09122p [Drosophila melanogaster]
  misc_feature (40)..(364): NCBI GI NO: 20913929 NR Description: prolyl 4-hydroxylase, beta polypeptide
  misc_feature (31)..(364): NCBI GI NO: 27806501 NR Description: procollagen-proline, 2-oxoglutarate 4-dioxygenase
  misc_feature (25)..(364): NCBI GI NO: 30923135 NR Description: Protein disulfide isomerase precursor
MAMALRRLLLPLLLLVLLGLRPQSCVASGGGGGEPAEFEIPRDGSVLELDESNFEAAVRAAEFLFVDFYAPWCGHCKRLAPQLDEAAAVLAGLSTPVLVAKVNADKYKKLGSKYGVDGFPTLMFFDHGVPSEYTGSRKADVLVENLKKLVAPDVSVLESDSSINGFVQAAGINFPLFIGFGMDESLIVEYGAKYKKKAWFSTAKDFSEDVMVVYDFDKVPALVSVNPKYNEQSVFYGPFEGTFLEDFIRQSLLPATVPINRETVKLLKDDGRKVVLTILEDESDESSLQLIKVLRSAANANHDLVFGYVGVKQWEEFTETFDVKVSQLPKIVVWDTKEEYEVVEGSESFIEGDYGSQVSRFLEGYREGRTTKKKVGRGSPTLLGLNAVYILVLLVAVLVVLMYFSAQGEEDHQPRRAHED

SEQ ID NO: 33350 - protein, 418 aa, Zea mays subsp. mays
  peptide (1)..(418): Ceres Seq. ID no. 12413863
  misc_feature (41)..(301): Pfam Name: Pfam Description:  Calsequestrin
  misc_feature (8)..(415): NCBI GI NO: 38344940 NR Description: OSJNBa0084A10.16
  misc_feature (41)..(415): NCBI GI NO: 8778373 NR Description: F15O4.20 [Arabidopsis thaliana]
  misc_feature (41)..(415): NCBI GI NO: 18399786 NR Description: protein disulfide isomerase, putative
  misc_feature (37)..(390): NCBI GI NO: 12025459 NR Description: protein disulfide isomerase [Bombyx mori]
  misc_feature (38)..(390): NCBI GI NO: 129731 NR Description: PROTEIN DISULFIDE ISOMERASE PRECURSOR
  misc_feature (44)..(390): NCBI GI NO: 202549 NR Description: iodothyronine 5' monodeiodinase
  misc_feature (34)..(380): NCBI GI NO: 27819775 NR Description: RH09122p [Drosophila melanogaster]
  misc_feature (38)..(362): NCBI GI NO: 20913929 NR Description: prolyl 4-hydroxylase, beta polypeptide
  misc_feature (29)..(362): NCBI GI NO: 27806501 NR Description: procollagen-proline, 2-oxoglutarate 4-dioxygenase
  misc_feature (23)..(362): NCBI GI NO: 30923135 NR Description: Protein disulfide isomerase precursor
MALRRLLLPLLLLVLLGLRPQSCVASGGGGGEPAEFEIPRDGSVLELDESNFEAAVRAAEFLFVDFYAPWCGHCKRLAPQLDEAAAVLAGLSTPVLVAKVNADKYKKLGSKYGVDGFPTLMFFDHGVPSEYTGSRKADVLVENLKKLVAPDVSVLESDSSINGFVQAAGINFPLFIGFGMDESLIVEYGAKYKKKAWFSTAKDFSEDVMVVYDFDKVPALVSVNPKYNEQSVFYGPFEGTFLEDFIRQSLLPATVPINRETVKLLKDDGRKVVLTILEDESDESSLQLIKVLRSAANANHDLVFGYVGVKQWEEFTETFDVKVSQLPKIVVWDTKEEYEVVEGSESFIEGDYGSQVSRFLEGYREGRTTKKKVGRGSPTLLGLNAVYILVLLVAVLVVLMYFSAQGEEDHQPRRAHED

SEQ ID NO: 33351 - protein, 298 aa, Zea mays subsp. mays
  peptide (1)..(298): Ceres Seq. ID no. 12413864
  misc_feature (1)..(181): Pfam Name: Pfam Description:  Calsequestrin
  misc_feature (1)..(295): NCBI GI NO: 38344940 NR Description: OSJNBa0084A10.16
  misc_feature (1)..(295): NCBI GI NO: 8778373 NR Description: F15O4.20 [Arabidopsis thaliana]
  misc_feature (1)..(295): NCBI GI NO: 18399786 NR Description: protein disulfide isomerase, putative
  misc_feature (1)..(270): NCBI GI NO: 12025459 NR Description: protein disulfide isomerase [Bombyx mori]
  misc_feature (1)..(270): NCBI GI NO: 129731 NR Description: PROTEIN DISULFIDE ISOMERASE PRECURSOR
  misc_feature (1)..(270): NCBI GI NO: 202549 NR Description: iodothyronine 5' monodeiodinase
  misc_feature (1)..(260): NCBI GI NO: 27819775 NR Description: RH09122p [Drosophila melanogaster]
  misc_feature (1)..(242): NCBI GI NO: 20913929 NR Description: prolyl 4-hydroxylase, beta polypeptide
  misc_feature (1)..(242): NCBI GI NO: 27806501 NR Description: procollagen-proline, 2-oxoglutarate 4-dioxygenase
  misc_feature (1)..(242): NCBI GI NO: 30923135 NR Description: Protein disulfide isomerase precursor
MFFDHGVPSEYTGSRKADVLVENLKKLVAPDVSVLESDSSINGFVQAAGINFPLFIGFGMDESLIVEYGAKYKKKAWFSTAKDFSEDVMVVYDFDKVPALVSVNPKYNEQSVFYGPFEGTFLEDFIRQSLLPATVPINRETVKLLKDDGRKVVLTILEDESDESSLQLIKVLRSAANANHDLVFGYVGVKQWEEFTETFDVKVSQLPKIVVWDTKEEYEVVEGSESFIEGDYGSQVSRFLEGYREGRTTKKKVGRGSPTLLGLNAVYILVLLVAVLVVLMYFSAQGEEDHQPRRAHED

SEQ ID NO: 33352 - DNA, 1653 bp, Zea mays subsp. mays
  misc_feature (1)..(1653): Ceres Seq. ID no. 13493002
actgttcaaacaaaccctccactgccctccccactctccccttcaccgcgccgcactcccaagtcccaacaggcctaaatggcggcggccggaacaattcccggcgccgccgcagccattggcgcttctgtgtcccaacgccaacgtcgcgtcggcgctccttctttcgtagctgcctacgtctccgagggcacccgcctcgtctgccggaggcagctccgtccggctccggtcctcgcttcttccttcatctccctttctcatccagcgaggcggcggttcctctgcgatgctgcggccggagcctcctcaggtcccgctggagaagccaagccccagggatttgcagagagatacccagctcttgtcacaggtttcttcttcttcttgtggtattttctgaatgtaatatttaacatcctcaacaagaagatcttcgactacttcccctatccatattttgtgtcagtgagccatctttttattggagtactatacttccttattggctggagcttcggcatcccaaagcgcgcgccaatcaactcaacacttctgaagcagcttgttccagttgcggtttgccatgccattggccatgtaacaagcactgtgtcatttgctgctgtagctgtgtcatttgcccacactattaaagctctcgagccattcttcaatgcggctgcttcccagtttatccttggacaaccagttccattgacactctggctgtctcttgttccagtggtgattggtgtctcggtagcatccctcactgaactctcatttaattggactggcttcattaatgccatgatctcaaatatttctttcacctaccgaagcatctattctaagaaggctatgactgacatggatagtaccaacttgtatgcatacatatcaataattgctctctttgtctgcatcccccctgcaattattattgaaggacctcaattagtgcagcatggttttaaagatgcaattgccaaagttggattaacaaagttgatttctaatttttttgtggtgggcttattctatcacctttataaccaggttgctacaaacacattggagcgggtagcccctttaacacatgccatcggcaatgtgttgaaacgtgttttcgtcattggcttttccatcatcgcattcggcaacaagatcaccacacagactggaattggcacttccattgctgtttctggtgttgccctctactcatttataaaggctaagattgaggagaaaaagcaaataaagagtgcataaggtgttggctgatgtggatgcggttggtttgtcgctttgatggacctctattctctcggtgaacgaacaaacttgcaagatggataaaatcttgctatctcctagtacatttgattgttattcccagtctggtactgaggtgtgcggttgttgttggctaacttgtttatttgaagcaaatttgagcaatgctcagtggcatggaatttccatttctgttttccttcgctcatttattctgacttgacatggtgctattgtaatcttaagcagtagtgtctctagaatgttttccccaaggagatttcagtaccaaatttgaacaatcctcaaactagaaattttgatttccatgcaccccactcagcaattctg

SEQ ID NO: 33353 - protein, 399 aa, Zea mays subsp. mays
  peptide (1)..(399): Ceres Seq. ID no. 13493003
  misc_feature (1)..(399): NCBI GI NO: 1352200 NR Description: TRIOSE PHOSPHATE/PHOSPHATE TRANSLOCATOR
  misc_feature (1)..(399): NCBI GI NO: 13195734 NR Description: triose phosphate translocator [Triticum aestivum]
  misc_feature (32)..(399): NCBI GI NO: 13518113 NR Description: triose phosphate/phosphate translocator
  misc_feature (7)..(398): NCBI GI NO: 9757731 NR Description: phosphate/triose-phosphate translocator precursor
  misc_feature (7)..(399): NCBI GI NO: 21593093 NR Description: phosphate/triose-phosphate translocator precursor
  misc_feature (35)..(398): NCBI GI NO: 117291 NR Description: TRIOSE PHOSPHATE/PHOSPHATE TRANSLOCATOR
  misc_feature (7)..(399): NCBI GI NO: 30694881 NR Description: phosphate/triose-phosphate translocator, putative
  misc_feature (11)..(399): NCBI GI NO: 9295273 NR Description: triose phosphate/phosphate translocator precursor
  misc_feature (35)..(399): NCBI GI NO: 117290 NR Description: TRIOSE PHOSPHATE/PHOSPHATE TRANSLOCATOR
  misc_feature (104)..(399): NCBI GI NO: 30694885 NR Description: phosphate/triose-phosphate translocator, putative
MAAAGTIPGAAAAIGASVSQRQRRVGAPSFVAAYVSEGTRLVCRRQLRPAPVLASSFISLSHPARRRFLCDAAAGASSGPAGEAKPQGFAERYPALVTGFFFFLWYFLNVIFNILNKKIFDYFPYPYFVSVSHLFIGVLYFLIGWSFGIPKRAPINSTLLKQLVPVAVCHAIGHVTSTVSFAAVAVSFAHTIKALEPFFNAAASQFILGQPVPLTLWLSLVPVVIGVSVASLTELSFNWTGFINAMISNISFTYRSIYSKKAMTDMDSTNLYAYISIIALFVCIPPAIIIEGPQLVQHGFKDAIAKVGLTKLISNFFVVGLFYHLYNQVATNTLERVAPLTHAIGNVLKRVFVIGFSIIAFGNKITTQTGIGTSIAVSGVALYSFIKAKIEEKKQIKSA

SEQ ID NO: 33354 - DNA, 1531 bp, Zea mays subsp. mays
  misc_feature (1)..(1531): Ceres Seq. ID no. 12405655
attaacggagtcaggcccaggcctaacctcagttcatccgagcagccgaacacgcccgccgccattctacgccctgctgcccaggtcggacggaccctttgccggagacgagcacacgccacagcaggaattatcgggcgtagagcagcgcgaagcgagagatccaatggcggcggcggaggggcagtgggtgctcatggcaacggggcggacgccgactaacattgcggtgatcaagtactgggggaagcgggacgaggcgctcatcctccccatcaacgacagcatcagcgtaacgctcgaccctgaccatctctccgccaccaccactgtcgccgtcagcccctcattcccttccgaccgcatgtggctcaatggcaaggagatctcgctattaggaggaaggtttcagagctgcctcagagaaatcagaaagcgtgctcgtgactttgaggacaaggagaagggcgtcaagatcaagaaagaggactgggacaagttgcatgttcacatagcctcgtacaacaacttccccactgctgctggtttggcctcttcggctgctggccttgcctgtttcgttttcacccttggaaagctgatgaatgtgaaagaagattatggagaactttcttcaatagcaaggcagggatctgggagtgcatgccgcagtatatatggtggttttgtgaaatggtgcatgggagaaaaagatgatggaagtgacagtattgccgtgcagcttgctgacgaaacacactggaatgatcttgtaattattattgcagtggtcagttcaaagcagaaggaaaccagtagcaccagtgggatgcgagatagtgttgaaacaagtcctctcttgcagtacagggcccagacagtggtgccaggtcgggtgttgaaaatggaagaagctatcaagaaccgtgactttgaatcatttgccaaattaacttgtgcagatagcaaccagtttcatgctgtatgcttagacacgagccctcccatcttctatatgaatgacacgtcacaccggataattagccttgtggaaaaatggaaccactcagaaggaaccccacaggtcgcttacaccttcgatgctgggccaaacgctgttctaatcgcccaaaaccgtaaaactgcagcacatttcctccagaagctcctatactatttccctccacaggataatgatttgagcagctatctggttggcgataaatcaattctaggtgacgccggattgcattccatgaaagacgtcgaggctcttccagcacctccagatacgaagataccggatcagaaattcaagggcgatgttagctacttcatctgcagcaggcttggggcaggtccaaaggttgttgttgacgaaggtcaagcactgatcgattcagtcaccggacttccaaaaggcgtgtagttctagatttaggttggaataatggtttaagctggggattaaagacaatggtatcatacaagcaacctgggccggccaataaagatagaacacgttctcgcc

SEQ ID NO: 33355 - protein, 475 aa, Zea mays subsp. mays
  peptide (1)..(475): Ceres Seq. ID no. 12405656
  misc_feature (63)..(473): NCBI GI NO: 16417950 NR Description: mevalonate disphosphate decarboxylase
  misc_feature (59)..(473): NCBI GI NO: 18410026 NR Description: DIPHOSPHOMEVALONATE DECARBOXYLASE - like protein
  misc_feature (59)..(473): NCBI GI NO: 21593243 NR Description: diphosphomevalonate decarboxylase-like protein
  misc_feature (59)..(473): NCBI GI NO: 15224931 NR Description: mevalonate diphosphate decarboxylase
  misc_feature (59)..(473): NCBI GI NO: 11281655 NR Description: diphosphomevalonate decarboxylase (EC 4
  misc_feature (66)..(473): NCBI GI NO: 21593039 NR Description: mevalonate diphosphate decarboxylase
  misc_feature (58)..(473): NCBI GI NO: 20149736 NR Description: mevalonate
  misc_feature (58)..(473): NCBI GI NO: 26354448 NR Description: unnamed protein product [Mus musculus]
  misc_feature (61)..(472): NCBI GI NO: 39645379 NR Description: Unknown (protein for IMAGE:5307745)
  misc_feature (58)..(473): NCBI GI NO: 23814095 NR Description: Diphosphomevalonate decarboxylase
LTESGPGLTSVHPSSRTRPPPFYALLPRSDGPFAGDEHTPQQELSGVEQREARDPMAAAEGQWVLMATGRTPTNIAVIKYWGKRDEALILPINDSISVTLDPDHLSATTTVAVSPSFPSDRMWLNGKEISLLGGRFQSCLREIRKRARDFEDKEKGVKIKKEDWDKLHVHIASYNNFPTAAGLASSAAGLACFVFTLGKLMNVKEDYGELSSIARQGSGSACRSIYGGFVKWCMGEKDDGSDSIAVQLADETHWNDLVIIIAVVSSKQKETSSTSGMRDSVETSPLLQYRAQTVVPGRVLKMEEAIKNRDFESFAKLTCADSNQFHAVCLDTSPPIFYMNDTSHRIISLVEKWNHSEGTPQVAYTFDAGPNAVLIAQNRKTAAHFLQKLLYYFPPQDNDLSSYLVGDKSILGDAGLHSMKDVEALPAPPDTKIPDQKFKGDVSYFICSRLGAGPKVVVDEGQALIDSVTGLPKGV

SEQ ID NO: 33356 - protein, 420 aa, Zea mays subsp. mays
  peptide (1)..(420): Ceres Seq. ID no. 12405657
  misc_feature (8)..(418): NCBI GI NO: 16417950 NR Description: mevalonate disphosphate decarboxylase
  misc_feature (4)..(418): NCBI GI NO: 18410026 NR Description: DIPHOSPHOMEVALONATE DECARBOXYLASE - like protein
  misc_feature (4)..(418): NCBI GI NO: 21593243 NR Description: diphosphomevalonate decarboxylase-like protein
  misc_feature (4)..(418): NCBI GI NO: 15224931 NR Description: mevalonate diphosphate decarboxylase
  misc_feature (4)..(418): NCBI GI NO: 11281655 NR Description: diphosphomevalonate decarboxylase (EC 4
  misc_feature (11)..(418): NCBI GI NO: 21593039 NR Description: mevalonate diphosphate decarboxylase
  misc_feature (3)..(418): NCBI GI NO: 20149736 NR Description: mevalonate
  misc_feature (3)..(418): NCBI GI NO: 26354448 NR Description: unnamed protein product [Mus musculus]
  misc_feature (6)..(417): NCBI GI NO: 39645379 NR Description: Unknown (protein for IMAGE:5307745)
  misc_feature (3)..(418): NCBI GI NO: 23814095 NR Description: Diphosphomevalonate decarboxylase
MAAAEGQWVLMATGRTPTNIAVIKYWGKRDEALILPINDSISVTLDPDHLSATTTVAVSPSFPSDRMWLNGKEISLLGGRFQSCLREIRKRARDFEDKEKGVKIKKEDWDKLHVHIASYNNFPTAAGLASSAAGLACFVFTLGKLMNVKEDYGELSSIARQGSGSACRSIYGGFVKWCMGEKDDGSDSIAVQLADETHWNDLVIIIAVVSSKQKETSSTSGMRDSVETSPLLQYRAQTVVPGRVLKMEEAIKNRDFESFAKLTCADSNQFHAVCLDTSPPIFYMNDTSHRIISLVEKWNHSEGTPQVAYTFDAGPNAVLIAQNRKTAAHFLQKLLYYFPPQDNDLSSYLVGDKSILGDAGLHSMKDVEALPAPPDTKIPDQKFKGDVSYFICSRLGAGPKVVVDEGQALIDSVTGLPKGV

SEQ ID NO: 33357 - protein, 410 aa, Zea mays subsp. mays
  peptide (1)..(410): Ceres Seq. ID no. 12405658
  misc_feature (1)..(408): NCBI GI NO: 16417950 NR Description: mevalonate disphosphate decarboxylase
  misc_feature (1)..(408): NCBI GI NO: 18410026 NR Description: DIPHOSPHOMEVALONATE DECARBOXYLASE - like protein
  misc_feature (1)..(408): NCBI GI NO: 21593243 NR Description: diphosphomevalonate decarboxylase-like protein
  misc_feature (1)..(408): NCBI GI NO: 15224931 NR Description: mevalonate diphosphate decarboxylase
  misc_feature (1)..(408): NCBI GI NO: 11281655 NR Description: diphosphomevalonate decarboxylase (EC 4
  misc_feature (1)..(408): NCBI GI NO: 21593039 NR Description: mevalonate diphosphate decarboxylase
  misc_feature (1)..(408): NCBI GI NO: 20149736 NR Description: mevalonate
  misc_feature (1)..(408): NCBI GI NO: 26354448 NR Description: unnamed protein product [Mus musculus]
  misc_feature (1)..(407): NCBI GI NO: 39645379 NR Description: Unknown (protein for IMAGE:5307745)
  misc_feature (1)..(408): NCBI GI NO: 23814095 NR Description: Diphosphomevalonate decarboxylase
MATGRTPTNIAVIKYWGKRDEALILPINDSISVTLDPDHLSATTTVAVSPSFPSDRMWLNGKEISLLGGRFQSCLREIRKRARDFEDKEKGVKIKKEDWDKLHVHIASYNNFPTAAGLASSAAGLACFVFTLGKLMNVKEDYGELSSIARQGSGSACRSIYGGFVKWCMGEKDDGSDSIAVQLADETHWNDLVIIIAVVSSKQKETSSTSGMRDSVETSPLLQYRAQTVVPGRVLKMEEAIKNRDFESFAKLTCADSNQFHAVCLDTSPPIFYMNDTSHRIISLVEKWNHSEGTPQVAYTFDAGPNAVLIAQNRKTAAHFLQKLLYYFPPQDNDLSSYLVGDKSILGDAGLHSMKDVEALPAPPDTKIPDQKFKGDVSYFICSRLGAGPKVVVDEGQALIDSVTGLPKGV

SEQ ID NO: 33358 - DNA, 1523 bp, Zea mays subsp. mays
  misc_feature (1)..(1523): Ceres Seq. ID no. 12381293
atcgtggcctcatctcgcgctcaagctgctccccgtagtcccattgagaccaacggcagcgcgcgcgttcgtgtacgtttatattatttttttataagggagcaagagggctcggcggcagcggcgacggcgaccgcgacggcagtggcagtggcagtggcaggctgtcagccgtccctatcttgtgtgtcaagcgcgaactccctatctcgtgtgtcaagcgcgttcgcgtgcgttctaggcacaggcagccgaggcgagccccttccgctcagtggccgccgccggaccgtggacgcagctagcccatcagcccatggcagggacggacgtcgcaggctccgcacgcggctccgatgccgcgctcgggaagacgggcgaaccacccgccgcggcgcgctctggcgcagccaagaaggtggctctcgctctgctagcctccttctcggcgctgctgtacagccagattcagccgccgccgtctaagatccccggcatgccgggcgggcctccggtcacggcgcccagaacaaggctcaaggacggccggcacttggcgtacctggaatctggcgtcccaaaggagaaggccaagtacaagatcatattcgttcacggcttcgactgctgtagatacgacgtgctgaatgtctcccaggggctgttggaagagctgggaatctacctgttgtccttcgaccggccccgggtacgccgagagcgacgcccacccggcccggacagagaagagcatcgcccttgacatcgcggagctggcggacaatctccagctcggccccaagttccatctcatcggcttctccatgggcggcgagatcatgtggagctgcctcaagtacatcccgcacaggctcgccggcgtggcgattcttgccccggtgggcaactactggtggtccggcttcccgccggacgtgttcaaggaggcgtggcgcgtgcagtttccgcaagaccagcgcgcggtctgggtcgctcaccacctgccgtggctgacgcactggtggaacacccagaagctgttccgcggatccagcgtcaaggacggcgaccctgccatgctatccaaggaggacaggcttgtagctgacaagttcgagaagcgaacctatgagaagcaggtcagacagcagggagagcacgactcgctccaccgcgacatgatggtcggtttcgggaagtgggactggagcccgctggagatggagaacccgttcgccggcggcctagacgaggtgaaggtgcacctgtggcacggcgtcgaggacctctacgtgccggttcaactgtcgcggtacatcagcgagaggctcccatgggtcatctaccatgagctcccgacggccggccacctcttcccggtcgccgacggcatgcccgacgctatcgtcaggtcgcttctgctcggagatgagtgatcagtatttaggatgcgcggatccaggacttgtgcactttttgcagcttcatcagtaataaaaatacactcggaggtcgagatctgt

SEQ ID NO: 33359 - protein, 262 aa, Zea mays subsp. mays
  peptide (1)..(262): Ceres Seq. ID no. 12381294
  misc_feature (20)..(256): Pfam Name: Pfam Description:  alpha/beta hydrolase fold
  misc_feature (20)..(262): NCBI GI NO: 38346334 NR Description: OSJNBa0073L04.5
  misc_feature (20)..(261): NCBI GI NO: 18404095 NR Description: expressed protein; protein id: At2g36290
  misc_feature (20)..(261): NCBI GI NO: 28416665 NR Description: At2g36290 [Arabidopsis thaliana]
  misc_feature (20)..(262): NCBI GI NO: 18410575 NR Description: expressed protein; protein id: At1g74280
  misc_feature (20)..(262): NCBI GI NO: 21537089 NR Description: unknown [Arabidopsis thaliana]
  misc_feature (20)..(262): NCBI GI NO: 15228377 NR Description: putative protein; protein id: At3g48410
  misc_feature (20)..(258): NCBI GI NO: 21592662 NR Description: unknown [Arabidopsis thaliana]
  misc_feature (20)..(258): NCBI GI NO: 18410582 NR Description: expressed protein; protein id: At1g74300
  misc_feature (20)..(261): NCBI GI NO: 15221193 NR Description: unknown protein; protein id: At1g74290.1
  misc_feature (21)..(262): NCBI GI NO: 34908462 NR Description: P0683F02.22
MSPRGCWKSWESTCCPSTGPGYAESDAHPARTEKSIALDIAELADNLQLGPKFHLIGFSMGGEIMWSCLKYIPHRLAGVAILAPVGNYWWSGFPPDVFKEAWRVQFPQDQRAVWVAHHLPWLTHWWNTQKLFRGSSVKDGDPAMLSKEDRLVADKFEKRTYEKQVRQQGEHDSLHRDMMVGFGKWDWSPLEMENPFAGGLDEVKVHLWHGVEDLYVPVQLSRYISERLPWVIYHELPTAGHLFPVADGMPDAIVRSLLLGDE

SEQ ID NO: 33360 - protein, 203 aa, Zea mays subsp. mays; identical to SEQ ID NO: 24089
  peptide (1)..(203): Ceres Seq. ID no. 12381295
  misc_feature (1)..(197): Pfam Name: Pfam Description:  alpha/beta hydrolase fold
  misc_feature (1)..(203): NCBI GI NO: 38346334 NR Description: OSJNBa0073L04.5
  misc_feature (1)..(202): NCBI GI NO: 18404095 NR Description: expressed protein; protein id: At2g36290
  misc_feature (1)..(202): NCBI GI NO: 28416665 NR Description: At2g36290 [Arabidopsis thaliana]
  misc_feature (1)..(203): NCBI GI NO: 18410575 NR Description: expressed protein; protein id: At1g74280
  misc_feature (1)..(203): NCBI GI NO: 21537089 NR Description: unknown [Arabidopsis thaliana]
  misc_feature (1)..(203): NCBI GI NO: 15228377 NR Description: putative protein; protein id: At3g48410
  misc_feature (1)..(199): NCBI GI NO: 21592662 NR Description: unknown [Arabidopsis thaliana]
  misc_feature (1)..(199): NCBI GI NO: 18410582 NR Description: expressed protein; protein id: At1g74300
  misc_feature (1)..(202): NCBI GI NO: 15221193 NR Description: unknown protein; protein id: At1g74290.1
  misc_feature (1)..(203): NCBI GI NO: 34908462 NR Description: P0683F02.22

SEQ ID NO: 33361 - protein, 198 aa, Zea mays subsp. mays
  peptide (1)..(198): Ceres Seq. ID no. 12381296
  misc_feature (1)..(192): Pfam Name: Pfam Description:  alpha/beta hydrolase fold
  misc_feature (1)..(198): NCBI GI NO: 38346334 NR Description: OSJNBa0073L04.5
  misc_feature (1)..(197): NCBI GI NO: 18404095 NR Description: expressed protein; protein id: At2g36290
  misc_feature (1)..(197): NCBI GI NO: 28416665 NR Description: At2g36290 [Arabidopsis thaliana]
  misc_feature (1)..(198): NCBI GI NO: 18410575 NR Description: expressed protein; protein id: At1g74280
  misc_feature (1)..(198): NCBI GI NO: 21537089 NR Description: unknown [Arabidopsis thaliana]
  misc_feature (1)..(198): NCBI GI NO: 15228377 NR Description: putative protein; protein id: At3g48410
  misc_feature (1)..(194): NCBI GI NO: 21592662 NR Description: unknown [Arabidopsis thaliana]
  misc_feature (1)..(194): NCBI GI NO: 18410582 NR Description: expressed protein; protein id: At1g74300
  misc_feature (1)..(197): NCBI GI NO: 15221193 NR Description: unknown protein; protein id: At1g74290.1
  misc_feature (1)..(198): NCBI GI NO: 34908462 NR Description: P0683F02.22
MWSCLKYIPHRLAGVAILAPVGNYWWSGFPPDVFKEAWRVQFPQDQRAVWVAHHLPWLTHWWNTQKLFRGSSVKDGDPAMLSKEDRLVADKFEKRTYEKQVRQQGEHDSLHRDMMVGFGKWDWSPLEMENPFAGGLDEVKVHLWHGVEDLYVPVQLSRYISERLPWVIYHELPTAGHLFPVADGMPDAIVRSLLLGDE

SEQ ID NO: 33362 - DNA, 1505 bp, Zea mays subsp. mays
  misc_feature (1)..(1505): Ceres Seq. ID no. 12381259
atctctctctctctctcttcctgcgcccacacgcacgtttccactccgaccgggccagagccccgccgggcagtttccgttcgctgttgcgatccacctcctgcctgcacatcccctcccccgagttcgagccggagggccgaatagtagatctgcggcggcggcggccagaggatggccgtcaactgggagctgcggggctgctgcgaccacgaccagaggatcttcatcgccgccgtcggcgtctccaccgtcgtcatcctcctcctctggaggacgttcctgctcacgccgttcaagctcatcaccgtcttcctccacgagaccagccacgcgcttgcctgcaagctcacttgcggcgatgtagaaggcatgcaggtccatgcgaatgagggtggcgttactcaaacccggggtggcatatattggataatcttgccccgctggatatctgggttcatcattttggggaatggtcttcatacttgcatccacaaatctccttactacaagaattgcagcgggttgtttcatacttgcgttgtttattgttctttttgttgcagaaaattggtttcttcgctggctctgccttggattcattgtgttcattgctgttgtttgggtcatacaagaatttacatctttccatattctgaaatatgtgatcttattcataggtgagacggaagatgtcgtacaatcatgtcctctttattttaatttctggaatgcaaattgtatgcttgaaatttaatctttatgtttatttatgtgcaacaggtgtgatgaacagcttattttcagtttacggtaaagaaaccaaaaaaaaaacatttttcttgttattccatgttagaataatccatgtgttactctcaatgaaatattctcaaattatatagatatttatgatgacttgatatcccgaagagttaacacaagtgatgctgaaaagtttgctgaaatctgcccttgcccctgcaatggttttgcatggggtgttatatggtctgctccaagtttcgatagttatatttttctgtataccttgatggtgtgttaagatattcctgatgtaacgacaccaatggtaacgttttctgttctttgtttcaggggattcatctcgtttatctttctctgcgcttcaatataccttggactggtcatattgtcttgagggttcgccattttgatctgacaatctactctgattggctttttcgaagcttcgttgctcgaggttttggttcaagcttacatggttctggtggttgtacagtatacatgtgcagggtaaacatgtacatccattataagttaatttgttggggattattcatgggattcttcgattttagtggttctatagagtaccattttacttaccattaccagttgcatttatggtctgtagcctcttcaatttatgtacctgtatatcatatattgctcatttatccatttcaaaatgtattcagagatgcaatattgtgcatctt

SEQ ID NO: 33363 - protein, 169 aa, Zea mays subsp. mays
  peptide (1)..(169): Ceres Seq. ID no. 12381260
  misc_feature (4)..(102): NCBI GI NO: 15219816 NR Description: hypothetical protein; protein id: At1g67060.1
  misc_feature (1)..(99): NCBI GI NO: 23619420 NR Description: hypothetical protein, conserved
  misc_feature (4)..(64): NCBI GI NO: 26449599 NR Description: unknown protein [Arabidopsis thaliana]
MAVNWELRGCCDHDQRIFIAAVGVSTVVILLLWRTFLLTPFKLITVFLHETSHALACKLTCGDVEGMQVHANEGGVTQTRGGIYWIILPRWISGFIILGNGLHTCIHKSPYYKNCSGLFHTCVVYCSFCCRKLVSSLALPWIHCVHCCCLGHTRIYIFPYSEICDLIHR

SEQ ID NO: 33364 - protein, 129 aa, Zea mays subsp. mays
  peptide (1)..(129): Ceres Seq. ID no. 12381261
LSLSLFLRPHARFHSDRARAPPGSFRSLLRSTSCLHIPSPEFEPEGRIVDLRRRRPEDGRQLGAAGLLRPRPEDLHRRRRRLHRRHPPPLEDVPAHAVQAHHRLPPRDQPRACLQAHLRRCRRHAGPCE

SEQ ID NO: 33365 - protein, 121 aa, Zea mays subsp. mays
  peptide (1)..(121): Ceres Seq. ID no. 12381262
  misc_feature (61)..(120): Pfam Name: Pfam Description:  Lipoprotein amino terminal region
SLSLSLPAPTRTFPLRPGQSPAGQFPFAVAIHLLPAHPLPRVRAGGPNSRSAAAAARGWPSTGSCGAAATTTRGSSSPPSASPPSSSSSSGGRSCSRRSSSSPSSSTRPATRLPASSLAAM

SEQ ID NO: 33366 - DNA, 1976 bp, Zea mays subsp. mays
  misc_feature (1)..(1976): Ceres Seq. ID no. 12358191
tgcgggatccaaatgaacatttaaatttgttaattatttttttgttctatgatcctattcatagttcactatgctcaagtaattttgaggctgcaagttatggacacatgttaccatatatccaaggaggaacataaatatcaatctttttcaatgtgatagtggtttgaaaccattgcatttgtacttttaccgtgagagtccatagcttttgtgataaacatgttttcagaagcctggccaagaaaagttgatattattctagtattctagcaggactgtgctagcagtattctaggctattgcagatttctgactaaaacattaggtgtatatccttagatattcacattgaatacaggtaaatcacatttgatgcaggagatggattatagagaagaagcaagaaatggacttaagttcagagaattgtttgggaaatttagagatgtgtcggttcctgaaatgtatctggaacagacaagaaggcgagtccttatcatggaatggatcgagggggaaaagttatcagaagtcagagatcaatatttggttgaggttggagtatattgttcactttcacagctattagaatatggattctatcatgcagatccacaccctggaaatcttttgcgtacagttgatgggaaattagcctacttagattttgggatgatgggagaattccgacaagaacttcgtgatggatttattgaagcttgtcttcatcttgttaaccgtgattttgatgctttagcaaaagactttgtaacccttggtttacttcctccaactgcccagaaaggtgaagtcacaaaggcattgacaggtgtatttgagaatgctgttaacagaggagttcagaatataagctttggagatctgtcaggaaatcttggacgaacaatgtataaattcaagttccagataccgtcttacttttcccttgtaattcgaagccttgctgttttagaaggtatcgcaatcagcttcaatccaaagtataaagttctggggagttcatatccatggattgcaagaaaagttctcactgacagttcgccaaagcttcgatcaactttgcagactcttctttataaggatggcactttccaaattgatcgcctggaatctttgttaactgagtcacttcgtgcaagaacagagcaatcattggtcagaaatgaacaagatgtcgacagtacgagatatgcaattaagcaagtcttgtcattcacactcgctgaccagggtgcctttgtgaaggacttacttcttcaggagattgctaagggaatagatgcacttggtgtagccacattaagttctgcaacgtctgcagcagcctccagattgccattcggtggtggaccatccccattgacctcactagatgacgaagatgccacaaacttaagaaatctgtatcgcctgctcctacttttatctaaggtttctcagaaggaaaatccatctccaattcctgaatataacagtgccatagagaaggaaggtggtagcacggatgaacttgctcttgcgctgtatggaatgacctctctgccagaatttcttccagttctttctgtcattcctgagcttccaccggagtcccaacagcagttgcttcttctgccagcggatttaaccaatcgtattttatctcgggctctcgcgagaaccattagaagactcatgtaaagccataggtgcagaaattttcggtccctgcttaatttttattttactattctttttggttcactgctagaagatggggatttttttagcatctcatctacaacccaagatcaatcccttttttgttatctacgattactatgtacatattgttcaaactaaagcaggcattgtaaatggcccatgttgttatgcacatatggtgtaactgataaactttaaatatatgtgaacatagaaataattctgtaatgcaatttgcctcgaaagcg

SEQ ID NO: 33367 - protein, 442 aa, Zea mays subsp. mays
  peptide (1)..(442): Ceres Seq. ID no. 12358192
  misc_feature (1)..(441): NCBI GI NO: 38344898 NR Description: OSJNBb0079B02.1
  misc_feature (1)..(441): NCBI GI NO: 18409920 NR Description: expressed protein; protein id: At1g71810
  misc_feature (1)..(243): NCBI GI NO: 19698835 NR Description: unknown protein [Arabidopsis thaliana]
  misc_feature (224)..(441): NCBI GI NO: 19698835 NR Description: unknown protein [Arabidopsis thaliana]
  misc_feature (1)..(179): NCBI GI NO: 25406121 NR Description: hypothetical protein F14O23.19
  misc_feature (307)..(441): NCBI GI NO: 25406121 NR Description: hypothetical protein F14O23.19
  misc_feature (197)..(294): NCBI GI NO: 25406121 NR Description: hypothetical protein F14O23.19
  misc_feature (1)..(355): NCBI GI NO: 23042448 NR Description: hypothetical protein
  misc_feature (1)..(358): NCBI GI NO: 23126214 NR Description: hypothetical protein [Nostoc punctiforme]
  misc_feature (1)..(332): NCBI GI NO: 16331408 NR Description: ABC1-like [Synechocystis sp. PCC 6803]
MQEMDYREEARNGLKFRELFGKFRDVSVPEMYLEQTRRRVLIMEWIEGEKLSEVRDQYLVEVGVYCSLSQLLEYGFYHADPHPGNLLRTVDGKLAYLDFGMMGEFRQELRDGFIEACLHLVNRDFDALAKDFVTLGLLPPTAQKGEVTKALTGVFENAVNRGVQNISFGDLSGNLGRTMYKFKFQIPSYFSLVIRSLAVLEGIAISFNPKYKVLGSSYPWIARKVLTDSSPKLRSTLQTLLYKDGTFQIDRLESLLTESLRARTEQSLVRNEQDVDSTRYAIKQVLSFTLADQGAFVKDLLLQEIAKGIDALGVATLSSATSAAASRLPFGGGPSPLTSLDDEDATNLRNLYRLLLLLSKVSQKENPSPIPEYNSAIEKEGGSTDELALALYGMTSLPEFLPVLSVIPELPPESQQQLLLLPADLTNRILSRALARTIRRLM

SEQ ID NO: 33368 - protein, 439 aa, Zea mays subsp. mays
  peptide (1)..(439): Ceres Seq. ID no. 12358193
  misc_feature (1)..(438): NCBI GI NO: 38344898 NR Description: OSJNBb0079B02.1
  misc_feature (1)..(438): NCBI GI NO: 18409920 NR Description: expressed protein; protein id: At1g71810
  misc_feature (1)..(240): NCBI GI NO: 19698835 NR Description: unknown protein [Arabidopsis thaliana]
  misc_feature (221)..(438): NCBI GI NO: 19698835 NR Description: unknown protein [Arabidopsis thaliana]
  misc_feature (1)..(176): NCBI GI NO: 25406121 NR Description: hypothetical protein F14O23.19
  misc_feature (304)..(438): NCBI GI NO: 25406121 NR Description: hypothetical protein F14O23.19
  misc_feature (194)..(291): NCBI GI NO: 25406121 NR Description: hypothetical protein F14O23.19
  misc_feature (1)..(352): NCBI GI NO: 23042448 NR Description: hypothetical protein
  misc_feature (1)..(355): NCBI GI NO: 23126214 NR Description: hypothetical protein [Nostoc punctiforme]
  misc_feature (1)..(329): NCBI GI NO: 16331408 NR Description: ABC1-like [Synechocystis sp. PCC 6803]
MDYREEARNGLKFRELFGKFRDVSVPEMYLEQTRRRVLIMEWIEGEKLSEVRDQYLVEVGVYCSLSQLLEYGFYHADPHPGNLLRTVDGKLAYLDFGMMGEFRQELRDGFIEACLHLVNRDFDALAKDFVTLGLLPPTAQKGEVTKALTGVFENAVNRGVQNISFGDLSGNLGRTMYKFKFQIPSYFSLVIRSLAVLEGIAISFNPKYKVLGSSYPWIARKVLTDSSPKLRSTLQTLLYKDGTFQIDRLESLLTESLRARTEQSLVRNEQDVDSTRYAIKQVLSFTLADQGAFVKDLLLQEIAKGIDALGVATLSSATSAAASRLPFGGGPSPLTSLDDEDATNLRNLYRLLLLLSKVSQKENPSPIPEYNSAIEKEGGSTDELALALYGMTSLPEFLPVLSVIPELPPESQQQLLLLPADLTNRILSRALARTIRRLM

SEQ ID NO: 33369 - protein, 412 aa, Zea mays subsp. mays
  peptide (1)..(412): Ceres Seq. ID no. 12358194
  misc_feature (1)..(411): NCBI GI NO: 38344898 NR Description: OSJNBb0079B02.1
  misc_feature (1)..(411): NCBI GI NO: 18409920 NR Description: expressed protein; protein id: At1g71810
  misc_feature (1)..(213): NCBI GI NO: 19698835 NR Description: unknown protein [Arabidopsis thaliana]
  misc_feature (194)..(411): NCBI GI NO: 19698835 NR Description: unknown protein [Arabidopsis thaliana]
  misc_feature (1)..(149): NCBI GI NO: 25406121 NR Description: hypothetical protein F14O23.19
  misc_feature (277)..(411): NCBI GI NO: 25406121 NR Description: hypothetical protein F14O23.19
  misc_feature (167)..(264): NCBI GI NO: 25406121 NR Description: hypothetical protein F14O23.19
  misc_feature (1)..(325): NCBI GI NO: 23042448 NR Description: hypothetical protein
  misc_feature (1)..(328): NCBI GI NO: 23126214 NR Description: hypothetical protein [Nostoc punctiforme]
  misc_feature (1)..(302): NCBI GI NO: 16331408 NR Description: ABC1-like [Synechocystis sp. PCC 6803]
MYLEQTRRRVLIMEWIEGEKLSEVRDQYLVEVGVYCSLSQLLEYGFYHADPHPGNLLRTVDGKLAYLDFGMMGEFRQELRDGFIEACLHLVNRDFDALAKDFVTLGLLPPTAQKGEVTKALTGVFENAVNRGVQNISFGDLSGNLGRTMYKFKFQIPSYFSLVIRSLAVLEGIAISFNPKYKVLGSSYPWIARKVLTDSSPKLRSTLQTLLYKDGTFQIDRLESLLTESLRARTEQSLVRNEQDVDSTRYAIKQVLSFTLADQGAFVKDLLLQEIAKGIDALGVATLSSATSAAASRLPFGGGPSPLTSLDDEDATNLRNLYRLLLLLSKVSQKENPSPIPEYNSAIEKEGGSTDELALALYGMTSLPEFLPVLSVIPELPPESQQQLLLLPADLTNRILSRALARTIRRLM

SEQ ID NO: 33370 - DNA, 1309 bp, Zea mays subsp. mays
  misc_feature (1)..(1309): Ceres Seq. ID no. 12411788
tcattggagctagcaaaagctgggtatcagaggccttcacatgtaatcatacatctgaagaattttaggaggtcagagaactttgtaaggcttattaagtgcaacattgacaacgaacgggaacctcaggctctttcactttgctgttcaattcggaaaatgtggagatctcaccaagcagcaatgaaagttataccattgaaggttccatcaggccagcgtcatgtgtattttgtgtcagatgatgataaaaaggaatcccacagtttatctaggcctttgctaagctcgggaggaacctctactgatgttgagcaacagttcataaacaatacagttcactttcagaaaatgtggagcagtgaaccagaaattcagagccgatgcaaactagttgccaagcagattgcggatgacggaagggtgttcagcatatggaggcctctctgccctaatgggtatgtctcaattggtgatattgcgcatgttggcatccatccaccgcattttgctgctgtatacaagaatatcaatgggaactttgcactgcctcttggctatgacctggtttggagaaattgtgctgaggattacaagagccctgtatcaatatggcttccaaggccaccggggggatacgtagctcttgggtgtgttgctgtcccttcattcaaggagcccactcttgactgtgctttctgtgtggatgagagactcgcggaggatgccgcgtatgaggagcaaatcatatgggcctcatcggatgcttacccatggggatgctatatctaccaagttcagagcgcctcaatgcagttcatggcacttcgtgtcccaaaagaacaatctgagctaaggcccaagaagatattggagtcatttctgcagcaagcatcagagactcaaacgtcccgtgcatgaagaagctgcacatgatgcttgtgcgtgcaagagaactcggctgggacaaagggcaagtctcgtgcaagaaagctcgaagaatgccacttctttcggatcactccatttctccgttgtcaaagcatacacagaggacagagccttgcatgccaacactcgggttgacggaagtgttgtatactagaatagtaggttaaaggttgtaaatgtaaagttttgtaacgtttgatatagtttttgtccagctacatttgttaaggcccatgtggacgtgggccatattagttgtggctacatattctactaagaagttctcaggactaatcatactttctctaatttaaggttgttaaggcccatgtggacgtgggccatactagttgtggct

SEQ ID NO: 33371 - protein, 306 aa, Zea mays subsp. mays
  peptide (1)..(306): Ceres Seq. ID no. 12411789
  misc_feature (1)..(300): NCBI GI NO: 37536928 NR Description: unknown protein
  misc_feature (1)..(301): NCBI GI NO: 15235973 NR Description: hypothetical protein; protein id: At4g17110.1
SLELAKAGYQRPSHVIIHLKNFRRSENFVRLIKCNIDNEREPQALSLCCSIRKMWRSHQAAMKVIPLKVPSGQRHVYFVSDDDKKESHSLSRPLLSSGGTSTDVEQQFINNTVHFQKMWSSEPEIQSRCKLVAKQIADDGRVFSIWRPLCPNGYVSIGDIAHVGIHPPHFAAVYKNINGNFALPLGYDLVWRNCAEDYKSPVSIWLPRPPGGYVALGCVAVPSFKEPTLDCAFCVDERLAEDAAYEEQIIWASSDAYPWGCYIYQVQSASMQFMALRVPKEQSELRPKKILESFLQQASETQTSRA

SEQ ID NO: 33372 - protein, 253 aa, Zea mays subsp. mays
  peptide (1)..(253): Ceres Seq. ID no. 12411790
  misc_feature (1)..(247): NCBI GI NO: 37536928 NR Description: unknown protein
  misc_feature (1)..(248): NCBI GI NO: 15235973 NR Description: hypothetical protein; protein id: At4g17110.1
MWRSHQAAMKVIPLKVPSGQRHVYFVSDDDKKESHSLSRPLLSSGGTSTDVEQQFINNTVHFQKMWSSEPEIQSRCKLVAKQIADDGRVFSIWRPLCPNGYVSIGDIAHVGIHPPHFAAVYKNINGNFALPLGYDLVWRNCAEDYKSPVSIWLPRPPGGYVALGCVAVPSFKEPTLDCAFCVDERLAEDAAYEEQIIWASSDAYPWGCYIYQVQSASMQFMALRVPKEQSELRPKKILESFLQQASETQTSRA

SEQ ID NO: 33373 - protein, 245 aa, Zea mays subsp. mays
  peptide (1)..(245): Ceres Seq. ID no. 12411791
  misc_feature (1)..(239): NCBI GI NO: 37536928 NR Description: unknown protein
  misc_feature (1)..(240): NCBI GI NO: 15235973 NR Description: hypothetical protein; protein id: At4g17110.1
MKVIPLKVPSGQRHVYFVSDDDKKESHSLSRPLLSSGGTSTDVEQQFINNTVHFQKMWSSEPEIQSRCKLVAKQIADDGRVFSIWRPLCPNGYVSIGDIAHVGIHPPHFAAVYKNINGNFALPLGYDLVWRNCAEDYKSPVSIWLPRPPGGYVALGCVAVPSFKEPTLDCAFCVDERLAEDAAYEEQIIWASSDAYPWGCYIYQVQSASMQFMALRVPKEQSELRPKKILESFLQQASETQTSRA

SEQ ID NO: 33374 - DNA, 989 bp, Zea mays subsp. mays
  misc_feature (1)..(989): Ceres Seq. ID no. 12372536
ccacacggccacacacacttcacttcataggcgccccagcagagctcatctctgcctcctgtgtccttctccatgacagagaatctccactccaggaaaatggtacagccaaagaagtttcgtggagtccggcagcgccactggggctcctgggtctctgagatcaggcatcccctccttaagaggagggtctggctgggtacctttgagacggctgaggaggcagcgagagcatatgatgaggctgctgtgctgatgagcggacgcaacgccaagaccaacttcccaatccaaagaagcagcacaggggagcctaccccagctgcgggaagggacgcccgcagcaacttcagcagcggctcctctaccaccaacctgtcccagattctcagtgcgaagctccgcaaatgctgcaaggcgccatcaccgtccctgacctgtctccgccttgaccctgagaagtcccacattggtgtttggcagaagcgtgcaggagcccgtgctgactccaactgggtcatgacagtggagctcaacaaagatgcagcatccactgatgctgcatcacagtccacatcagcaacaactgctccaccagccacgccgatggatgaggaggagaggatcgcactgcaaatgatcgaagagttgctgagcagcagcagcccagcttcaccctcaaacggagatgaccaaggtcgcttcatcatctgaaaagcatggatcaaacagcacaagtcaccatcccagatcagagtttcgctaggtcggttggtacacaagcagttcaggttgcttcagtaatatagatatatgtctattactaaatccaacttacaagaactataaagtttgcaattgtgtgcagttctatgtacgtgaaaagctctacatacacatgttcctatcaagatactttgttacacatcaatgtcagtgatataattgcttataaaagaaataaatagattatgattgtgttactgctc

SEQ ID NO: 33375 - protein, 213 aa, Zea mays subsp. mays
  peptide (1)..(213): Ceres Seq. ID no. 12372537
  misc_feature (14)..(77): Pfam Name: Pfam Description:  AP2 domain
  misc_feature (10)..(197): NCBI GI NO: 15218134 NR Description: putative ethylene responsive element
  misc_feature (10)..(197): NCBI GI NO: 21553845 NR Description: putative ethylene responsive element
  misc_feature (10)..(197): NCBI GI NO: 15238976 NR Description: putative protein; protein id: At5g11190.1
  misc_feature (10)..(203): NCBI GI NO: 15239413 NR Description: AP2 domain containing protein
  misc_feature (10)..(203): NCBI GI NO: 30689846 NR Description: AP2 domain transcription factor, putative
  misc_feature (10)..(116): NCBI GI NO: 15238727 NR Description: ethylene-responsive element - like protein
  misc_feature (14)..(116): NCBI GI NO: 18650662 NR Description: ethylene response factor 1
  misc_feature (15)..(79): NCBI GI NO: 38343976 NR Description: OSJNBb0022F16.15
  misc_feature (10)..(116): NCBI GI NO: 131754 NR Description: PPLZ02 PROTEIN
  misc_feature (11)..(176): NCBI GI NO: 37533596 NR Description: putative AP2-domain transcriptional regulator
MTENLHSRKMVQPKKFRGVRQRHWGSWVSEIRHPLLKRRVWLGTFETAEEAARAYDEAAVLMSGRNAKTNFPIQRSSTGEPTPAAGRDARSNFSSGSSTTNLSQILSAKLRKCCKAPSPSLTCLRLDPEKSHIGVWQKRAGARADSNWVMTVELNKDAASTDAASQSTSATTAPPATPMDEEERIALQMIEELLSSSSPASPSNGDDQGRFII

SEQ ID NO: 33376 - protein, 204 aa, Zea mays subsp. mays
  peptide (1)..(204): Ceres Seq. ID no. 12372538
  misc_feature (5)..(68): Pfam Name: Pfam Description:  AP2 domain
  misc_feature (1)..(188): NCBI GI NO: 15218134 NR Description: putative ethylene responsive element
  misc_feature (1)..(188): NCBI GI NO: 21553845 NR Description: putative ethylene responsive element
  misc_feature (1)..(188): NCBI GI NO: 15238976 NR Description: putative protein; protein id: At5g11190.1
  misc_feature (1)..(194): NCBI GI NO: 15239413 NR Description: AP2 domain containing protein
  misc_feature (1)..(194): NCBI GI NO: 30689846 NR Description: AP2 domain transcription factor, putative
  misc_feature (1)..(107): NCBI GI NO: 15238727 NR Description: ethylene-responsive element - like protein
  misc_feature (5)..(107): NCBI GI NO: 18650662 NR Description: ethylene response factor 1
  misc_feature (6)..(70): NCBI GI NO: 38343976 NR Description: OSJNBb0022F16.15
  misc_feature (1)..(107): NCBI GI NO: 131754 NR Description: PPLZ02 PROTEIN
  misc_feature (2)..(167): NCBI GI NO: 37533596 NR Description: putative AP2-domain transcriptional regulator
MVQPKKFRGVRQRHWGSWVSEIRHPLLKRRVWLGTFETAEEAARAYDEAAVLMSGRNAKTNFPIQRSSTGEPTPAAGRDARSNFSSGSSTTNLSQILSAKLRKCCKAPSPSLTCLRLDPEKSHIGVWQKRAGARADSNWVMTVELNKDAASTDAASQSTSATTAPPATPMDEEERIALQMIEELLSSSSPASPSNGDDQGRFII

SEQ ID NO: 33377 - protein, 152 aa, Zea mays subsp. mays
  peptide (1)..(152): Ceres Seq. ID no. 12372539
  misc_feature (1)..(136): NCBI GI NO: 15218134 NR Description: putative ethylene responsive element
  misc_feature (1)..(136): NCBI GI NO: 21553845 NR Description: putative ethylene responsive element
  misc_feature (1)..(136): NCBI GI NO: 15238976 NR Description: putative protein; protein id: At5g11190.1
  misc_feature (1)..(142): NCBI GI NO: 15239413 NR Description: AP2 domain containing protein
  misc_feature (1)..(142): NCBI GI NO: 30689846 NR Description: AP2 domain transcription factor, putative
  misc_feature (1)..(55): NCBI GI NO: 15238727 NR Description: ethylene-responsive element - like protein
  misc_feature (1)..(55): NCBI GI NO: 18650662 NR Description: ethylene response factor 1
  misc_feature (1)..(18): NCBI GI NO: 38343976 NR Description: OSJNBb0022F16.15
  misc_feature (1)..(55): NCBI GI NO: 131754 NR Description: PPLZ02 PROTEIN
  misc_feature (1)..(115): NCBI GI NO: 37533596 NR Description: putative AP2-domain transcriptional regulator
MSGRNAKTNFPIQRSSTGEPTPAAGRDARSNFSSGSSTTNLSQILSAKLRKCCKAPSPSLTCLRLDPEKSHIGVWQKRAGARADSNWVMTVELNKDAASTDAASQSTSATTAPPATPMDEEERIALQMIEELLSSSSPASPSNGDDQGRFII

SEQ ID NO: 33378 - DNA, 924 bp, Zea mays subsp. mays
  misc_feature (1)..(924): Ceres Seq. ID no. 12340623
attagtgctggtgtgtgtggtgtggttcgtccatctctcctgctagcttagctcgctcgctggcaacaacaatgaaagccgcaactggctcgtcatcagtcgctcgcgctcttgcgttgctcttggcggcgtgccttctctggaaggaagccgcgtgcttctcggcgtccgggctaaacaaggcgttcgccaccttctatggcggtagcgacgcttcaggaacgatgggtggggcctgtgggtacggcaacctgtactcgacggggtacggcacggacacggcggcgctgagcacggcgctcttcaacgacggcgcctcgtgcgggcagtgctaccggatctcctgcgactaccaggcggacccgcggttctgcatccgcggcacgtcggtgaccatcaccgccaccaacctgtgccctcccaactacgcgctgcccaacgacgacggcggctggtgcaacccgccgcggcagcacttcgacatggccgagccggcctggctcaagatcggcatctaccgcggcggcatcgtgcccgtcaactaccaaagggtgccgtgtgtgaagaaaggcggggtgaggttcagcatcaacgggcgcgactacttcgagctggtgctcatctccaacgtgggcggctgcgggtccatccagtcggcgtccatcaaggggtcgcgcaccgggtggatggccatgtcccggaactggggcgtcaactggcagtccaacgcgtacctcaatggccagagcctgtcgttccaggtcaccagcagcgacggccagaccaaaaccttccccgacgtcgcgcccgccagctgggggttcggtcagacgtttgcgacctcgcagcagttctcttagtatagacacatctttgttttctgcctcgttcgcttgtcgtttatatatatccctcactcggctc

SEQ ID NO: 33379 - protein, 262 aa, Zea mays subsp. mays
  peptide (1)..(262): Ceres Seq. ID no. 12340624
  misc_feature (169)..(246): Pfam Name: Pfam Description:  Pollen allergen
  misc_feature (1)..(262): NCBI GI NO: 14193755 NR Description: alpha-expansin 3 [Zea mays]
  misc_feature (1)..(262): NCBI GI NO: 7489469 NR Description: expansin - rice
  misc_feature (13)..(261): NCBI GI NO: 4027891 NR Description: alpha-expansin precursor [Nicotiana tabacum]
  misc_feature (14)..(261): NCBI GI NO: 27464177 NR Description: expansin [Glycine max]
  misc_feature (14)..(261): NCBI GI NO: 30519752 NR Description: expansin11 [Lycopersicon esculentum]
  misc_feature (13)..(261): NCBI GI NO: 20149056 NR Description: putative expansin [Capsicum annuum]
  misc_feature (13)..(262): NCBI GI NO: 4027895 NR Description: alpha-expansin precursor [Nicotiana tabacum]
  misc_feature (7)..(261): NCBI GI NO: 11191999 NR Description: expansin [Lycopersicon esculentum]
  misc_feature (13)..(261): NCBI GI NO: 4027893 NR Description: alpha-expansin precursor [Nicotiana tabacum]
  misc_feature (30)..(262): NCBI GI NO: 7484747 NR Description: expansin S2 precursor - cucumber
MKAATGSSSVARALALLLAACLLWKEAACFSASGLNKAFATFYGGSDASGTMGGACGYGNLYSTGYGTDTAALSTALFNDGASCGQCYRISCDYQADPRFCIRGTSVTITATNLCPPNYALPNDDGGWCNPPRQHFDMAEPAWLKIGIYRGGIVPVNYQRVPCVKKGGVRFSINGRDYFELVLISNVGGCGSIQSASIKGSRTGWMAMSRNWGVNWQSNAYLNGQSLSFQVTSSDGQTKTFPDVAPASWGFGQTFATSQQFS

SEQ ID NO: 33380 - protein, 211 aa, Zea mays subsp. mays
  peptide (1)..(211): Ceres Seq. ID no. 12340625
  misc_feature (118)..(195): Pfam Name: Pfam Description:  Pollen allergen
  misc_feature (1)..(211): NCBI GI NO: 14193755 NR Description: alpha-expansin 3 [Zea mays]
  misc_feature (1)..(211): NCBI GI NO: 7489469 NR Description: expansin - rice
  misc_feature (1)..(210): NCBI GI NO: 4027891 NR Description: alpha-expansin precursor [Nicotiana tabacum]
  misc_feature (1)..(210): NCBI GI NO: 27464177 NR Description: expansin [Glycine max]
  misc_feature (1)..(210): NCBI GI NO: 30519752 NR Description: expansin11 [Lycopersicon esculentum]
  misc_feature (1)..(210): NCBI GI NO: 20149056 NR Description: putative expansin [Capsicum annuum]
  misc_feature (1)..(211): NCBI GI NO: 4027895 NR Description: alpha-expansin precursor [Nicotiana tabacum]
  misc_feature (1)..(210): NCBI GI NO: 11191999 NR Description: expansin [Lycopersicon esculentum]
  misc_feature (1)..(210): NCBI GI NO: 4027893 NR Description: alpha-expansin precursor [Nicotiana tabacum]
  misc_feature (1)..(211): NCBI GI NO: 7484747 NR Description: expansin S2 precursor - cucumber
MGGACGYGNLYSTGYGTDTAALSTALFNDGASCGQCYRISCDYQADPRFCIRGTSVTITATNLCPPNYALPNDDGGWCNPPRQHFDMAEPAWLKIGIYRGGIVPVNYQRVPCVKKGGVRFSINGRDYFELVLISNVGGCGSIQSASIKGSRTGWMAMSRNWGVNWQSNAYLNGQSLSFQVTSSDGQTKTFPDVAPASWGFGQTFATSQQFS

SEQ ID NO: 33381 - DNA, 757 bp, Zea mays subsp. mays
  misc_feature (1)..(757): Ceres Seq. ID no. 12345655
agccatcgccaccacctccctccgcggctccgccttccgccgcgaacacgccgctgtctcgaccccttgtcctcctccttcagcaagatggcggagattgagataaaaacagcacctgctgacttccgcttccctacaacaaaccaaacaaggcattgttttactcgctatgtcgagtaccacaggtgtttgaatgccaaaggggatgatgctggtgtttgcgaaaaatttgccaagtactacaggtccctttgccctggagaatgggttgagaaatggaacgagcagagggagcatgggacgtttccaggacctctctgaatgtaccgcccgagacctccagttggaccagtcaacaagttggccaggcagtcctactgttccattctgcattcctacttccagaatcgtaaatgccttttgtcccttgctcttcaaccagtcaccacaaaactgttagtgatgcctctcgtatgcagctctaataatttggctacagttgccccacatgcagccttgttttgtgtgtggactgtggacctcattttgtaaacgtctgaatggacttgcattttctttcgtgcctgcgaccgcgtcgtcctgtactgcggcttttgtgtcgtcagtaagctggcattgtagtaatggcctatgaatgtgggtgtacctttcccgtttaaattaagggtctccaattctggaggattggaggggattgagtttaaaaataaactgatttcccctcttattcacctcc

SEQ ID NO: 33382 - protein, 106 aa, Zea mays subsp. mays
  peptide (1)..(106): Ceres Seq. ID no. 12345656
  misc_feature (32)..(105): Pfam Name: Pfam Description:  Cytochrome oxidase c subunit VIb
  misc_feature (30)..(106): NCBI GI NO: 9967162 NR Description: cytochrome c oxidase subunit 6b
  misc_feature (32)..(106): NCBI GI NO: 4586449 NR Description: cytochrome c oxidase subunit 6b-1
  misc_feature (32)..(106): NCBI GI NO: 22204116 NR Description: putative cytochrome c oxidase subunit
  misc_feature (32)..(106): NCBI GI NO: 18424030 NR Description: Expressed protein; protein id: At5g57815
  misc_feature (32)..(106): NCBI GI NO: 15219886 NR Description: cytochrome c oxidase subunit, putative
  misc_feature (32)..(106): NCBI GI NO: 21554378 NR Description: cytochrome c oxidase subunit, putative
  misc_feature (32)..(106): NCBI GI NO: 34906824 NR Description: putative cytochrome c oxidase subunit 6b-1
  misc_feature (32)..(106): NCBI GI NO: 21592329 NR Description: cytochrome c oxidase subunit 6b
  misc_feature (7)..(106): NCBI GI NO: 15234375 NR Description: putative protein; protein id: At4g28060.1
  misc_feature (24)..(105): NCBI GI NO: 32401320 NR Description: cytochrome c oxidase subunit 6b-1
SHRHHLPPRLRLPPRTRRCLDPLSSSFSKMAEIEIKTAPADFRFPTTNQTRHCFTRYVEYHRCLNAKGDDAGVCEKFAKYYRSLCPGEWVEKWNEQREHGTFPGPL

SEQ ID NO: 33383 - protein, 88 aa, Zea mays subsp. mays
  peptide (1)..(88): Ceres Seq. ID no. 12345657
MPKGMMLVFAKNLPSTTGPFALENGLRNGTSRGSMGRFQDLSECTARDLQLDQSTSWPGSPTVPFCIPTSRIVNAFCPLLFNQSPQNC

SEQ ID NO: 33384 - protein, 84 aa, Zea mays subsp. mays
  peptide (1)..(84): Ceres Seq. ID no. 12345658
MMLVFAKNLPSTTGPFALENGLRNGTSRGSMGRFQDLSECTARDLQLDQSTSWPGSPTVPFCIPTSRIVNAFCPLLFNQSPQNC

SEQ ID NO: 33385 - protein, 77 aa, Zea mays subsp. mays
  peptide (1)..(77): Ceres Seq. ID no. 12345659
  misc_feature (3)..(76): Pfam Name: Pfam Description:  Cytochrome oxidase c subunit VIb
  misc_feature (1)..(77): NCBI GI NO: 9967162 NR Description: cytochrome c oxidase subunit 6b
  misc_feature (3)..(77): NCBI GI NO: 4586449 NR Description: cytochrome c oxidase subunit 6b-1
  misc_feature (3)..(77): NCBI GI NO: 22204116 NR Description: putative cytochrome c oxidase subunit
  misc_feature (3)..(77): NCBI GI NO: 18424030 NR Description: Expressed protein; protein id: At5g57815
  misc_feature (3)..(77): NCBI GI NO: 15219886 NR Description: cytochrome c oxidase subunit, putative
  misc_feature (3)..(77): NCBI GI NO: 21554378 NR Description: cytochrome c oxidase subunit, putative
  misc_feature (3)..(77): NCBI GI NO: 34906824 NR Description: putative cytochrome c oxidase subunit 6b-1
  misc_feature (3)..(77): NCBI GI NO: 21592329 NR Description: cytochrome c oxidase subunit 6b
  misc_feature (1)..(77): NCBI GI NO: 15234375 NR Description: putative protein; protein id: At4g28060.1
  misc_feature (1)..(76): NCBI GI NO: 32401320 NR Description: cytochrome c oxidase subunit 6b-1
MAEIEIKTAPADFRFPTTNQTRHCFTRYVEYHRCLNAKGDDAGVCEKFAKYYRSLCPGEWVEKWNEQREHGTFPGPL

SEQ ID NO: 33386 - DNA, 528 bp, Zea mays subsp. mays
  misc_feature (1)..(528): Ceres Seq. ID no. 13492510
ctcgtctccactgctctgctgctcctcgcaccgccgccgccgccgccgcagcgacgtaatggcttccgccgcggtgctccggaacgccggctcccggcgcctcttctcctaccctactctccgcgccgctgcgatatatgtaccttctgcgctacccgatgcgcccgcggcggcggcagcgccggcccagccgccaccgacggccgggaccctctgggcgaggtctatggccaccttcacgcgcacgaagccccatgtgaatgtcggcaccattgggcacgtcgatcacggcaaaaccactctcactgctgccattaccaaggtcctggccgaggcagggaaggccaaagccgttgctttcgacgagatcgacaaggctccggaggagaaagccagaggaatcaccattgcgacagctcacgtcgagtatgagacggctaaaaggcattatgctcacgttgattgtccaggtcacgcagattatgtcaagaacatgatcactggagctgctcagcgtttcctgtgttc

SEQ ID NO: 33387 - protein, 175 aa, Zea mays subsp. mays
  peptide (1)..(175): Ceres Seq. ID no. 13492511
  misc_feature (83)..(171): Pfam Name: Pfam Description:  Elongation factor Tu GTP binding domain
  misc_feature (20)..(171): NCBI GI NO: 11181616 NR Description: translational elongation factor EF-TuM [Zea mays]
  misc_feature (20)..(171): NCBI GI NO: 18001149 NR Description: translational elongation factor Tu [Oryza sativa]
  misc_feature (20)..(171): NCBI GI NO: 15236220 NR Description: elongation factor Tu (EF-Tu), putative
  misc_feature (67)..(171): NCBI GI NO: 1149571 NR Description: mitochondrial elongation factor Tu
  misc_feature (75)..(171): NCBI GI NO: 18311389 NR Description: elongation factor Tu [Clostridium perfringens]
  misc_feature (35)..(171): NCBI GI NO: 22966137 NR Description: hypothetical protein [Rhodospirillum rubrum]
  misc_feature (79)..(171): NCBI GI NO: 20808662 NR Description: GTPases - translation elongation factors
  misc_feature (79)..(171): NCBI GI NO: 20808676 NR Description: GTPases - translation elongation factors
  misc_feature (72)..(171): NCBI GI NO: 22965193 NR Description: hypothetical protein [Rhodopseudomonas palustris]
  misc_feature (77)..(171): NCBI GI NO: 39997951 NR Description: translation elongation factor Tu
SSPLLCCSSHRRRRRRSDVMASAAVLRNAGSRRLFSYPTLRAAAIYVPSALPDAPAAAAAPAQPPPTAGTLWARSMATFTRTKPHVNVGTIGHVDHGKTTLTAAITKVLAEAGKAKAVAFDEIDKAPEEKARGITIATAHVEYETAKRHYAHVDCPGHADYVKNMITGAAQRFLC

SEQ ID NO: 33388 - protein, 156 aa, Zea mays subsp. mays
  peptide (1)..(156): Ceres Seq. ID no. 13492512
  misc_feature (64)..(152): Pfam Name: Pfam Description:  Elongation factor Tu GTP binding domain
  misc_feature (1)..(152): NCBI GI NO: 11181616 NR Description: translational elongation factor EF-TuM [Zea mays]
  misc_feature (1)..(152): NCBI GI NO: 18001149 NR Description: translational elongation factor Tu [Oryza sativa]
  misc_feature (1)..(152): NCBI GI NO: 15236220 NR Description: elongation factor Tu (EF-Tu), putative
  misc_feature (48)..(152): NCBI GI NO: 1149571 NR Description: mitochondrial elongation factor Tu
  misc_feature (56)..(152): NCBI GI NO: 18311389 NR Description: elongation factor Tu [Clostridium perfringens]
  misc_feature (16)..(152): NCBI GI NO: 22966137 NR Description: hypothetical protein [Rhodospirillum rubrum]
  misc_feature (60)..(152): NCBI GI NO: 20808662 NR Description: GTPases - translation elongation factors
  misc_feature (60)..(152): NCBI GI NO: 20808676 NR Description: GTPases - translation elongation factors
  misc_feature (53)..(152): NCBI GI NO: 22965193 NR Description: hypothetical protein [Rhodopseudomonas palustris]
  misc_feature (58)..(152): NCBI GI NO: 39997951 NR Description: translation elongation factor Tu
MASAAVLRNAGSRRLFSYPTLRAAAIYVPSALPDAPAAAAAPAQPPPTAGTLWARSMATFTRTKPHVNVGTIGHVDHGKTTLTAAITKVLAEAGKAKAVAFDEIDKAPEEKARGITIATAHVEYETAKRHYAHVDCPGHADYVKNMITGAAQRFLC

SEQ ID NO: 33389 - protein, 143 aa, Zea mays subsp. mays
  peptide (1)..(143): Ceres Seq. ID no. 13492513
LVSTALLLLAPPPPPPQRRNGFRRGAPERRLPAPLLLPYSPRRCDICTFCATRCARGGGSAGPAATDGRDPLGEVYGHLHAHEAPCECRHHWARRSRQNHSHCCHYQGPGRGREGQSRCFRRDRQGSGGESQRNHHCDSSRRV

SEQ ID NO: 33390 - DNA, 1320 bp, Zea mays subsp. mays
  misc_feature (1)..(1320): Ceres Seq. ID no. 12350438
aagatctccgtgctcgatagctcacatcgattcccgccagcgggttccctcaaaattttcggtctctcttcttcccacgggaccagcagtgttcgattcgagcagagatggcggcggcatgggcggtgctggctttgttcctcgtcgcggcgcaggtggcggcggcggcgccggtcacggcgccagcgttcctgtgggcgcccaaaaactacggattcagctctgatgatgctaaggaggtagtccattaccaaacaatctcaccaaagagcttagctaaatctgttctcgaggaaggtggctgtcaaacttcatgtgctcaagggaggatactcagaataatgttgatgttgccattgtttttattggctcaaagctgcaatcgtcagacatatctaaagataagcaagttgatccagctttagcagacacactgaagctctccttcacacgctcagagttttccatggcattcccctacgtttccaccacagtcgacgagagactagaggactcgttgctatccagctttgccgagaactgcaacaatggtttcggaagaaaccgcgtcacctacacagacacgtgtaccggtcaagatctgaagaaataccacaacatggatgccatcaatgacctggtagtgtcaggggtagcgtcaaggagagtcaaccacccaagtggacagaccgatgtaatcgtcttctgtagcggcgggttcgagaatccaggcactgcgaaatcagaaggagagctgctttcccagcttgtggacttgctggacttgtcgggagccaaatatacggtcctctatgcgtcccaaccgtctggtttgctggagagcccttcgggcctgccgctgggtaggcatctcgcggagaagaagactaacggcacgaaagctgtccagggcgaaaaatgcgatggcgagtgcctcgtcaaatctagtctcctcgaaggaactttcgttgggatagtgcttctcatcatcctgatatcaggactcatgtgcatgatggggatcgatactccctcgaggtttgaagctccccaggagtcttgatctctcccttggactgcagaatccgcggggcggttgtgacgagggcacgcggcggcgttgaggggggccggtgttctgttggtctgcactgtggatatatatcgtttagcttcccatttggaagggagtacgccttgtgtatttttttttaccgagccaactgtcactcacaatgtgctagaattttttggtgtaatatttggctatttgcgtttcgcgtctacggacaactaataagctgaggcctgaggcattgc

SEQ ID NO: 33391 - protein, 249 aa, Zea mays subsp. mays; identical to SEQ ID NO: 26242
  peptide (1)..(249): Ceres Seq. ID no. 12350439
  misc_feature (1)..(249): NCBI GI NO: 24417230 NR Description: unknown [Arabidopsis thaliana]
  misc_feature (1)..(249): NCBI GI NO: 30682651 NR Description: expressed protein [Arabidopsis thaliana]
  misc_feature (45)..(249): NCBI GI NO: 21618303 NR Description: unknown [Arabidopsis thaliana]
  misc_feature (1)..(42): NCBI GI NO: 25405838 NR Description: hypothetical protein T5A14.4

SEQ ID NO: 33392 - protein, 198 aa, Zea mays subsp. mays
  peptide (1)..(198): Ceres Seq. ID no. 12350440
  misc_feature (1)..(198): NCBI GI NO: 24417230 NR Description: unknown [Arabidopsis thaliana]
  misc_feature (1)..(198): NCBI GI NO: 30682651 NR Description: expressed protein [Arabidopsis thaliana]
  misc_feature (1)..(198): NCBI GI NO: 21618303 NR Description: unknown [Arabidopsis thaliana]
MAFPYVSTTVDERLEDSLLSSFAENCNNGFGRNRVTYTDTCTGQDLKKYHNMDAINDLVVSGVASRRVNHPSGQTDVIVFCSGGFENPGTAKSEGELLSQLVDLLDLSGAKYTVLYASQPSGLLESPSGLPLGRHLAEKKTNGTKAVQGEKCDGECLVKSSLLEGTFVGIVLLIILISGLMCMMGIDTPSRFEAPQES

SEQ ID NO: 33393 - protein, 147 aa, Zea mays subsp. mays
  peptide (1)..(147): Ceres Seq. ID no. 12350441
  misc_feature (1)..(147): NCBI GI NO: 24417230 NR Description: unknown [Arabidopsis thaliana]
  misc_feature (1)..(147): NCBI GI NO: 30682651 NR Description: expressed protein [Arabidopsis thaliana]
  misc_feature (1)..(147): NCBI GI NO: 21618303 NR Description: unknown [Arabidopsis thaliana]
MDAINDLVVSGVASRRVNHPSGQTDVIVFCSGGFENPGTAKSEGELLSQLVDLLDLSGAKYTVLYASQPSGLLESPSGLPLGRHLAEKKTNGTKAVQGEKCDGECLVKSSLLEGTFVGIVLLIILISGLMCMMGIDTPSRFEAPQES

SEQ ID NO: 33394 - DNA, 1364 bp, Zea mays subsp. mays
  misc_feature (1)..(1364): Ceres Seq. ID no. 13498509
acgcacctggtttcgtccccaaatctcactcaatccccagtcccgacacccatcctctccaccgaagtcaccaccgcatggacgacgccgcgaatcccacccctccaccatccacctccgccgcatccgcggcggccgcggcggcgcaacaccagcagctccagcgccaactcttcctaatgcagcaggcgcagtcccatccgcagcagctgtcgcagcaggccatgtcccgcttcccctccaacatcgacgctcacctccgccctctagggccgcttcgcttccaacagccccagccccagccccagccgtcccactcccagggtccatctcagtcgccgtcgcaggccacgcagcaggcgtcaccccagcagcagcagcagcaggcggcggcggcggcggcagcggcgcaggcacaagcacaggcccaggcccaggcggcacgggtacgaagccccgagatggagatggcgctgcaggacgccatgcgggtctgcaatccggacgtcaagacgcccttccagtccatcgaggacgctgtcaacaggttattaccttaccatgttgttgccgactatgaggctgaagaagatgacaggatccttgatagcgacacaacaggccagatcccttctcgcctgcagcaatgggaccataatattctggtgaagattgctgagttcacgacaacttttgacaagcaagtattggcatataacataatgaccaagaaaagggccatcggtgagttcaggtcggaggagcggctcatgctggagcaagccttattgcaggaggaaaagcaagctatgctgggactgagggcagagatggagtcgagagagaaagctggtcgcgaggctgccgaagtgaagatgcgtttggcaatggagcatgctcgtgctgaggcacaagctcactctgagatgatgaatcatggtcctataagggccagtgctgttgcttcgcaaggggaggatggtccgagtcatgacatggtgcaagaacatggcgaagatgggtggggaaattctcagagggatgatgaagatccatcggaggatttcctcaacgatgagaacgaacctgagaatgggaactcagatgggcaggaggactggcgcagatctggggagtttgatctcaactctaggtaaggcagttggatttccacatgaaggtttctaggtaggctacgacatgctggtattgtatctactattctattgttgtgttcggtgaagatgtctttgtggctgtaaacatggcattcgaacaattcagtttctttgtaatttgactagtaatatttacttgagcactcaatatgtgccatttccaacttggagaaaaaaaattacaat

SEQ ID NO: 33395 - protein, 384 aa, Zea mays subsp. mays
  peptide (1)..(384): Ceres Seq. ID no. 13498510
  misc_feature (49)..(384): NCBI GI NO: 15237973 NR Description: glutamine-rich protein [Arabidopsis thaliana]
  misc_feature (49)..(384): NCBI GI NO: 15228554 NR Description: hypothetical protein [Arabidopsis thaliana]
  misc_feature (97)..(310): NCBI GI NO: 38347218 NR Description: OSJNBa0055C08.12
  misc_feature (90)..(324): NCBI GI NO: 38347219 NR Description: OSJNBa0055C08.13
  misc_feature (49)..(157): NCBI GI NO: 34881108 NR Description: similar to OPA-containing protein 1
  misc_feature (36)..(159): NCBI GI NO: 7209261 NR Description: alpha-gliadin [Triticum aestivum]
  misc_feature (49)..(157): NCBI GI NO: 91094 NR Description: Mopa box protein - mouse (fragment)
  misc_feature (183)..(304): NCBI GI NO: 38347215 NR Description: OSJNBa0055C08.9
  misc_feature (49)..(323): NCBI GI NO: 39584063 NR Description: Hypothetical protein CBG11746
APGFVPKSHSIPSPDTHPLHRSHHRMDDAANPTPPPSTSAASAAAAAAQHQQLQRQLFLMQQAQSHPQQLSQQAMSRFPSNIDAHLRPLGPLRFQQPQPQPQPSHSQGPSQSPSQATQQASPQQQQQQAAAAAAAAQAQAQAQAQAARVRSPEMEMALQDAMRVCNPDVKTPFQSIEDAVNRLLPYHVVADYEAEEDDRILDSDTTGQIPSRLQQWDHNILVKIAEFTTTFDKQVLAYNIMTKKRAIGEFRSEERLMLEQALLQEEKQAMLGLRAEMESREKAGREAAEVKMRLAMEHARAEAQAHSEMMNHGPIRASAVASQGEDGPSHDMVQEHGEDGWGNSQRDDEDPSEDFLNDENEPENGNSDGQEDWRRSGEFDLNSR

SEQ ID NO: 33396 - protein, 359 aa, Zea mays subsp. mays
  peptide (1)..(359): Ceres Seq. ID no. 13498511
  misc_feature (24)..(359): NCBI GI NO: 15237973 NR Description: glutamine-rich protein [Arabidopsis thaliana]
  misc_feature (24)..(359): NCBI GI NO: 15228554 NR Description: hypothetical protein [Arabidopsis thaliana]
  misc_feature (72)..(285): NCBI GI NO: 38347218 NR Description: OSJNBa0055C08.12
  misc_feature (65)..(299): NCBI GI NO: 38347219 NR Description: OSJNBa0055C08.13
  misc_feature (24)..(132): NCBI GI NO: 34881108 NR Description: similar to OPA-containing protein 1
  misc_feature (11)..(134): NCBI GI NO: 7209261 NR Description: alpha-gliadin [Triticum aestivum]
  misc_feature (24)..(132): NCBI GI NO: 91094 NR Description: Mopa box protein - mouse (fragment)
  misc_feature (158)..(279): NCBI GI NO: 38347215 NR Description: OSJNBa0055C08.9
  misc_feature (24)..(298): NCBI GI NO: 39584063 NR Description: Hypothetical protein CBG11746
MDDAANPTPPPSTSAASAAAAAAQHQQLQRQLFLMQQAQSHPQQLSQQAMSRFPSNIDAHLRPLGPLRFQQPQPQPQPSHSQGPSQSPSQATQQASPQQQQQQAAAAAAAAQAQAQAQAQAARVRSPEMEMALQDAMRVCNPDVKTPFQSIEDAVNRLLPYHVVADYEAEEDDRILDSDTTGQIPSRLQQWDHNILVKIAEFTTTFDKQVLAYNIMTKKRAIGEFRSEERLMLEQALLQEEKQAMLGLRAEMESREKAGREAAEVKMRLAMEHARAEAQAHSEMMNHGPIRASAVASQGEDGPSHDMVQEHGEDGWGNSQRDDEDPSEDFLNDENEPENGNSDGQEDWRRSGEFDLNSR

SEQ ID NO: 33397 - protein, 325 aa, Zea mays subsp. mays
  peptide (1)..(325): Ceres Seq. ID no. 13498512
  misc_feature (1)..(325): NCBI GI NO: 15237973 NR Description: glutamine-rich protein [Arabidopsis thaliana]
  misc_feature (1)..(325): NCBI GI NO: 15228554 NR Description: hypothetical protein [Arabidopsis thaliana]
  misc_feature (38)..(251): NCBI GI NO: 38347218 NR Description: OSJNBa0055C08.12
  misc_feature (31)..(265): NCBI GI NO: 38347219 NR Description: OSJNBa0055C08.13
  misc_feature (1)..(98): NCBI GI NO: 34881108 NR Description: similar to OPA-containing protein 1
  misc_feature (1)..(100): NCBI GI NO: 7209261 NR Description: alpha-gliadin [Triticum aestivum]
  misc_feature (1)..(98): NCBI GI NO: 91094 NR Description: Mopa box protein - mouse (fragment)
  misc_feature (124)..(245): NCBI GI NO: 38347215 NR Description: OSJNBa0055C08.9
  misc_feature (1)..(264): NCBI GI NO: 39584063 NR Description: Hypothetical protein CBG11746
MQQAQSHPQQLSQQAMSRFPSNIDAHLRPLGPLRFQQPQPQPQPSHSQGPSQSPSQATQQASPQQQQQQAAAAAAAAQAQAQAQAQAARVRSPEMEMALQDAMRVCNPDVKTPFQSIEDAVNRLLPYHVVADYEAEEDDRILDSDTTGQIPSRLQQWDHNILVKIAEFTTTFDKQVLAYNIMTKKRAIGEFRSEERLMLEQALLQEEKQAMLGLRAEMESREKAGREAAEVKMRLAMEHARAEAQAHSEMMNHGPIRASAVASQGEDGPSHDMVQEHGEDGWGNSQRDDEDPSEDFLNDENEPENGNSDGQEDWRRSGEFDLNSR

SEQ ID NO: 33398 - DNA, 1351 bp, Zea mays subsp. mays
  misc_feature (1)..(1351): Ceres Seq. ID no. 13498901
attcgaaaaagcaaaaatgatatgcacgtcacaatagttgttccccagatttgttttgtcacgcgccccgcccgacgcccgccacggcgccaccatgtcgcaggctacggaggtcgtcggaaacccgtacgccgccgagctcgctgcagccaagaaggccgtcgccctagcggcccgcctctgccagagagtgcagcggagcattttgcactctgacattcaatcgaaggcagacaagactcctgttacagttgcggattatggatcacaggtactggtatgtctggtcctgaagaaggaattgccttctcactctttctcaatcatagctgaagaggattcaaaagacttgagagaagatggtgcccaagaaattatagaacacattaccaccctcattaatgaaaccatcgtaaatgatggttcatacaacatgtcgttatctaaggaagatgtgctttctgcaattgatggtggtaaatctgagggaggtccatctgggcgacattggatattagacccaatagatggcactaaaggtttcataaggggagatcagtatgcagttgcacttggactacttgatgagggcaaagttgttctgggtgtgttgggatgtccaaatcttccattaaaatcaacaaacaagaacaatagcagctcttttggggatcgaataggttccctcttttttgctacaattggttgtggagcgcaagttgaggccttagaaggatctgagccacaaaagattagtgtttgctccaccaataatccagttgacgcctcattctttgaatcctttgaagcatcacactccaagcgtgatttaactagctccattgcagagaaacttggtgtccgagctcctcctgttagaatggatagccaagcaaaatatggtgccctagcacgtggtgatggtgccatttttctgcgcatcccgcacaaaagttacatagaaacagtttgggatcatgcagctggatcaattattgtcacagaagctggtggcatggtaaaagatgccgcaggaaacgatttggatttttgcaaaggtagatatcttgatcgtgacagaggaattattgcaacaaacaagcatttaatgccactagttctaaaggcggttcaagaggctatgaaggaggaacagtaggctgctgtgttcatggagcagttgcaatatttgttatgacatttcctgtttgaatcttaatattagttttgcacaatctcgatgtgcggaaaagttgttgtacttgtaccatatgctagtgtatcgtgtgagtcatatgccactcacatactcacatttccttatctcaacaaatggatatgaatttacctg

SEQ ID NO: 33399 - protein, 354 aa, Zea mays subsp. mays
  peptide (1)..(354): Ceres Seq. ID no. 13498902
  misc_feature (9)..(354): NCBI GI NO: 14268820 NR Description: diphosphonucleotide phosphatase 1 [Zea mays]
  misc_feature (1)..(354): NCBI GI NO: 3913517 NR Description: 3'
  misc_feature (12)..(354): NCBI GI NO: 15237567 NR Description: 3(2),5-bisphosphate nucleotidase
  misc_feature (11)..(353): NCBI GI NO: 34395640 NR Description: Probable SAL4 phosphatase
  misc_feature (12)..(354): NCBI GI NO: 18424775 NR Description: 3(2),5-bisphosphate nucleotidase
  misc_feature (12)..(354): NCBI GI NO: 21618152 NR Description: 3(2),5-bisphosphate nucleotidase
  misc_feature (12)..(353): NCBI GI NO: 15237589 NR Description: 3(2),5-bisphosphate nucleotidase (emb|CAB05889.1)
  misc_feature (11)..(353): NCBI GI NO: 15242383 NR Description: 3'
  misc_feature (12)..(354): NCBI GI NO: 8777312 NR Description: 3'(2'),5'-bisphosphate nucleotidase
  misc_feature (9)..(181): NCBI GI NO: 15451579 NR Description: Putative PAP-specific phosphatase [Oryza sativa]
MSQATEVVGNPYAAELAAAKKAVALAARLCQRVQRSILHSDIQSKADKTPVTVADYGSQVLVCLVLKKELPSHSFSIIAEEDSKDLREDGAQEIIEHITTLINETIVNDGSYNMSLSKEDVLSAIDGGKSEGGPSGRHWILDPIDGTKGFIRGDQYAVALGLLDEGKVVLGVLGCPNLPLKSTNKNNSSSFGDRIGSLFFATIGCGAQVEALEGSEPQKISVCSTNNPVDASFFESFEASHSKRDLTSSIAEKLGVRAPPVRMDSQAKYGALARGDGAIFLRIPHKSYIETVWDHAAGSIIVTEAGGMVKDAAGNDLDFCKGRYLDRDRGIIATNKHLMPLVLKAVQEAMKEEQ

SEQ ID NO: 33400 - protein, 241 aa, Zea mays subsp. mays
  peptide (1)..(241): Ceres Seq. ID no. 13498903
  misc_feature (1)..(241): NCBI GI NO: 14268820 NR Description: diphosphonucleotide phosphatase 1 [Zea mays]
  misc_feature (1)..(241): NCBI GI NO: 3913517 NR Description: 3'
  misc_feature (1)..(241): NCBI GI NO: 15237567 NR Description: 3(2),5-bisphosphate nucleotidase
  misc_feature (1)..(240): NCBI GI NO: 34395640 NR Description: Probable SAL4 phosphatase
  misc_feature (1)..(241): NCBI GI NO: 18424775 NR Description: 3(2),5-bisphosphate nucleotidase
  misc_feature (1)..(241): NCBI GI NO: 21618152 NR Description: 3(2),5-bisphosphate nucleotidase
  misc_feature (1)..(240): NCBI GI NO: 15237589 NR Description: 3(2),5-bisphosphate nucleotidase (emb|CAB05889.1)
  misc_feature (1)..(240): NCBI GI NO: 15242383 NR Description: 3'
  misc_feature (1)..(241): NCBI GI NO: 8777312 NR Description: 3'(2'),5'-bisphosphate nucleotidase
  misc_feature (1)..(68): NCBI GI NO: 15451579 NR Description: Putative PAP-specific phosphatase [Oryza sativa]
MSLSKEDVLSAIDGGKSEGGPSGRHWILDPIDGTKGFIRGDQYAVALGLLDEGKVVLGVLGCPNLPLKSTNKNNSSSFGDRIGSLFFATIGCGAQVEALEGSEPQKISVCSTNNPVDASFFESFEASHSKRDLTSSIAEKLGVRAPPVRMDSQAKYGALARGDGAIFLRIPHKSYIETVWDHAAGSIIVTEAGGMVKDAAGNDLDFCKGRYLDRDRGIIATNKHLMPLVLKAVQEAMKEEQ

SEQ ID NO: 33401 - DNA, 1814 bp, Zea mays subsp. mays
  misc_feature (1)..(1814): Ceres Seq. ID no. 12411778
acaggaagggaaggggaggaagcagcagcagcacacagctttgctctcgctctcggctccccgtccaccaaaggaggaaacgcgcagcccgcagcgctagccgtcgtctatctcgtctcctagtccaaggaaggaaagaggcgcttggcatgaagcgacctaccaagaatgagacgctgggctacccctggcacaagtagagcaagagccccagcaaccgagccacagtgaggaggactcgagggaagagatgggcaactgcggcacgcgggaggagaatgccgtcgtcgctgcgcacgcacaagttcaacagctccacttgttacaaaatcctgccaagaatgccattggagataggaagcacaaccgcacctcatcagatataagtgatccttccacacctaggaaagctgaagatgccaagaacatttccatatacaacgatgtgattgtcttcacattgtttgagctagagacaatcacaaagagcttccgtgccgattatgttctcggcgaaggaggatttgggaccgtttacaagggctacatagatgaaaatgtcagggtggggctgaagtcactgcctgttgcagtcaaggtgctcaacaaagatggacaccaagggcacagagaatggcttaccgaagttaactgcctggggcagttaaggcatccaaacttggtgaagttgatcggatattgctgcgaagatgaccatcggctgcttgtctacgagttcatgtttcgaggaagcctagaaaaccacctattccgaaagacagctacaccattaccctggggtactaggatgtcaatcgcactgggagctgctaaagggcttgcttgcctccacaatgctcaaaggcctgtcatctacagagatttcaagacatcaaatattctactggactctgattatactgctaagctgtctgactttggcctggcaaaagctggccctgaaggtgatcagacccatgtatcaacacgggtgatgggaacctacggttatgctgcccctgaatatgtgatgactggccacttgactgctagaagtgatgtctacagcttcggtgtggtccttctggagctcttgacagggcgcaagtcaatcgacaagtcgcggcccagcagggagcagagcctggttgactgggccctccccaagctgaacgacaagaggcggcttctccagatcatcgacccgagactggaggggcagtactcggccagagccgcccacaaagcctgcagccttgcgttctactgcctgagccagaaccccaaggccaggccactcatgagcgacgtcgtcgagaccctcgaaccgttgcagggcagcggtggaggcgacggacgcggccagccttctggccttcctgactataggggtcgccgcaggataaccgggaacagcgtccacttcagggccatcccgaaccccaagtgctcccccgccgtcccggccacggcttgccgagtgcggtgatgggtgctgtgtttcggttggagttgccggggtaggttccgttgtgtatattgcggccgtgggcggtggtgtgtgtgtgggtgcatgtgtgtgcttggcggcggcggggtttcggtttcttctcgggttttggccggcgttttgatgtgtaaatttgatctgcgtgctgcattgctgctgctgcttttgtaaggccctctaattttcactgtggtcttatgtatccttcgactgagcgagccctgctgaaactggcgggttcgggattaaccctagaaatgaaatgaaaggctgaaccgagagcgggttggatgattgatatggc

SEQ ID NO: 33402 - protein, 412 aa, Zea mays subsp. mays
  peptide (1)..(412): Ceres Seq. ID no. 12411779
  misc_feature (81)..(358): Pfam Name: Pfam Description:  Protein kinase domain
  misc_feature (1)..(412): NCBI GI NO: 30679085 NR Description: protein kinase family [Arabidopsis thaliana]
  misc_feature (1)..(412): NCBI GI NO: 9542860 NR Description: protein kinase-like protein [Arabidopsis thaliana]
  misc_feature (44)..(362): NCBI GI NO: 15225019 NR Description: putative protein kinase; protein id: At2g05940
  misc_feature (45)..(362): NCBI GI NO: 30013675 NR Description: Avr9/Cf-9 rapidly elicited protein 264
  misc_feature (1)..(364): NCBI GI NO: 15241220 NR Description: protein kinase-like protein; protein id:At5g56460
  misc_feature (22)..(365): NCBI GI NO: 22325532 NR Description: putative protein kinase; protein id: At2g07180
  misc_feature (22)..(365): NCBI GI NO: 25287636 NR Description: probable protein kinase
  misc_feature (22)..(365): NCBI GI NO: 19423982 NR Description: putative protein kinase [Arabidopsis thaliana]
  misc_feature (48)..(362): NCBI GI NO: 22773239 NR Description: Putative protein kinase
  misc_feature (44)..(362): NCBI GI NO: 10176804 NR Description: serine/threonine protein kinase-like
MGNCGTREENAVVAAHAQVQQLHLLQNPAKNAIGDRKHNRTSSDISDPSTPRKAEDAKNISIYNDVIVFTLFELETITKSFRADYVLGEGGFGTVYKGYIDENVRVGLKSLPVAVKVLNKDGHQGHREWLTEVNCLGQLRHPNLVKLIGYCCEDDHRLLVYEFMFRGSLENHLFRKTATPLPWGTRMSIALGAAKGLACLHNAQRPVIYRDFKTSNILLDSDYTAKLSDFGLAKAGPEGDQTHVSTRVMGTYGYAAPEYVMTGHLTARSDVYSFGVVLLELLTGRKSIDKSRPSREQSLVDWALPKLNDKRRLLQIIDPRLEGQYSARAAHKACSLAFYCLSQNPKARPLMSDVVETLEPLQGSGGGDGRGQPSGLPDYRGRRRITGNSVHFRAIPNPKCSPAVPATACRVR

SEQ ID NO: 33403 - protein, 249 aa, Zea mays subsp. mays
  peptide (1)..(249): Ceres Seq. ID no. 12411780
  misc_feature (1)..(195): Pfam Name: Pfam Description:  Protein kinase domain
  misc_feature (1)..(249): NCBI GI NO: 30679085 NR Description: protein kinase family [Arabidopsis thaliana]
  misc_feature (1)..(249): NCBI GI NO: 9542860 NR Description: protein kinase-like protein [Arabidopsis thaliana]
  misc_feature (1)..(199): NCBI GI NO: 15225019 NR Description: putative protein kinase; protein id: At2g05940
  misc_feature (1)..(199): NCBI GI NO: 30013675 NR Description: Avr9/Cf-9 rapidly elicited protein 264
  misc_feature (1)..(201): NCBI GI NO: 15241220 NR Description: protein kinase-like protein; protein id:At5g56460
  misc_feature (1)..(202): NCBI GI NO: 22325532 NR Description: putative protein kinase; protein id: At2g07180
  misc_feature (1)..(202): NCBI GI NO: 25287636 NR Description: probable protein kinase
  misc_feature (1)..(202): NCBI GI NO: 19423982 NR Description: putative protein kinase [Arabidopsis thaliana]
  misc_feature (1)..(199): NCBI GI NO: 22773239 NR Description: Putative protein kinase
  misc_feature (1)..(199): NCBI GI NO: 10176804 NR Description: serine/threonine protein kinase-like
MFRGSLENHLFRKTATPLPWGTRMSIALGAAKGLACLHNAQRPVIYRDFKTSNILLDSDYTAKLSDFGLAKAGPEGDQTHVSTRVMGTYGYAAPEYVMTGHLTARSDVYSFGVVLLELLTGRKSIDKSRPSREQSLVDWALPKLNDKRRLLQIIDPRLEGQYSARAAHKACSLAFYCLSQNPKARPLMSDVVETLEPLQGSGGGDGRGQPSGLPDYRGRRRITGNSVHFRAIPNPKCSPAVPATACRVR

SEQ ID NO: 33404 - protein, 226 aa, Zea mays subsp. mays
  peptide (1)..(226): Ceres Seq. ID no. 12411781
  misc_feature (1)..(172): Pfam Name: Pfam Description:  Protein kinase domain
  misc_feature (1)..(226): NCBI GI NO: 30679085 NR Description: protein kinase family [Arabidopsis thaliana]
  misc_feature (1)..(226): NCBI GI NO: 9542860 NR Description: protein kinase-like protein [Arabidopsis thaliana]
  misc_feature (1)..(176): NCBI GI NO: 15225019 NR Description: putative protein kinase; protein id: At2g05940
  misc_feature (1)..(176): NCBI GI NO: 30013675 NR Description: Avr9/Cf-9 rapidly elicited protein 264
  misc_feature (1)..(178): NCBI GI NO: 15241220 NR Description: protein kinase-like protein; protein id:At5g56460
  misc_feature (1)..(179): NCBI GI NO: 22325532 NR Description: putative protein kinase; protein id: At2g07180
  misc_feature (1)..(179): NCBI GI NO: 25287636 NR Description: probable protein kinase
  misc_feature (1)..(179): NCBI GI NO: 19423982 NR Description: putative protein kinase [Arabidopsis thaliana]
  misc_feature (1)..(176): NCBI GI NO: 22773239 NR Description: Putative protein kinase
  misc_feature (1)..(176): NCBI GI NO: 10176804 NR Description: serine/threonine protein kinase-like
MSIALGAAKGLACLHNAQRPVIYRDFKTSNILLDSDYTAKLSDFGLAKAGPEGDQTHVSTRVMGTYGYAAPEYVMTGHLTARSDVYSFGVVLLELLTGRKSIDKSRPSREQSLVDWALPKLNDKRRLLQIIDPRLEGQYSARAAHKACSLAFYCLSQNPKARPLMSDVVETLEPLQGSGGGDGRGQPSGLPDYRGRRRITGNSVHFRAIPNPKCSPAVPATACRVR

SEQ ID NO: 33405 - DNA, 1314 bp, Zea mays subsp. mays
  misc_feature (1)..(1314): Ceres Seq. ID no. 12342241
gctttccatgaagaaccaagaaatagtacaggcatcagggaacagatcttggacattcttacattcgagacattatggttttgtgttattgatcaacttggatcaagtaataatgttgtcaaatctgttctcatcaacatcatcgtcagaataataccatttgttctgtggggtctaaaatctgcacatgttatttgcaggttcgtattgatgccgctggcagtatttgtcttcctagcctataaatactggaaaacacggataacaatagatgcagtcgagaagttcctgcgaatgcagcatatgctcgttccgatgagatatgcatacacaaacatcattgcaatcaccagccatttcagagacaagctcggacaaggaggctacggtactgtatacaagggggtgctacagccaggtgaagttcatgttgctattaagatgctaggcaactccaactgtaacggagacgagttcatcagtgaggtggccaccattggaaagatccaccatgtcaatgttgtgcgcctcattgggttttgctccgaggaaaatatcagggcacttatctatgagttcatgccccgtggatctctcgataagtacatcttctcgtcggagaagacattctcatgggacaaactcaacgagatcgctctgggcattgctagaggtctcaactacctacatcacgggtgtgatatgcagattgtacacttcgacatcaagccacacaacatccttcttgacagcaactttgttccaaaagttgctgattttgggcttgccaaactgttcccaagaggcgacactttcgtgccactgagcgctatgcggggaacgataggatatatagctccagatggtatctcgaagctttggtgtcatctctagcaaatctgatgtgtatagctttggaatgctactgttggagatgacgggcgggcgaaggaatgcagatcctcatgcaggaagctccagtcaagcatactacccatccttggtgtacagccaactaagccaaggagatgtgggcgggatcagtaaaggtgttgatatgcacgagttagagaagaagctatgtatcattggactttggtgcatccagatgaagacgcaagatcgacagacgatgagtgaggtcatagagatgcttgaagctagtgtcgatggcatccaaatgcctccaaggccattcttttgtgatgacgagggtgatagttcttactctgcaatctctgaattggatacaatagaagagtagtagtagtaaaatacacttgtgtatatttgatcttaatgtattagactact

SEQ ID NO: 33406 - protein, 297 aa, Zea mays subsp. mays
  peptide (1)..(297): Ceres Seq. ID no. 12342242
  misc_feature (28)..(292): NCBI GI NO: 13377507 NR Description: TAK14 [Triticum aestivum]
  misc_feature (64)..(292): NCBI GI NO: 13377503 NR Description: TAK33 [Triticum aestivum]
  misc_feature (47)..(292): NCBI GI NO: 5523858 NR Description: receptor-like kinase ARK1AS [Hordeum vulgare]
  misc_feature (28)..(292): NCBI GI NO: 5499713 NR Description: receptor-like kinase ARK1AS [Triticum aestivum]
  misc_feature (64)..(292): NCBI GI NO: 5523856 NR Description: receptor-like kinase [Hordeum vulgare]
  misc_feature (67)..(292): NCBI GI NO: 34895304 NR Description: putative receptor kinase
  misc_feature (67)..(292): NCBI GI NO: 34895310 NR Description: putative receptor kinase
  misc_feature (67)..(292): NCBI GI NO: 34895286 NR Description: putative receptor kinase
  misc_feature (64)..(292): NCBI GI NO: 34895290 NR Description: putative receptor kinase
  misc_feature (44)..(292): NCBI GI NO: 7716489 NR Description: receptor-like protein kinase [Oryza sativa]
AFHEEPRNSTGIREQILDILTFETLWFCVIDQLGSSNNVVKSVLINIIVRIIPFVLWGLKSAHVICRFVLMPLAVFVFLAYKYWKTRITIDAVEKFLRMQHMLVPMRYAYTNIIAITSHFRDKLGQGGYGTVYKGVLQPGEVHVAIKMLGNSNCNGDEFISEVATIGKIHHVNVVRLIGFCSEENIRALIYEFMPRGSLDKYIFSSEKTFSWDKLNEIALGIARGLNYLHHGCDMQIVHFDIKPHNILLDSNFVPKVADFGLAKLFPRGDTFVPLSAMRGTIGYIAPDGISKLWCHL

SEQ ID NO: 33407 - protein, 227 aa, Zea mays subsp. mays
  peptide (1)..(227): Ceres Seq. ID no. 12342243
  misc_feature (1)..(222): NCBI GI NO: 13377507 NR Description: TAK14 [Triticum aestivum]
  misc_feature (1)..(222): NCBI GI NO: 13377503 NR Description: TAK33 [Triticum aestivum]
  misc_feature (1)..(222): NCBI GI NO: 5523858 NR Description: receptor-like kinase ARK1AS [Hordeum vulgare]
  misc_feature (1)..(222): NCBI GI NO: 5499713 NR Description: receptor-like kinase ARK1AS [Triticum aestivum]
  misc_feature (1)..(222): NCBI GI NO: 5523856 NR Description: receptor-like kinase [Hordeum vulgare]
  misc_feature (1)..(222): NCBI GI NO: 34895304 NR Description: putative receptor kinase
  misc_feature (1)..(222): NCBI GI NO: 34895310 NR Description: putative receptor kinase
  misc_feature (1)..(222): NCBI GI NO: 34895286 NR Description: putative receptor kinase
  misc_feature (1)..(222): NCBI GI NO: 34895290 NR Description: putative receptor kinase
  misc_feature (1)..(222): NCBI GI NO: 7716489 NR Description: receptor-like protein kinase [Oryza sativa]
MPLAVFVFLAYKYWKTRITIDAVEKFLRMQHMLVPMRYAYTNIIAITSHFRDKLGQGGYGTVYKGVLQPGEVHVAIKMLGNSNCNGDEFISEVATIGKIHHVNVVRLIGFCSEENIRALIYEFMPRGSLDKYIFSSEKTFSWDKLNEIALGIARGLNYLHHGCDMQIVHFDIKPHNILLDSNFVPKVADFGLAKLFPRGDTFVPLSAMRGTIGYIAPDGISKLWCHL

SEQ ID NO: 33408 - protein, 199 aa, Zea mays subsp. mays
  peptide (1)..(199): Ceres Seq. ID no. 12342244
  misc_feature (1)..(194): NCBI GI NO: 13377507 NR Description: TAK14 [Triticum aestivum]
  misc_feature (1)..(194): NCBI GI NO: 13377503 NR Description: TAK33 [Triticum aestivum]
  misc_feature (1)..(194): NCBI GI NO: 5523858 NR Description: receptor-like kinase ARK1AS [Hordeum vulgare]
  misc_feature (1)..(194): NCBI GI NO: 5499713 NR Description: receptor-like kinase ARK1AS [Triticum aestivum]
  misc_feature (1)..(194): NCBI GI NO: 5523856 NR Description: receptor-like kinase [Hordeum vulgare]
  misc_feature (1)..(194): NCBI GI NO: 34895304 NR Description: putative receptor kinase
  misc_feature (1)..(194): NCBI GI NO: 34895310 NR Description: putative receptor kinase
  misc_feature (1)..(194): NCBI GI NO: 34895286 NR Description: putative receptor kinase
  misc_feature (1)..(194): NCBI GI NO: 34895290 NR Description: putative receptor kinase
  misc_feature (1)..(194): NCBI GI NO: 7716489 NR Description: receptor-like protein kinase [Oryza sativa]
MQHMLVPMRYAYTNIIAITSHFRDKLGQGGYGTVYKGVLQPGEVHVAIKMLGNSNCNGDEFISEVATIGKIHHVNVVRLIGFCSEENIRALIYEFMPRGSLDKYIFSSEKTFSWDKLNEIALGIARGLNYLHHGCDMQIVHFDIKPHNILLDSNFVPKVADFGLAKLFPRGDTFVPLSAMRGTIGYIAPDGISKLWCHL

SEQ ID NO: 33409 - DNA, 1056 bp, Zea mays subsp. mays
  misc_feature (1)..(1056): Ceres Seq. ID no. 13493533
ctagacgccacacacacacatcgcttctccacacgacctcgctgaaccggaagacccgcacacacacgccacttgtgcaccatggcgccccgggtggcggacaagtcgccattgccgctggccaccggcctgaagctgggcgtaggcggaggcatgggcctgggtccacactaccgaggcgtgaggaagcggccgtggggacgttacgccgcggagatccgcgacccagccaagaagagtcgcgtgtggctgggcacgtacgacacggccgaggaggccgccaaggcctacgacgtcgccgcccgcgagttccgtggcgccaaggccaagactaacttcccgttccccctcgccgtcgccgtcgccgtcgccggcggtgctggtagccccagcagcgacagcaccaccttggaatcgagctgtggcggcagcgggtgtggcgtcgaagcgcctgtgcaggcggccatgccgctgaccccggccctcgacctcgatctcttccaccgggcggccgccgtcagcgcggtcaccaccggcggcatgccctttccgttcaaggccttccccgtcgtgcgcccgaccccacatcagtacttcctctacaatcaggccgcggcggccgcggcagccgggtacaggatggtcaaggtcgcctcagctccagtcaccgtagccgccgtcgcgcagagcgactccgactcctcgtctgtggttgatcgcacctgttcgcctcccgcggtgacggcaaagaaggaggtcagcttcgaactggatctgaactggccgccgccggcagagaactagtcgcaccggagttttcagctgacgactttgcagtttcctttttcccttttggccttcatcaggaattgtagtgtagctctgggtgtttggtcttttttttttcttgcatgtagagtgtagactatgatatggtggagccttgtacatagtactgtagtgttttttttttccgccgagacggagtagatctgttcgtgtgtctggacagatcaaaccggcgttgatatgggctttaaaccatggagcatgttg

SEQ ID NO: 33410 - protein, 240 aa, Zea mays subsp. mays
  peptide (1)..(240): Ceres Seq. ID no. 13493534
  misc_feature (28)..(88): Pfam Name: Pfam Description:  AP2 domain
  misc_feature (1)..(240): NCBI GI NO: 34908900 NR Description: ethylene-responsive element binding factor 3
  misc_feature (1)..(239): NCBI GI NO: 4099921 NR Description: EREBP-3 homolog [Stylosanthes hamata]
  misc_feature (1)..(239): NCBI GI NO: 4099914 NR Description: ethylene-responsive element binding protein homolog
  misc_feature (1)..(239): NCBI GI NO: 38345793 NR Description: OSJNBa0085I10.10
  misc_feature (30)..(239): NCBI GI NO: 8809573 NR Description: ethylene-responsive element binding factor
  misc_feature (31)..(239): NCBI GI NO: 15232526 NR Description: ethylene responsive element binding factor 4
  misc_feature (30)..(239): NCBI GI NO: 7489114 NR Description: DNA binding protein EREBP-3 - common tobacco
  misc_feature (24)..(240): NCBI GI NO: 30526297 NR Description: ethylene response factor 2
  misc_feature (5)..(240): NCBI GI NO: 28274832 NR Description: ethylene response factor 3
  misc_feature (31)..(212): NCBI GI NO: 2281635 NR Description: AP2 domain containing protein RAP2.5
MAPRVADKSPLPLATGLKLGVGGGMGLGPHYRGVRKRPWGRYAAEIRDPAKKSRVWLGTYDTAEEAAKAYDVAAREFRGAKAKTNFPFPLAVAVAVAGGAGSPSSDSTTLESSCGGSGCGVEAPVQAAMPLTPALDLDLFHRAAAVSAVTTGGMPFPFKAFPVVRPTPHQYFLYNQAAAAAAAGYRMVKVASAPVTVAAVAQSDSDSSSVVDRTCSPPAVTAKKEVSFELDLNWPPPAEN

SEQ ID NO: 33411 - protein, 216 aa, Zea mays subsp. mays
  peptide (1)..(216): Ceres Seq. ID no. 13493535
  misc_feature (4)..(64): Pfam Name: Pfam Description:  AP2 domain
  misc_feature (1)..(216): NCBI GI NO: 34908900 NR Description: ethylene-responsive element binding factor 3
  misc_feature (1)..(215): NCBI GI NO: 4099921 NR Description: EREBP-3 homolog [Stylosanthes hamata]
  misc_feature (1)..(215): NCBI GI NO: 4099914 NR Description: ethylene-responsive element binding protein homolog
  misc_feature (1)..(215): NCBI GI NO: 38345793 NR Description: OSJNBa0085I10.10
  misc_feature (6)..(215): NCBI GI NO: 8809573 NR Description: ethylene-responsive element binding factor
  misc_feature (7)..(215): NCBI GI NO: 15232526 NR Description: ethylene responsive element binding factor 4
  misc_feature (6)..(215): NCBI GI NO: 7489114 NR Description: DNA binding protein EREBP-3 - common tobacco
  misc_feature (1)..(216): NCBI GI NO: 30526297 NR Description: ethylene response factor 2
  misc_feature (1)..(216): NCBI GI NO: 28274832 NR Description: ethylene response factor 3
  misc_feature (7)..(188): NCBI GI NO: 2281635 NR Description: AP2 domain containing protein RAP2.5
MGLGPHYRGVRKRPWGRYAAEIRDPAKKSRVWLGTYDTAEEAAKAYDVAAREFRGAKAKTNFPFPLAVAVAVAGGAGSPSSDSTTLESSCGGSGCGVEAPVQAAMPLTPALDLDLFHRAAAVSAVTTGGMPFPFKAFPVVRPTPHQYFLYNQAAAAAAAGYRMVKVASAPVTVAAVAQSDSDSSSVVDRTCSPPAVTAKKEVSFELDLNWPPPAEN

SEQ ID NO: 33412 - DNA, 1081 bp, Zea mays subsp. mays
  misc_feature (1)..(1081): Ceres Seq. ID no. 12386976
aaaggctacaagcctacaagcaaccgcgtccgcgtgtggagcaaggaaggagaggggagccgagcgggcaaaggggagcgcggcgacagacatggcggagcagcacaaggaggagtcgggcgtgacagtgctggacaagatctccgacaagctccacgggcgcgggggcggctcgtcttcgtcgtcggactcggacgacgagcgctcgtcggcgacggccgccgtgaaggccaagatctaccgcatcttcgggcgcgagaagcccgtgcactccgtcctcggcggcggcaagccggccgatctgtttctatggaggaacaagaggatctctggtggggtgctcgcaggcgcaactgccttctggctgctgtttgaggtcatggattaccacctcctcaccctgctatgccactgcctcatcctcaccctggccatcctgttcctctggtccaatgccacgactttcatcaacaagtctcctcctaacatccccgaggtgaagatcccagatgacctggctgtgaattttgcacgttccctgagatatgagatcaacaggggttttgctaccttgagggagattggccaaggccatgacctcaagaaatttctgattgtgattgcaggactgtggatcctttctgttcttgggagctgctgcaatttcctcaccttgtcttacatagtttttatggtactgtacactgtaccggtcctgtatgagaaacatgaggataaggttgatgcttttggtgagaaggccatggtcgagctgaagaagtactacgccatcttcgacgagaaatgtctatcaaagattccgaagggcccattaaaagacaagaagcaacattagaagcgtagaatcagataagggtctgcggtgatttatcatctcttttgaccattactcgtcggttttggaggatggatgtgattccatgtctaaatacctggacgtgctctagtgttttagtgtggtcagtatcaatgttctaaattatctgagattacgctgaatcatgttctgaagtccacgtttaactttgctctccctatcctttggaagtggcaatttcct

SEQ ID NO: 33413 - protein, 284 aa, Zea mays subsp. mays
  peptide (1)..(284): Ceres Seq. ID no. 12386977
  misc_feature (31)..(282): NCBI GI NO: 34909318 NR Description: OSJNBb0021A09.5
  misc_feature (66)..(282): NCBI GI NO: 34904202 NR Description: P0492F05.25
  misc_feature (37)..(77): NCBI GI NO: 34904202 NR Description: P0492F05.25
  misc_feature (42)..(283): NCBI GI NO: 15236556 NR Description: putative protein; protein id: At4g23630
  misc_feature (42)..(283): NCBI GI NO: 15237093 NR Description: putative protein; protein id: At4g11220
  misc_feature (31)..(282): NCBI GI NO: 15238125 NR Description: putative protein; protein id: At5g41600
  misc_feature (31)..(276): NCBI GI NO: 15222616 NR Description: hypothetical protein; protein id: At1g64090
  misc_feature (31)..(281): NCBI GI NO: 18406991 NR Description: expressed protein; protein id: At2g46170
  misc_feature (35)..(281): NCBI GI NO: 15233147 NR Description: putative protein; protein id: At3g61560.1
  misc_feature (55)..(274): NCBI GI NO: 15234108 NR Description: hypothetical protein; protein id: At4g01230.1
KATSLQATASACGARKERGAERAKGSAATDMAEQHKEESGVTVLDKISDKLHGRGGGSSSSSDSDDERSSATAAVKAKIYRIFGREKPVHSVLGGGKPADLFLWRNKRISGGVLAGATAFWLLFEVMDYHLLTLLCHCLILTLAILFLWSNATTFINKSPPNIPEVKIPDDLAVNFARSLRYEINRGFATLREIGQGHDLKKFLIVIAGLWILSVLGSCCNFLTLSYIVFMVLYTVPVLYEKHEDKVDAFGEKAMVELKKYYAIFDEKCLSKIPKGPLKDKKQH

SEQ ID NO: 33414 - protein, 254 aa, Zea mays subsp. mays
  peptide (1)..(254): Ceres Seq. ID no. 12386978
  misc_feature (1)..(252): NCBI GI NO: 34909318 NR Description: OSJNBb0021A09.5
  misc_feature (36)..(252): NCBI GI NO: 34904202 NR Description: P0492F05.25
  misc_feature (7)..(47): NCBI GI NO: 34904202 NR Description: P0492F05.25
  misc_feature (12)..(253): NCBI GI NO: 15236556 NR Description: putative protein; protein id: At4g23630
  misc_feature (12)..(253): NCBI GI NO: 15237093 NR Description: putative protein; protein id: At4g11220
  misc_feature (1)..(252): NCBI GI NO: 15238125 NR Description: putative protein; protein id: At5g41600
  misc_feature (1)..(246): NCBI GI NO: 15222616 NR Description: hypothetical protein; protein id: At1g64090
  misc_feature (1)..(251): NCBI GI NO: 18406991 NR Description: expressed protein; protein id: At2g46170
  misc_feature (5)..(251): NCBI GI NO: 15233147 NR Description: putative protein; protein id: At3g61560.1
  misc_feature (25)..(244): NCBI GI NO: 15234108 NR Description: hypothetical protein; protein id: At4g01230.1
MAEQHKEESGVTVLDKISDKLHGRGGGSSSSSDSDDERSSATAAVKAKIYRIFGREKPVHSVLGGGKPADLFLWRNKRISGGVLAGATAFWLLFEVMDYHLLTLLCHCLILTLAILFLWSNATTFINKSPPNIPEVKIPDDLAVNFARSLRYEINRGFATLREIGQGHDLKKFLIVIAGLWILSVLGSCCNFLTLSYIVFMVLYTVPVLYEKHEDKVDAFGEKAMVELKKYYAIFDEKCLSKIPKGPLKDKKQH

SEQ ID NO: 33415 - protein, 158 aa, Zea mays subsp. mays
  peptide (1)..(158): Ceres Seq. ID no. 12386979
  misc_feature (1)..(156): NCBI GI NO: 34909318 NR Description: OSJNBb0021A09.5
  misc_feature (1)..(156): NCBI GI NO: 34904202 NR Description: P0492F05.25
  misc_feature (1)..(157): NCBI GI NO: 15236556 NR Description: putative protein; protein id: At4g23630
  misc_feature (1)..(157): NCBI GI NO: 15237093 NR Description: putative protein; protein id: At4g11220
  misc_feature (1)..(156): NCBI GI NO: 15238125 NR Description: putative protein; protein id: At5g41600
  misc_feature (1)..(150): NCBI GI NO: 15222616 NR Description: hypothetical protein; protein id: At1g64090
  misc_feature (1)..(155): NCBI GI NO: 18406991 NR Description: expressed protein; protein id: At2g46170
  misc_feature (1)..(155): NCBI GI NO: 15233147 NR Description: putative protein; protein id: At3g61560.1
  misc_feature (1)..(148): NCBI GI NO: 15234108 NR Description: hypothetical protein; protein id: At4g01230.1
  misc_feature (1)..(157): NCBI GI NO: 18398810 NR Description: expressed protein; protein id: At3g10260
MDYHLLTLLCHCLILTLAILFLWSNATTFINKSPPNIPEVKIPDDLAVNFARSLRYEINRGFATLREIGQGHDLKKFLIVIAGLWILSVLGSCCNFLTLSYIVFMVLYTVPVLYEKHEDKVDAFGEKAMVELKKYYAIFDEKCLSKIPKGPLKDKKQH

SEQ ID NO: 33416 - DNA, 1445 bp, Zea mays subsp. mays
  misc_feature (1)..(1445): Ceres Seq. ID no. 12411772
actatccattttcattcaatgcgtccgcgccgcgcgcctccattcctctcgattcccttcctccttccttgttcgaggacctccgtgaccgtggccgagggattgaggacggaaagcgaaaatgatgctgacgcgggcgtcgatgggggtgatggatgcggcggcggtggacgaggtggtgcgtcgcctcgtcgagggcggccgcgggggccggcaggtgcagatgtccgaggccgagatccgccagctctgcgtcgaggccaaacaggtgctgctgtcgcagcccaacctcctccgcatccacgcgcccgtcaagatctgcggtgatatccatggacaatttgttgatctcttgaggctctttgatttgggtggttatcctccaacttcaacttatattttccttggagactatgtggatagaggcaaacaaagcttagaaaccatatgtctgcttctggcatacaagttgaagtaccctgataatatataccttttaaggggaaaccatgaagatgcaaaaattaacagagtttatggtttctatgatgaatgtaaaaggagattcaatgttcgactatggaagatattctgtgattgcttcaactgcttgcctatggcagcacttattgatgacaaaatattatgcatgcatggtggcctctcacctgaattgactagcttggatcaaataaaagatattgagaggcctaccgaaattccagactatggtcttctgtgcgatctcctttggtctgatcccagtcatgatacagaaggttggggggagagtgatagaggtgtttcttgcacttttggcgcagataagcttgttgaatttttggagaagaatgatcttgaccttgtgtgcagagctcatcaggtggtagaagatggctacgagttctttgcagagagaagactagtgaccatcttttcagctccaaactactgtggcgaatttgataatgcaggtgctctattgagcatagatgaaagcttgatgtgttcttttcagatcttgaaaccaaatgaaacaggtgcaccacattcaaggaaacctcttccaagcaaggcaccaaaaggagagaacgtctaatttgtatccagtgacctaatcacaatcgatgtcagctcgaagggggcgatctcgttgtctcggatccaccagggcatggcattagcgttctacacttgctgaatttgtgtggactcaatcggcagcgcttacattcttctgtacagcagcagtgtttctaacttggcatatcgtccgttctgatagttacattgccacagctgcaatattttagtcgggtggacaaggcattttgttgggtacagtagctgttgttttgttagcctttttttggtaatgtttgtttggttgattgaacgctgtgagttttgtttgccgcgtatcttcgtcaggctcgggtatttac

SEQ ID NO: 33417 - protein, 325 aa, Zea mays subsp. mays
  peptide (1)..(325): Ceres Seq. ID no. 12411773
  misc_feature (62)..(257): Pfam Name: Pfam Description:  Calcineurin-like phosphoesterase
  misc_feature (8)..(324): NCBI GI NO: 34895162 NR Description: putative serine/threonine protein phosphatase
  misc_feature (9)..(320): NCBI GI NO: 29290586 NR Description: serine threonine protein phosphatase
  misc_feature (11)..(321): NCBI GI NO: 1346765 NR Description: SERINE/THREONINE PROTEIN PHOSPHATASE PP1
  misc_feature (2)..(316): NCBI GI NO: 30690812 NR Description: serine/threonine protein phosphatase type one(PP1)
  misc_feature (2)..(321): NCBI GI NO: 15230010 NR Description: serine/threonine protein phosphatase
  misc_feature (2)..(313): NCBI GI NO: 30690815 NR Description: serine/threonine protein phosphatase type one(PP1)
  misc_feature (2)..(316): NCBI GI NO: 3153205 NR Description: serine/threonine protein phosphatase type one
  misc_feature (10)..(313): NCBI GI NO: 21593410 NR Description: TOPP8 serine/threonine protein phosphatase type one
  misc_feature (11)..(309): NCBI GI NO: 15227080 NR Description: phosphoprotein phosphatase-type 1 catalyticsubunit
  misc_feature (9)..(308): NCBI GI NO: 5917726 NR Description: serine/threonine protein phosphatase 1; PP1
MMLTRASMGVMDAAAVDEVVRRLVEGGRGGRQVQMSEAEIRQLCVEAKQVLLSQPNLLRIHAPVKICGDIHGQFVDLLRLFDLGGYPPTSTYIFLGDYVDRGKQSLETICLLLAYKLKYPDNIYLLRGNHEDAKINRVYGFYDECKRRFNVRLWKIFCDCFNCLPMAALIDDKILCMHGGLSPELTSLDQIKDIERPTEIPDYGLLCDLLWSDPSHDTEGWGESDRGVSCTFGADKLVEFLEKNDLDLVCRAHQVVEDGYEFFAERRLVTIFSAPNYCGEFDNAGALLSIDESLMCSFQILKPNETGAPHSRKPLPSKAPKGENV

SEQ ID NO: 33418 - protein, 324 aa, Zea mays subsp. mays
  peptide (1)..(324): Ceres Seq. ID no. 12411774
  misc_feature (61)..(256): Pfam Name: Pfam Description:  Calcineurin-like phosphoesterase
  misc_feature (7)..(323): NCBI GI NO: 34895162 NR Description: putative serine/threonine protein phosphatase
  misc_feature (8)..(319): NCBI GI NO: 29290586 NR Description: serine threonine protein phosphatase
  misc_feature (10)..(320): NCBI GI NO: 1346765 NR Description: SERINE/THREONINE PROTEIN PHOSPHATASE PP1
  misc_feature (1)..(315): NCBI GI NO: 30690812 NR Description: serine/threonine protein phosphatase type one(PP1)
  misc_feature (1)..(320): NCBI GI NO: 15230010 NR Description: serine/threonine protein phosphatase
  misc_feature (1)..(312): NCBI GI NO: 30690815 NR Description: serine/threonine protein phosphatase type one(PP1)
  misc_feature (1)..(315): NCBI GI NO: 3153205 NR Description: serine/threonine protein phosphatase type one
  misc_feature (9)..(312): NCBI GI NO: 21593410 NR Description: TOPP8 serine/threonine protein phosphatase type one
  misc_feature (10)..(308): NCBI GI NO: 15227080 NR Description: phosphoprotein phosphatase-type 1 catalyticsubunit
  misc_feature (8)..(307): NCBI GI NO: 5917726 NR Description: serine/threonine protein phosphatase 1; PP1
MLTRASMGVMDAAAVDEVVRRLVEGGRGGRQVQMSEAEIRQLCVEAKQVLLSQPNLLRIHAPVKICGDIHGQFVDLLRLFDLGGYPPTSTYIFLGDYVDRGKQSLETICLLLAYKLKYPDNIYLLRGNHEDAKINRVYGFYDECKRRFNVRLWKIFCDCFNCLPMAALIDDKILCMHGGLSPELTSLDQIKDIERPTEIPDYGLLCDLLWSDPSHDTEGWGESDRGVSCTFGADKLVEFLEKNDLDLVCRAHQVVEDGYEFFAERRLVTIFSAPNYCGEFDNAGALLSIDESLMCSFQILKPNETGAPHSRKPLPSKAPKGENV

SEQ ID NO: 33419 - protein, 318 aa, Zea mays subsp. mays
  peptide (1)..(318): Ceres Seq. ID no. 12411775
  misc_feature (55)..(250): Pfam Name: Pfam Description:  Calcineurin-like phosphoesterase
  misc_feature (1)..(317): NCBI GI NO: 34895162 NR Description: putative serine/threonine protein phosphatase
  misc_feature (2)..(313): NCBI GI NO: 29290586 NR Description: serine threonine protein phosphatase
  misc_feature (4)..(314): NCBI GI NO: 1346765 NR Description: SERINE/THREONINE PROTEIN PHOSPHATASE PP1
  misc_feature (1)..(309): NCBI GI NO: 30690812 NR Description: serine/threonine protein phosphatase type one(PP1)
  misc_feature (1)..(314): NCBI GI NO: 15230010 NR Description: serine/threonine protein phosphatase
  misc_feature (1)..(306): NCBI GI NO: 30690815 NR Description: serine/threonine protein phosphatase type one(PP1)
  misc_feature (1)..(309): NCBI GI NO: 3153205 NR Description: serine/threonine protein phosphatase type one
  misc_feature (3)..(306): NCBI GI NO: 21593410 NR Description: TOPP8 serine/threonine protein phosphatase type one
  misc_feature (4)..(302): NCBI GI NO: 15227080 NR Description: phosphoprotein phosphatase-type 1 catalyticsubunit
  misc_feature (2)..(301): NCBI GI NO: 5917726 NR Description: serine/threonine protein phosphatase 1; PP1
MGVMDAAAVDEVVRRLVEGGRGGRQVQMSEAEIRQLCVEAKQVLLSQPNLLRIHAPVKICGDIHGQFVDLLRLFDLGGYPPTSTYIFLGDYVDRGKQSLETICLLLAYKLKYPDNIYLLRGNHEDAKINRVYGFYDECKRRFNVRLWKIFCDCFNCLPMAALIDDKILCMHGGLSPELTSLDQIKDIERPTEIPDYGLLCDLLWSDPSHDTEGWGESDRGVSCTFGADKLVEFLEKNDLDLVCRAHQVVEDGYEFFAERRLVTIFSAPNYCGEFDNAGALLSIDESLMCSFQILKPNETGAPHSRKPLPSKAPKGENV

SEQ ID NO: 33420 - DNA, 1995 bp, Zea mays subsp. mays
  misc_feature (1)..(1995): Ceres Seq. ID no. 12423833
gcacgagaccattacctagaacatcctaatcaaaaagagacgcgaatccctccctcgccccacgtccgaggtcgctcgccaattcgatccgcctcatcgtcgcccgcccgcccgtccgccggtcgaccttgactgctccgtcgcacgtggcgtttcgcagcgcggaatctacccctgggttgggttgggagatccggggaaacccttgttcccgggcgctccgggctcgaatctcgctgcagacgggcaatgtgagcgctctccatcggagagggacgatctgcggggcggttgttggccgggtgaatcgtgcggtgcggggttgcgggaatggagcacgtgatcggagggaagtttaagcttgggaagaagatcgggagcggatctttcggggagctctatctcggtgtgaacgtacagagcggcgaagaggtggctatcaagttggaatctgtaaaatcaaggcatcctcagcttcattatgagtcaaaactatacatgcttctccaagggggaactggaattcctcatttgaaatggtttggagtggatggggagtacaatgtcatggtcattgatcttcttggtccaagcctcgaagacttgttcaactactgtaacagaaagttttctcttaaaacagtacttatgctagctgatcagatgatatctagggtagagtacatgcacacgagggggtttcttcatcgtgatatcaagccagacaacttcctcatgggcttaggccgtaaaacaagtcaggtttatgtcattgactatggccttgcgaagaagtatcgggacctccaaactcatagacacattccatacagggagaacaaaaacctcacaggaacagcacgatatgctagtgtaaacacccatcttggagtagaacaaagcaggagagatgacttagagtctcttggttatgtgctgatgtacttcttaagaggaagccttccttggcaaggcctgaaagctggaacgaaaaaacaaaagtatgacaaaattagtgagaagaaaatgctaacctcaattgaggccctgtgtaaatcttatccatcagaattcgttacatatttccattattgccgctctttgcaatttgaagataagccagactacagctatttgaagaaaaattttcgggatttattcatccgtgaaggttaccagcctgattatgtatttgattggactgtatcaaggcaagctgcggacaataacagattgcgactgagtgggaagacaggtgggttggtgggaccatctgtggatcgggctgaacgagctgcatcaaaacaggatgttccacatagattcactggtccagctgatgcattggctaaaagaactggctctggttctggtcattatggagaacacacaaagcacagaactctgttggattcccttatggcatccaatatgggtgttgactcggataaaagaaggcattcatcatctcgcaatggaagcacatcaaggaaggctcttctgtcaagcaaccgaggttctggagaccccagtgaaccaaatcgcagcagccacctagttccgaccaccaccagcagcagccgtccatcgaccaatcaaaggcttcaccactcaactggacttgagggcaggacctcatcatttccaaaacctggaagaatcggctatgatgatcccacaatgaggagttttgaacgccttactattagcgcagagaggaggaaatgaatctttggaagagcaaacgatctgagctgctcccggcgagtatactgattcactgaatggattctgtgctgtgcatggtgctgagctctgcacatagcggtgctcattgattcttggcacagatgatttgagttatgtacattcgtttaactcttccaaaaggttagcgaagcattttacaccccgctatgagggaccggggatcggctgcaatgtttaagccgtggtgatttaagatgatgttgactctaatacttatataatgac

SEQ ID NO: 33421 - protein, 465 aa, Zea mays subsp. mays
  peptide (1)..(465): Ceres Seq. ID no. 12423834
  misc_feature (1)..(465): NCBI GI NO: 15236471 NR Description: casein kinase I; protein id: At4g14340
  misc_feature (1)..(465): NCBI GI NO: 15239840 NR Description: casein kinase I; protein id: At5g43320
  misc_feature (1)..(459): NCBI GI NO: 18417216 NR Description: protein kinase ADK1-like protein
  misc_feature (1)..(459): NCBI GI NO: 21536851 NR Description: protein kinase ADK1-like protein
  misc_feature (1)..(459): NCBI GI NO: 15240091 NR Description: casein kinase I; protein id: At5g44100
  misc_feature (1)..(459): NCBI GI NO: 18087640 NR Description: AT5g44100/MLN1_2 [Arabidopsis thaliana]
  misc_feature (1)..(465): NCBI GI NO: 15219733 NR Description: putative casein kinase I; protein id: At1g04440.1
  misc_feature (1)..(465): NCBI GI NO: 27754653 NR Description: putative casein kinase I [Arabidopsis thaliana]
  misc_feature (1)..(438): NCBI GI NO: 15229427 NR Description: putative casein kinase I; protein id: At3g23340
  misc_feature (1)..(300): NCBI GI NO: 4503093 NR Description: casein kinase 1 epsilon
MEHVIGGKFKLGKKIGSGSFGELYLGVNVQSGEEVAIKLESVKSRHPQLHYESKLYMLLQGGTGIPHLKWFGVDGEYNVMVIDLLGPSLEDLFNYCNRKFSLKTVLMLADQMISRVEYMHTRGFLHRDIKPDNFLMGLGRKTSQVYVIDYGLAKKYRDLQTHRHIPYRENKNLTGTARYASVNTHLGVEQSRRDDLESLGYVLMYFLRGSLPWQGLKAGTKKQKYDKISEKKMLTSIEALCKSYPSEFVTYFHYCRSLQFEDKPDYSYLKKNFRDLFIREGYQPDYVFDWTVSRQAADNNRLRLSGKTGGLVGPSVDRAERAASKQDVPHRFTGPADALAKRTGSGSGHYGEHTKHRTLLDSLMASNMGVDSDKRRHSSSRNGSTSRKALLSSNRGSGDPSEPNRSSHLVPTTTSSSRPSTNQRLHHSTGLEGRTSSFPKPGRIGYDDPTMRSFERLTISAERRK

SEQ ID NO: 33422 - protein, 409 aa, Zea mays subsp. mays
  peptide (1)..(409): Ceres Seq. ID no. 12423835
  misc_feature (1)..(409): NCBI GI NO: 15236471 NR Description: casein kinase I; protein id: At4g14340
  misc_feature (1)..(409): NCBI GI NO: 15239840 NR Description: casein kinase I; protein id: At5g43320
  misc_feature (1)..(403): NCBI GI NO: 18417216 NR Description: protein kinase ADK1-like protein
  misc_feature (1)..(403): NCBI GI NO: 21536851 NR Description: protein kinase ADK1-like protein
  misc_feature (1)..(403): NCBI GI NO: 15240091 NR Description: casein kinase I; protein id: At5g44100
  misc_feature (1)..(403): NCBI GI NO: 18087640 NR Description: AT5g44100/MLN1_2 [Arabidopsis thaliana]
  misc_feature (1)..(409): NCBI GI NO: 15219733 NR Description: putative casein kinase I; protein id: At1g04440.1
  misc_feature (1)..(409): NCBI GI NO: 27754653 NR Description: putative casein kinase I [Arabidopsis thaliana]
  misc_feature (1)..(382): NCBI GI NO: 15229427 NR Description: putative casein kinase I; protein id: At3g23340
  misc_feature (1)..(244): NCBI GI NO: 4503093 NR Description: casein kinase 1 epsilon
MLLQGGTGIPHLKWFGVDGEYNVMVIDLLGPSLEDLFNYCNRKFSLKTVLMLADQMISRVEYMHTRGFLHRDIKPDNFLMGLGRKTSQVYVIDYGLAKKYRDLQTHRHIPYRENKNLTGTARYASVNTHLGVEQSRRDDLESLGYVLMYFLRGSLPWQGLKAGTKKQKYDKISEKKMLTSIEALCKSYPSEFVTYFHYCRSLQFEDKPDYSYLKKNFRDLFIREGYQPDYVFDWTVSRQAADNNRLRLSGKTGGLVGPSVDRAERAASKQDVPHRFTGPADALAKRTGSGSGHYGEHTKHRTLLDSLMASNMGVDSDKRRHSSSRNGSTSRKALLSSNRGSGDPSEPNRSSHLVPTTTSSSRPSTNQRLHHSTGLEGRTSSFPKPGRIGYDDPTMRSFERLTISAERRK

SEQ ID NO: 33423 - protein, 386 aa, Zea mays subsp. mays
  peptide (1)..(386): Ceres Seq. ID no. 12423836
  misc_feature (1)..(386): NCBI GI NO: 15236471 NR Description: casein kinase I; protein id: At4g14340
  misc_feature (1)..(386): NCBI GI NO: 15239840 NR Description: casein kinase I; protein id: At5g43320
  misc_feature (1)..(380): NCBI GI NO: 18417216 NR Description: protein kinase ADK1-like protein
  misc_feature (1)..(380): NCBI GI NO: 21536851 NR Description: protein kinase ADK1-like protein
  misc_feature (1)..(380): NCBI GI NO: 15240091 NR Description: casein kinase I; protein id: At5g44100
  misc_feature (1)..(380): NCBI GI NO: 18087640 NR Description: AT5g44100/MLN1_2 [Arabidopsis thaliana]
  misc_feature (1)..(386): NCBI GI NO: 15219733 NR Description: putative casein kinase I; protein id: At1g04440.1
  misc_feature (1)..(386): NCBI GI NO: 27754653 NR Description: putative casein kinase I [Arabidopsis thaliana]
  misc_feature (1)..(359): NCBI GI NO: 15229427 NR Description: putative casein kinase I; protein id: At3g23340
  misc_feature (1)..(221): NCBI GI NO: 4503093 NR Description: casein kinase 1 epsilon
MVIDLLGPSLEDLFNYCNRKFSLKTVLMLADQMISRVEYMHTRGFLHRDIKPDNFLMGLGRKTSQVYVIDYGLAKKYRDLQTHRHIPYRENKNLTGTARYASVNTHLGVEQSRRDDLESLGYVLMYFLRGSLPWQGLKAGTKKQKYDKISEKKMLTSIEALCKSYPSEFVTYFHYCRSLQFEDKPDYSYLKKNFRDLFIREGYQPDYVFDWTVSRQAADNNRLRLSGKTGGLVGPSVDRAERAASKQDVPHRFTGPADALAKRTGSGSGHYGEHTKHRTLLDSLMASNMGVDSDKRRHSSSRNGSTSRKALLSSNRGSGDPSEPNRSSHLVPTTTSSSRPSTNQRLHHSTGLEGRTSSFPKPGRIGYDDPTMRSFERLTISAERRK

SEQ ID NO: 33424 - DNA, 1289 bp, Zea mays subsp. mays
  misc_feature (1)..(1289): Ceres Seq. ID no. 12351725
gacctgatcctgacccgtgcgggcgtgcggctcctcgcggacagctccagactccagagccgcctcttcgccctctcgccatcggcaggctacggtggctgcttccccgagcctgcaggtagaccaccttgtgttgattcctcgagtcttcacctggtgcttccgtttgcagcttcatttttaactaagatgtcacaagccaaggaagtgaggtacactgcacggtctattacacctcctgctgatagaaatggcacttcaaggtcgcctcctccaaagagacgcagcccttcaaggtcacctccaccaaagagtgcttcacggtccccacgtccaaggagtccaaagagacgcagcacttcaaggtctcctcctaggagacgtggtagatcaaggtcaagggataggagtcggtccaggagcccagatgatagaaatccagggaataacctttatgtaactggattgtctactcgtgtaacggaagatgatcttgagaagttctttagtaaagaaggaaaggttaagaactgtcatgttgttcttgatcctaggacaaaagaatcccgtggctttgccttcgtgactatggatactcttgaaggtgcaagacgctccatcaagtatctgcaccgcactgtacttgaaggtcgcctggtcactgtagagaaggctaaaagaactcgtgaaaggacccctactcctggaaaatactgtggtcgaagaggaggatctcaaaggagcccatcaccttaccgccctcgtagaagggagcgttcgcgctcaagggaacgcagaagggagcgttcgcgttcaagggatcgaagggagcggtctcgctcaagggatcgaagggagcggtctcgctcaagggaacgccgaagggagcggtctcgttcaagggaccgcagggagaggtctcgctcaagggaccgccggagggagcgctcacgctcaagggaccgcagaagggagcgctcacgctcaagggaccggaggggcagttcaccccatggcagaaggcatagagatcggtccaggtcacccaccagcaatgggaaccataaggcagactaggaagcgcttttatggacttgtcgttgattgcgtgaacaaaggaacttgtaacactacctataaactggtcagactgagacggttagcatggatttttagtagtgttgctgtattttgttgtttcatacaagtactctattctgttagctttcggatcgaaatgtcggatgatgatggttgttattgttctggaaatcgtagacatgtcctcc

SEQ ID NO: 33425 - protein, 358 aa, Zea mays subsp. mays
  peptide (1)..(358): Ceres Seq. ID no. 12351726
  misc_feature (151)..(222): Pfam Name: a.k.a. RRM, RBD, or RNP domain Pfam Description: RNA recognition motif.
  misc_feature (64)..(331): NCBI GI NO: 40253470 NR Description: putative transformer-SR ribonucleoprotein
  misc_feature (102)..(348): NCBI GI NO: 28973767 NR Description: putative transformer-SR ribonucleoprotein
  misc_feature (117)..(348): NCBI GI NO: 18390758 NR Description: transformer serine/arginine-rich ribonucleoprotein
  misc_feature (92)..(300): NCBI GI NO: 11275253 NR Description: transformer-2-like protein - liverwort
  misc_feature (138)..(348): NCBI GI NO: 8778550 NR Description: F22G5.31 [Arabidopsis thaliana]
  misc_feature (102)..(282): NCBI GI NO: 7489207 NR Description: transformer-SR ribonucleoprotein - common tobacco
  misc_feature (131)..(346): NCBI GI NO: 34902002 NR Description: putative transformer serine/arginine-richribonucleoprotein
  misc_feature (87)..(358): NCBI GI NO: 40253470 NR Description: putative transformer-SR ribonucleoprotein
  misc_feature (137)..(349): NCBI GI NO: 28175397 NR Description: Unknown (protein for MGC:53177) [Xenopus laevis]
  misc_feature (137)..(349): NCBI GI NO: 266991 NR Description: Splicing factor, arginine/serine-rich 2
DLILTRAGVRLLADSSRLQSRLFALSPSAGYGGCFPEPAGRPPCVDSSSLHLVLPFAASFLTKMSQAKEVRYTARSITPPADRNGTSRSPPPKRRSPSRSPPPKSASRSPRPRSPKRRSTSRSPPRRRGRSRSRDRSRSRSPDDRNPGNNLYVTGLSTRVTEDDLEKFFSKEGKVKNCHVVLDPRTKESRGFAFVTMDTLEGARRSIKYLHRTVLEGRLVTVEKAKRTRERTPTPGKYCGRRGGSQRSPSPYRPRRRERSRSRERRRERSRSRDRRERSRSRDRRERSRSRERRRERSRSRDRRERSRSRDRRRERSRSRDRRRERSRSRDRRGSSPHGRRHRDRSRSPTSNGNHKAD

SEQ ID NO: 33426 - protein, 295 aa, Zea mays subsp. mays
  peptide (1)..(295): Ceres Seq. ID no. 12351727
  misc_feature (88)..(159): Pfam Name: a.k.a. RRM, RBD, or RNP domain Pfam Description: RNA recognition motif.
  misc_feature (1)..(268): NCBI GI NO: 40253470 NR Description: putative transformer-SR ribonucleoprotein
  misc_feature (39)..(285): NCBI GI NO: 28973767 NR Description: putative transformer-SR ribonucleoprotein
  misc_feature (54)..(285): NCBI GI NO: 18390758 NR Description: transformer serine/arginine-rich ribonucleoprotein
  misc_feature (29)..(237): NCBI GI NO: 11275253 NR Description: transformer-2-like protein - liverwort
  misc_feature (75)..(285): NCBI GI NO: 8778550 NR Description: F22G5.31 [Arabidopsis thaliana]
  misc_feature (39)..(219): NCBI GI NO: 7489207 NR Description: transformer-SR ribonucleoprotein - common tobacco
  misc_feature (68)..(283): NCBI GI NO: 34902002 NR Description: putative transformer serine/arginine-richribonucleoprotein
  misc_feature (24)..(295): NCBI GI NO: 40253470 NR Description: putative transformer-SR ribonucleoprotein
  misc_feature (74)..(286): NCBI GI NO: 28175397 NR Description: Unknown (protein for MGC:53177) [Xenopus laevis]
  misc_feature (74)..(286): NCBI GI NO: 266991 NR Description: Splicing factor, arginine/serine-rich 2
MSQAKEVRYTARSITPPADRNGTSRSPPPKRRSPSRSPPPKSASRSPRPRSPKRRSTSRSPPRRRGRSRSRDRSRSRSPDDRNPGNNLYVTGLSTRVTEDDLEKFFSKEGKVKNCHVVLDPRTKESRGFAFVTMDTLEGARRSIKYLHRTVLEGRLVTVEKAKRTRERTPTPGKYCGRRGGSQRSPSPYRPRRRERSRSRERRRERSRSRDRRERSRSRDRRERSRSRERRRERSRSRDRRERSRSRDRRRERSRSRDRRRERSRSRDRRGSSPHGRRHRDRSRSPTSNGNHKAD

SEQ ID NO: 33427 - DNA, 657 bp, Zea mays subsp. mays
  misc_feature (1)..(657): Ceres Seq. ID no. 12341116
actagaaaagaggatcttgagagtgttgttggcatggcttcgtcagcaacagcaagcggtgggaagtttgacgagaagttgcctggcgagaaacctccaaagcaccctggcaaacatagaaagttcctcccagttgctgaggggaagggaatgggcagcctggagaaacagcagaatgacaaaatcctgagctctctacttgccagaaactctgatgaaccgcttgatgtcagcaaggcaattacaatgtacaaggtgaaaaaggaaaagcagagaaggaaagagaaaaatatgccatcaaaatctgataagcttaagccccagaagaaaccccacaagaaatcatcgaagaaaagggcttaggtccacgtctttcagttgaccacagttttgaaagctgaagcaaggaggcctgtcacatattggattgtatttgtgagctttgaatctctgggagaaatattgttattccgtctaatggttatgatacaaaaacctgaatgctttgccatggtatgcgcccatcttgtacttttcaaattatgtttgggatgtggtttgtagcttggtaagagtccctccctttggttctgaaacctgttcaaaggagctgtcctggaaacagtaccaatgaagctactgtctagtgtcgatggt

SEQ ID NO: 33428 - protein, 120 aa, Zea mays subsp. mays
  peptide (1)..(120): Ceres Seq. ID no. 12341117
  misc_feature (1)..(120): NCBI GI NO: 32488712 NR Description: OSJNBa0088H09.13
  misc_feature (3)..(118): NCBI GI NO: 18404610 NR Description: expressed protein; protein id: At2g37990
  misc_feature (3)..(118): NCBI GI NO: 21362906 NR Description: Ribosome biogenesis regulatory protein homolog
  misc_feature (3)..(118): NCBI GI NO: 21593609 NR Description: unknown [Arabidopsis thaliana]
  misc_feature (3)..(104): NCBI GI NO: 33585885 NR Description: Ribosome biogenesis regulatory protein homolog
TRKEDLESVVGMASSATASGGKFDEKLPGEKPPKHPGKHRKFLPVAEGKGMGSLEKQQNDKILSSLLARNSDEPLDVSKAITMYKVKKEKQRRKEKNMPSKSDKLKPQKKPHKKSSKKRA

SEQ ID NO: 33429 - protein, 109 aa, Zea mays subsp. mays
  peptide (1)..(109): Ceres Seq. ID no. 12341118
  misc_feature (1)..(109): NCBI GI NO: 32488712 NR Description: OSJNBa0088H09.13
  misc_feature (1)..(107): NCBI GI NO: 18404610 NR Description: expressed protein; protein id: At2g37990
  misc_feature (1)..(107): NCBI GI NO: 21362906 NR Description: Ribosome biogenesis regulatory protein homolog
  misc_feature (1)..(107): NCBI GI NO: 21593609 NR Description: unknown [Arabidopsis thaliana]
  misc_feature (1)..(93): NCBI GI NO: 33585885 NR Description: Ribosome biogenesis regulatory protein homolog
MASSATASGGKFDEKLPGEKPPKHPGKHRKFLPVAEGKGMGSLEKQQNDKILSSLLARNSDEPLDVSKAITMYKVKKEKQRRKEKNMPSKSDKLKPQKKPHKKSSKKRA

SEQ ID NO: 33430 - protein, 70 aa, Zea mays subsp. mays
  peptide (1)..(70): Ceres Seq. ID no. 12341119
  misc_feature (1)..(70): NCBI GI NO: 32488712 NR Description: OSJNBa0088H09.13
  misc_feature (1)..(68): NCBI GI NO: 18404610 NR Description: expressed protein; protein id: At2g37990
  misc_feature (1)..(68): NCBI GI NO: 21362906 NR Description: Ribosome biogenesis regulatory protein homolog
  misc_feature (1)..(68): NCBI GI NO: 21593609 NR Description: unknown [Arabidopsis thaliana]
  misc_feature (1)..(54): NCBI GI NO: 33585885 NR Description: Ribosome biogenesis regulatory protein homolog
MGSLEKQQNDKILSSLLARNSDEPLDVSKAITMYKVKKEKQRRKEKNMPSKSDKLKPQKKPHKKSSKKRA

SEQ ID NO: 33431 - DNA, 1365 bp, Zea mays subsp. mays
  misc_feature (1)..(1365): Ceres Seq. ID no. 12367526
agttccattcaagcgcactgctggactccaactcgactgctctgcgtagcggagtaggctgatcagaggcgagatatgaggagcggccggcggatggcggcagctctggtggcgctggcgtgggcgctcgcggctgtggctgtggcggcggcgcagaagtacaatgccatcttcaacttcggcgactccatcaccgacacggggaacctctgcaccagcgggaggccgtcgcagatcaccttcacgcagccgccctacggcgagacctacttcggcacgccgacgtgccgctgctgcgacggccgcgtgatcccggacttcctctgctccaagttcgggctgccgttcctgccgccgtccaagtcgacgacggccgacttcaaggagggcgccaacatggccatcaccggcgcgactgccatggacgcgcccttcttccgctcgctggggctctccgacaagatctggaacaacgggcccatcagcttccagctggagtggttccagcaggtcgcgtccgccgtgtgcggcggggggcaggcgcagcaggccgactgcaagagctacctggccaactccctgttcgtgttcggcgagttcggcggcaacgactacaacgccatgctgttcggcaactacagcgcggaccaggccagcacgtacacgccgcagggtcgtggccgccgtcgccagcggcgtcgagaagctggtggccatgggcgccaccgacatcgtggtgcccggcgtcctccccatcggctgcttccccatctacctcaccttctacggcacctccagcagcgccgactacgacagcctcggctgcctcaggaagttcaacgacctgtccaccaaccacaacaaccagctgcaggcccagatctccggcctccaggccaagtacaagtcggcgcgcatcatgtacgccgacttctactccgccgtctacgacatggtcaagaatccaggcagctacgggttcagcacggccgttccagacgtgctgcgggtccggaggcggcaagtacaactaccagaacatcgcgcggtgcggcatgccgggcgcctccgcgtgctccaacccggcggcgcacctcagctgggacggcatccacctcaccgaggccgcgtacaagcagatcaccgacggctggctcaacgggccctactgccacccggccattctccacagctaaagcgacagggggggccgattaattattaattattattatttgttgtttacgttgccgggaaagaaagaaagaaaagtgtctcagcaactgcatgcatgtgttcctggtccctcactgctgtgacttacagagtattatatatatattagtactatgtatactggtcctt

SEQ ID NO: 33432 - protein, 380 aa, Zea mays subsp. mays
  peptide (1)..(380): Ceres Seq. ID no. 12367527
  misc_feature (32)..(199): Pfam Name: Pfam Description:  GDSL-like Lipase/Acylhydrolase
  misc_feature (8)..(199): NCBI GI NO: 34903956 NR Description: OSJNBa0038J17.23
  misc_feature (1)..(198): NCBI GI NO: 34903958 NR Description: OSJNBa0038J17.24
  misc_feature (26)..(202): NCBI GI NO: 34903978 NR Description: unnamed protein product
  misc_feature (7)..(198): NCBI GI NO: 34904124 NR Description: unnamed protein product
  misc_feature (9)..(198): NCBI GI NO: 34911800 NR Description: lipase-like protein
  misc_feature (6)..(198): NCBI GI NO: 37533984 NR Description: putative lipase
  misc_feature (7)..(195): NCBI GI NO: 37533980 NR Description: putative lipase
  misc_feature (1)..(203): NCBI GI NO: 34911824 NR Description: lipase-like protein
  misc_feature (1)..(151): NCBI GI NO: 34911804 NR Description: lipase-like protein
  misc_feature (157)..(198): NCBI GI NO: 34911804 NR Description: lipase-like protein
MRSGRRMAAALVALAWALAAVAVAAAQKYNAIFNFGDSITDTGNLCTSGRPSQITFTQPPYGETYFGTPTCRCCDGRVIPDFLCSKFGLPFLPPSKSTTADFKEGANMAITGATAMDAPFFRSLGLSDKIWNNGPISFQLEWFQQVASAVCGGGQAQQADCKSYLANSLFVFGEFGGNDYNAMLFGNYSADQASTYTPQGRGRRRQRRREAGGHGRHRHRGARRPPHRLLPHLPHLLRHLQQRRLRQPRLPQEVQRPVHQPQQPAAGPDLRPPGQVQVGAHHVRRLLLRRLRHGQESRQLRVQHGRSRRAAGPEAASTTTRTSRGAACRAPPRAPTRRRTSAGTASTSPRPRTSRSPTAGSTGPTATRPFSTAKATGGAD

SEQ ID NO: 33433 - protein, 374 aa, Zea mays subsp. mays
  peptide (1)..(374): Ceres Seq. ID no. 12367528
  misc_feature (26)..(193): Pfam Name: Pfam Description:  GDSL-like Lipase/Acylhydrolase
  misc_feature (2)..(193): NCBI GI NO: 34903956 NR Description: OSJNBa0038J17.23
  misc_feature (1)..(192): NCBI GI NO: 34903958 NR Description: OSJNBa0038J17.24
  misc_feature (20)..(196): NCBI GI NO: 34903978 NR Description: unnamed protein product
  misc_feature (1)..(192): NCBI GI NO: 34904124 NR Description: unnamed protein product
  misc_feature (3)..(192): NCBI GI NO: 34911800 NR Description: lipase-like protein
  misc_feature (1)..(192): NCBI GI NO: 37533984 NR Description: putative lipase
  misc_feature (1)..(189): NCBI GI NO: 37533980 NR Description: putative lipase
  misc_feature (1)..(197): NCBI GI NO: 34911824 NR Description: lipase-like protein
  misc_feature (1)..(145): NCBI GI NO: 34911804 NR Description: lipase-like protein
  misc_feature (151)..(192): NCBI GI NO: 34911804 NR Description: lipase-like protein
MAAALVALAWALAAVAVAAAQKYNAIFNFGDSITDTGNLCTSGRPSQITFTQPPYGETYFGTPTCRCCDGRVIPDFLCSKFGLPFLPPSKSTTADFKEGANMAITGATAMDAPFFRSLGLSDKIWNNGPISFQLEWFQQVASAVCGGGQAQQADCKSYLANSLFVFGEFGGNDYNAMLFGNYSADQASTYTPQGRGRRRQRRREAGGHGRHRHRGARRPPHRLLPHLPHLLRHLQQRRLRQPRLPQEVQRPVHQPQQPAAGPDLRPPGQVQVGAHHVRRLLLRRLRHGQESRQLRVQHGRSRRAAGPEAASTTTRTSRGAACRAPPRAPTRRRTSAGTASTSPRPRTSRSPTAGSTGPTATRPFSTAKATGGAD

SEQ ID NO: 33434 - protein, 273 aa, Zea mays subsp. mays
  peptide (1)..(273): Ceres Seq. ID no. 12367529
  misc_feature (1)..(92): Pfam Name: Pfam Description:  GDSL-like Lipase/Acylhydrolase
  misc_feature (1)..(92): NCBI GI NO: 34903956 NR Description: OSJNBa0038J17.23
  misc_feature (1)..(91): NCBI GI NO: 34903958 NR Description: OSJNBa0038J17.24
  misc_feature (1)..(95): NCBI GI NO: 34903978 NR Description: unnamed protein product
  misc_feature (1)..(91): NCBI GI NO: 34904124 NR Description: unnamed protein product
  misc_feature (1)..(91): NCBI GI NO: 34911800 NR Description: lipase-like protein
  misc_feature (1)..(91): NCBI GI NO: 37533984 NR Description: putative lipase
  misc_feature (1)..(88): NCBI GI NO: 37533980 NR Description: putative lipase
  misc_feature (1)..(96): NCBI GI NO: 34911824 NR Description: lipase-like protein
  misc_feature (1)..(44): NCBI GI NO: 34911804 NR Description: lipase-like protein
  misc_feature (50)..(91): NCBI GI NO: 34911804 NR Description: lipase-like protein
MAITGATAMDAPFFRSLGLSDKIWNNGPISFQLEWFQQVASAVCGGGQAQQADCKSYLANSLFVFGEFGGNDYNAMLFGNYSADQASTYTPQGRGRRRQRRREAGGHGRHRHRGARRPPHRLLPHLPHLLRHLQQRRLRQPRLPQEVQRPVHQPQQPAAGPDLRPPGQVQVGAHHVRRLLLRRLRHGQESRQLRVQHGRSRRAAGPEAASTTTRTSRGAACRAPPRAPTRRRTSAGTASTSPRPRTSRSPTAGSTGPTATRPFSTAKATGGAD

SEQ ID NO: 33435 - DNA, 1061 bp, Zea mays subsp. mays
  misc_feature (1)..(1061): Ceres Seq. ID no. 12367225
acgaatcccgtcttcttcctttcttggccttctccacctcatcgccgagacgagatctctcccacacgaggaagggagagatgggcgggcgggtggatcacgagtactcctacctgttcaagatggtcctcatcggagacagcggcgtcggcaagtccaatatcctctctcgcttcacgcgcaaccacttctccctcgactccaagtccaccatcggcgtcgagttcgccaccaagtccctgcagatggacggcaaaacaataaaggctcagatctgggacacagctgggcaggaaaggtaccgtgcaattacaagtgcctactaccgtggagccgtgggagccctccttgtgtacgacatcacaaagaggcagagcttcgacaatgttcacaggtggcttcgtgaactccgcgaccatgctgactccagtattgtgatcatgatggtcggtaacaaatctgacctaatccacctgagagctatctctgaggatgaaggcaaagcgttggctgagaaggaggggttgttcttcctcgagacatcagctatggaggctataaacgtggagcaagccttccagactatcatgacggaggtctatggcattgtcaacaggaaagcgctggctgccaaagaagcagcagctgcaactgcttcgttgccctcccagggtaaaattatcagcattgacagcactgcaggaaacacaaagagggcatgctgctctacctaaaaatgttcaaacaccacattatacagaaccttggagacaattgttggtagaaaatggagcatagtgatcacaaatgatgtcgtggcaatatctactcttattctattctattctattcttttcttttctttattgtgtggacaaaatgggggtacatgcagtttagtttgttcagtgtgtgttagtcaaaagttagatattttcgttaggatccataccatttatcttctcaagttaaatgatactgcagtataactcagaatcatatagtcccaagttgctacagaattcaactgcgaatttgtgatttcatcatgcttacattct

SEQ ID NO: 33436 - protein, 243 aa, Zea mays subsp. mays
  peptide (1)..(243): Ceres Seq. ID no. 12367226
  misc_feature (40)..(201): Pfam Name: Pfam Description:  Ras family
  misc_feature (27)..(242): NCBI GI NO: 3024552 NR Description: RAS-RELATED PROTEIN RGP2
  misc_feature (27)..(243): NCBI GI NO: 3024501 NR Description: RAS-RELATED PROTEIN RAB11C
  misc_feature (27)..(243): NCBI GI NO: 3024528 NR Description: RAS-RELATED PROTEIN RAB2BV
  misc_feature (27)..(243): NCBI GI NO: 15232652 NR Description: GTP-binding protein, putative
  misc_feature (27)..(243): NCBI GI NO: 3024506 NR Description: RAS-RELATED PROTEIN RAB11A
  misc_feature (27)..(243): NCBI GI NO: 15237828 NR Description: Ras-related GTP-binding protein, putative
  misc_feature (27)..(243): NCBI GI NO: 15222396 NR Description: GTP-binding protein, putative
  misc_feature (27)..(243): NCBI GI NO: 34897394 NR Description: Ras-related GTP-binding protein
  misc_feature (84)..(243): NCBI GI NO: 25294121 NR Description: protein F22G5.24 [imported] - Arabidopsis thaliana
  misc_feature (27)..(82): NCBI GI NO: 25294121 NR Description: protein F22G5.24 [imported] - Arabidopsis thaliana
ESRLLPFLAFSTSSPRRDLSHTRKGEMGGRVDHEYSYLFKMVLIGDSGVGKSNILSRFTRNHFSLDSKSTIGVEFATKSLQMDGKTIKAQIWDTAGQERYRAITSAYYRGAVGALLVYDITKRQSFDNVHRWLRELRDHADSSIVIMMVGNKSDLIHLRAISEDEGKALAEKEGLFFLETSAMEAINVEQAFQTIMTEVYGIVNRKALAAKEAAAATASLPSQGKIISIDSTAGNTKRACCST

SEQ ID NO: 33437 - protein, 217 aa, Zea mays subsp. mays
  peptide (1)..(217): Ceres Seq. ID no. 12367227
  misc_feature (14)..(175): Pfam Name: Pfam Description:  Ras family
  misc_feature (1)..(216): NCBI GI NO: 3024552 NR Description: RAS-RELATED PROTEIN RGP2
  misc_feature (1)..(217): NCBI GI NO: 3024501 NR Description: RAS-RELATED PROTEIN RAB11C
  misc_feature (1)..(217): NCBI GI NO: 3024528 NR Description: RAS-RELATED PROTEIN RAB2BV
  misc_feature (1)..(217): NCBI GI NO: 15232652 NR Description: GTP-binding protein, putative
  misc_feature (1)..(217): NCBI GI NO: 3024506 NR Description: RAS-RELATED PROTEIN RAB11A
  misc_feature (1)..(217): NCBI GI NO: 15237828 NR Description: Ras-related GTP-binding protein, putative
  misc_feature (1)..(217): NCBI GI NO: 15222396 NR Description: GTP-binding protein, putative
  misc_feature (1)..(217): NCBI GI NO: 34897394 NR Description: Ras-related GTP-binding protein
  misc_feature (58)..(217): NCBI GI NO: 25294121 NR Description: protein F22G5.24 [imported] - Arabidopsis thaliana
  misc_feature (1)..(56): NCBI GI NO: 25294121 NR Description: protein F22G5.24 [imported] - Arabidopsis thaliana
MGGRVDHEYSYLFKMVLIGDSGVGKSNILSRFTRNHFSLDSKSTIGVEFATKSLQMDGKTIKAQIWDTAGQERYRAITSAYYRGAVGALLVYDITKRQSFDNVHRWLRELRDHADSSIVIMMVGNKSDLIHLRAISEDEGKALAEKEGLFFLETSAMEAINVEQAFQTIMTEVYGIVNRKALAAKEAAAATASLPSQGKIISIDSTAGNTKRACCST

SEQ ID NO: 33438 - protein, 203 aa, Zea mays subsp. mays
  peptide (1)..(203): Ceres Seq. ID no. 12367228
  misc_feature (1)..(161): Pfam Name: Pfam Description:  Ras family
  misc_feature (1)..(202): NCBI GI NO: 3024552 NR Description: RAS-RELATED PROTEIN RGP2
  misc_feature (1)..(203): NCBI GI NO: 3024501 NR Description: RAS-RELATED PROTEIN RAB11C
  misc_feature (1)..(203): NCBI GI NO: 3024528 NR Description: RAS-RELATED PROTEIN RAB2BV
  misc_feature (1)..(203): NCBI GI NO: 15232652 NR Description: GTP-binding protein, putative
  misc_feature (1)..(203): NCBI GI NO: 3024506 NR Description: RAS-RELATED PROTEIN RAB11A
  misc_feature (1)..(203): NCBI GI NO: 15237828 NR Description: Ras-related GTP-binding protein, putative
  misc_feature (1)..(203): NCBI GI NO: 15222396 NR Description: GTP-binding protein, putative
  misc_feature (1)..(203): NCBI GI NO: 34897394 NR Description: Ras-related GTP-binding protein
  misc_feature (44)..(203): NCBI GI NO: 25294121 NR Description: protein F22G5.24 [imported] - Arabidopsis thaliana
  misc_feature (1)..(42): NCBI GI NO: 25294121 NR Description: protein F22G5.24 [imported] - Arabidopsis thaliana
MVLIGDSGVGKSNILSRFTRNHFSLDSKSTIGVEFATKSLQMDGKTIKAQIWDTAGQERYRAITSAYYRGAVGALLVYDITKRQSFDNVHRWLRELRDHADSSIVIMMVGNKSDLIHLRAISEDEGKALAEKEGLFFLETSAMEAINVEQAFQTIMTEVYGIVNRKALAAKEAAAATASLPSQGKIISIDSTAGNTKRACCST

SEQ ID NO: 33439 - DNA, 904 bp, Zea mays subsp. mays
  misc_feature (1)..(904): Ceres Seq. ID no. 12376350
atacgaattttcgatttccatccgcaattttctgtgccttactaatagcactcggtagtagtagtagtgatccgaaagttgacaccattccccttgtgctttcttgccagtaacccatccatcggggatcaccaggggagcaagatgtcgactgccgccgccccaagattgcccgctcccagatccggggcaagctatcactatcagacgaccgcggctccggtggccaacaccctctccttcgccggccacgcgaggcaggcggcccgcgcgtccgggccacggctgtccagcaggttcgtggcgtccgcggcggccgtgctgcacaaggtgaagctggtcggcccggacgggacggagcacgagttcgaggcccccgacgacacctacatcctcgaggcggccgagaccgccggggtggagctgcccttctcctgccgcgccgggtcctgctccacctgcgccgggaggatgtcggccggcgaggtcgaccagtcggaggggtccttcctcgacgacggccagatggccgaggggtacctcctcacctgcatctcctaccccaaggcagactgcgtcatccacacccacaaggaggaggacctgtactagagattgggttgctttatgcatcagtggttgttccaaaggtggtggtgactggtgcgttcgttgctattccgtgccaccagcggaaggggggtttcgttgttgagatgggctagttcttgtcatcaatttcggtcattcgatgagatcatgtcatatgagttgtggcaataatgctggcaatatggttttgcaattcaaactgcaaatgtgaccagcaatgtcaaaaactgcacactgtgtctgtgtgcgaacttgtgaaattgacattgagttcaattagctagttggctcg

SEQ ID NO: 33440 - protein, 155 aa, Zea mays subsp. mays
  peptide (1)..(155): Ceres Seq. ID no. 12376351
  misc_feature (66)..(142): Pfam Name: Pfam Description:  2Fe-2S iron-sulfur cluster binding domain
  misc_feature (1)..(155): NCBI GI NO: 3023750 NR Description: Ferredoxin VI, chloroplast precursor (Fd VI)
  misc_feature (1)..(155): NCBI GI NO: 7430754 NR Description: ferredoxin [2Fe-2S], root - rice
  misc_feature (1)..(155): NCBI GI NO: 19569591 NR Description: ferredoxin precursor [Triticum aestivum]
  misc_feature (23)..(155): NCBI GI NO: 119958 NR Description: Ferredoxin III, chloroplast precursor (Fd III)
  misc_feature (21)..(155): NCBI GI NO: 40714664 NR Description: putative ferredoxin
  misc_feature (60)..(155): NCBI GI NO: 6688560 NR Description: putative ferredoxin [Lycopersicon esculentum]
  misc_feature (28)..(155): NCBI GI NO: 13182955 NR Description: ferredoxin [Impatiens balsamina]
  misc_feature (74)..(155): NCBI GI NO: 2073385 NR Description: root ferredoxin [Oryza sativa]
  misc_feature (21)..(155): NCBI GI NO: 15225888 NR Description: putative ferredoxin; protein id: At2g27510
  misc_feature (41)..(154): NCBI GI NO: 2129915 NR Description: ferredoxin
MSTAAAPRLPAPRSGASYHYQTTAAPVANTLSFAGHARQAARASGPRLSSRFVASAAAVLHKVKLVGPDGTEHEFEAPDDTYILEAAETAGVELPFSCRAGSCSTCAGRMSAGEVDQSEGSFLDDGQMAEGYLLTCISYPKADCVIHTHKEEDLY

SEQ ID NO: 33441 - DNA, 789 bp, Zea mays subsp. mays; identical to SEQ ID NO: 23396
  misc_feature (1)..(789): Ceres Seq. ID no. 12355957

SEQ ID NO: 33442 - protein, 161 aa, Zea mays subsp. mays; identical to SEQ ID NO: 23397
  peptide (1)..(161): Ceres Seq. ID no. 12355958
  misc_feature (3)..(73): Pfam Name: Pfam Description:  Ribosomal protein L24e
  misc_feature (1)..(161): NCBI GI NO: 1710521 NR Description: 60S RIBOSOMAL PROTEIN L24
  misc_feature (4)..(161): NCBI GI NO: 34900364 NR Description: putative 60S ribosomal protein L24
  misc_feature (1)..(160): NCBI GI NO: 6094040 NR Description: 60S ribosomal protein L24
  misc_feature (1)..(156): NCBI GI NO: 10180025 NR Description: 60S ribosomal protein L24 [Prunus avium]
  misc_feature (1)..(161): NCBI GI NO: 18404176 NR Description: 60S ribosomal protein L24; protein id: At2g36620
  misc_feature (1)..(161): NCBI GI NO: 15231730 NR Description: 60S ribosomal protein - like; protein id:At3g53020
  misc_feature (5)..(161): NCBI GI NO: 25295112 NR Description: 60S ribosomal protein L24
  misc_feature (3)..(150): NCBI GI NO: 19075214 NR Description: 60s ribosomal protein L24
  misc_feature (3)..(150): NCBI GI NO: 19115030 NR Description: 60S ribosomal protein L24
  misc_feature (10)..(154): NCBI GI NO: 40741063 NR Description: conserved hypothetical protein

SEQ ID NO: 33443 - protein, 106 aa, Zea mays subsp. mays; identical to SEQ ID NO: 23398
  peptide (1)..(106): Ceres Seq. ID no. 12355959
  misc_feature (1)..(106): NCBI GI NO: 1710521 NR Description: 60S RIBOSOMAL PROTEIN L24
  misc_feature (1)..(106): NCBI GI NO: 34900364 NR Description: putative 60S ribosomal protein L24
  misc_feature (1)..(105): NCBI GI NO: 6094040 NR Description: 60S ribosomal protein L24
  misc_feature (1)..(101): NCBI GI NO: 10180025 NR Description: 60S ribosomal protein L24 [Prunus avium]
  misc_feature (1)..(106): NCBI GI NO: 18404176 NR Description: 60S ribosomal protein L24; protein id: At2g36620
  misc_feature (1)..(106): NCBI GI NO: 15231730 NR Description: 60S ribosomal protein - like; protein id:At3g53020
  misc_feature (1)..(106): NCBI GI NO: 25295112 NR Description: 60S ribosomal protein L24
  misc_feature (1)..(95): NCBI GI NO: 19075214 NR Description: 60s ribosomal protein L24
  misc_feature (1)..(95): NCBI GI NO: 19115030 NR Description: 60S ribosomal protein L24
  misc_feature (1)..(99): NCBI GI NO: 40741063 NR Description: conserved hypothetical protein

SEQ ID NO: 33444 - DNA, 991 bp, Zea mays subsp. mays
  misc_feature (1)..(991): Ceres Seq. ID no. 12351117
agctagcaaatgaaccagccacaataatcctgatcctcgatcttgcgttgtcgtcgtcaaagagacgactcgatcatcatctcatctcagagcacgcaagcaacaatggttactagcatccgcgtcatagttggaatcataggatctgtagtctgtgtgctcctctacgcggttccagtgctgacgtttaagagagtggtgaaggaggccagcgttggggagttctcgtgcgtgccatacatcctcgcccttttcagcgccttcacctggggctggtacggcttccccatcgtcagtgacgggtgggagaacctgtcgctcttcggcacgtgcgccgtcggagtgctcttcgaagcttcgttcgtcgtcatatacgtatggtttgcgccgagagacaaaaagaaatctgtcgtcctaatggtgtctctggttgtggcaacgctctgcgtcatcgtatccttgtcaagcttcgtgttccacacgcaccatacgcgcaagctatttgttggtagcattggtatagtcacctccatatccatgtacagcgctccgcttgtagccgtgaagcaagtcatcctgaccaagagcgtggagttcatgcctttctacctgtcgttgttctccttgctgaccagttttacatggatgctgtacggcatcctaggaagggatccctatcttacggcaccaaacggcgccgggtgtttaactggacttcttcagatcgctgtgtactgcatttacagcagaagcaatcggccgccgaaagcagtcaatggtgcgacaacaactagccgtgaagatgcaaatgattgcaaggtttgacttcgagagccttaagaaactgcctctctccgacgctagtaggaggttgatactaaagtggcgctattcgcgtgtgcagttattattattatctaattgtaaactgctccagtgttctttctttttgttatctaatcaatgggcatagcacctgcaaccagtaatt

SEQ ID NO: 33445 - protein, 239 aa, Zea mays subsp. mays
  peptide (1)..(239): Ceres Seq. ID no. 12351118
  misc_feature (132)..(218): Pfam Name: Pfam Description:  MtN3/saliva family
  misc_feature (1)..(218): NCBI GI NO: 34904086 NR Description: unnamed protein product
  misc_feature (1)..(236): NCBI GI NO: 34146818 NR Description: At5g53190 [Arabidopsis thaliana]
  misc_feature (1)..(236): NCBI GI NO: 15238678 NR Description: MtN3 protein-like; protein id: At5g53190.1
  misc_feature (8)..(224): NCBI GI NO: 18394992 NR Description: expressed protein; protein id: At1g21460
  misc_feature (6)..(236): NCBI GI NO: 34907420 NR Description: P0018C10.36
  misc_feature (5)..(218): NCBI GI NO: 18413388 NR Description: putative protein; protein id: At4g10850
  misc_feature (8)..(217): NCBI GI NO: 18400517 NR Description: expressed protein; protein id: At3g14770
  misc_feature (5)..(218): NCBI GI NO: 15219732 NR Description: hypothetical protein; protein id: At1g66770.1
  misc_feature (9)..(219): NCBI GI NO: 30684193 NR Description: nodulin MtN3 family protein [Arabidopsis thaliana]
  misc_feature (9)..(233): NCBI GI NO: 27754697 NR Description: putative cytochrome c oxidoreductase
MVTSIRVIVGIIGSVVCVLLYAVPVLTFKRVVKEASVGEFSCVPYILALFSAFTWGWYGFPIVSDGWENLSLFGTCAVGVLFEASFVVIYVWFAPRDKKKSVVLMVSLVVATLCVIVSLSSFVFHTHHTRKLFVGSIGIVTSISMYSAPLVAVKQVILTKSVEFMPFYLSLFSLLTSFTWMLYGILGRDPYLTAPNGAGCLTGLLQIAVYCIYSRSNRPPKAVNGATTTSREDANDCKV

SEQ ID NO: 33446 - protein, 135 aa, Zea mays subsp. mays
  peptide (1)..(135): Ceres Seq. ID no. 12351119
  misc_feature (28)..(114): Pfam Name: Pfam Description:  MtN3/saliva family
  misc_feature (1)..(114): NCBI GI NO: 34904086 NR Description: unnamed protein product
  misc_feature (1)..(132): NCBI GI NO: 34146818 NR Description: At5g53190 [Arabidopsis thaliana]
  misc_feature (1)..(132): NCBI GI NO: 15238678 NR Description: MtN3 protein-like; protein id: At5g53190.1
  misc_feature (1)..(120): NCBI GI NO: 18394992 NR Description: expressed protein; protein id: At1g21460
  misc_feature (1)..(132): NCBI GI NO: 34907420 NR Description: P0018C10.36
  misc_feature (1)..(114): NCBI GI NO: 18413388 NR Description: putative protein; protein id: At4g10850
  misc_feature (1)..(113): NCBI GI NO: 18400517 NR Description: expressed protein; protein id: At3g14770
  misc_feature (1)..(114): NCBI GI NO: 15219732 NR Description: hypothetical protein; protein id: At1g66770.1
  misc_feature (1)..(115): NCBI GI NO: 30684193 NR Description: nodulin MtN3 family protein [Arabidopsis thaliana]
  misc_feature (1)..(129): NCBI GI NO: 27754697 NR Description: putative cytochrome c oxidoreductase
MVSLVVATLCVIVSLSSFVFHTHHTRKLFVGSIGIVTSISMYSAPLVAVKQVILTKSVEFMPFYLSLFSLLTSFTWMLYGILGRDPYLTAPNGAGCLTGLLQIAVYCIYSRSNRPPKAVNGATTTSREDANDCKV

SEQ ID NO: 33447 - DNA, 1246 bp, Zea mays subsp. mays
  misc_feature (1)..(1246): Ceres Seq. ID no. 12366640
gcacgagaccattacctagaacatcctaatcgaaaatcgacacacagatcgaacttctcctgtcgtctgcctaccagtagctagctctaatacatagcagccctcgctcgcaaggtactgcactacgatggccgccacctcctcctcctcctcctccacggtagttgcacttgcggcgcttctcttcttgctccttgtaacgtgtggctcgtgcgcgagaccggcgagctttaacgcctccgactttaccgccgaccccaactgggaggctgcccgggccacctggtacggtgcgcccaccggcgccggccctgatgacgacggtggtgcctgtggattcaagaacgtgaacctgccgccgttctcggcgatgacatcgtgcggcaacgagcccctcttcaaggacggcaagggctgcggctcctgctaccagatacgatgccaaaaccacccagcctgctccggcaatccggagacggtgatcatcaccgacatgaactactaccccgtggccaagtaccacttcgacctcagcggcacggcgttcggcgccatggccaagcccggccgcaccgacgagctccgccacgccggcatcatcgacatccagttcaagagggtgccctgcaactaccccgggcagaaggtgacgttccacatcgaggaggggtccaacccggtgtacctggcggtgctcgtcgagttcgaggacggcgacggcgacgtggtgcaggtggacctcatggaggccaactccgggtcgtggacgccgatgcgcgagtcgtgggggtccatctggcggctggactccggccaccgcctcgccgcgcccttctccctgcgcatcaccaacgagtccggcaagacgctggtggccaaccaggtcatcccggccaactgggttcccaacacctactaccgttccatcatccagtactagctctcggcggccgccgcgcaccacgatagctctgcgtccttgtgcttgattagtttggtagtgctattgtattgctgcatatgcagcatgggactgatgagcactgtgcgaggtgcctcagtcgattattactggtagatggtggtggcgtgcgcgcggccttcacggcggagttggagactgggaacgaaatggaggaaggccaagttaatttgcagatgctttcccgcccattgtccatgcatgtaatgtaccagggcgattgaaattataaattattaatggtgtgtttgttttgtggagtcg

SEQ ID NO: 33448 - protein, 270 aa, Zea mays subsp. mays
  peptide (1)..(270): Ceres Seq. ID no. 12366641
  misc_feature (174)..(255): Pfam Name: Pfam Description:  Pollen allergen
  misc_feature (1)..(270): NCBI GI NO: 14193773 NR Description: beta-expansin 7 [Zea mays]
  misc_feature (8)..(270): NCBI GI NO: 37536760 NR Description: beta-expansin EXPB3
  misc_feature (10)..(270): NCBI GI NO: 14330330 NR Description: beta expansin B3 [Festuca pratensis]
  misc_feature (10)..(270): NCBI GI NO: 37536756 NR Description: beta-expansin EXPB6
  misc_feature (2)..(270): NCBI GI NO: 8118432 NR Description: beta-expansin [Oryza sativa]
  misc_feature (9)..(270): NCBI GI NO: 14330328 NR Description: beta expansin B2 [Festuca pratensis]
  misc_feature (10)..(270): NCBI GI NO: 14193775 NR Description: beta-expansin 8 [Zea mays]
  misc_feature (35)..(270): NCBI GI NO: 8118425 NR Description: beta-expansin [Oryza sativa]
  misc_feature (35)..(270): NCBI GI NO: 37536762 NR Description: beta-expansin EXPB4
  misc_feature (12)..(270): NCBI GI NO: 11346546 NR Description: beta-expansin [Oryza sativa]
MAATSSSSSSTVVALAALLFLLLVTCGSCARPASFNASDFTADPNWEAARATWYGAPTGAGPDDDGGACGFKNVNLPPFSAMTSCGNEPLFKDGKGCGSCYQIRCQNHPACSGNPETVIITDMNYYPVAKYHFDLSGTAFGAMAKPGRTDELRHAGIIDIQFKRVPCNYPGQKVTFHIEEGSNPVYLAVLVEFEDGDGDVVQVDLMEANSGSWTPMRESWGSIWRLDSGHRLAAPFSLRITNESGKTLVANQVIPANWVPNTYYRSIIQY

SEQ ID NO: 33449 - protein, 189 aa, Zea mays subsp. mays
  peptide (1)..(189): Ceres Seq. ID no. 12366642
  misc_feature (93)..(174): Pfam Name: Pfam Description:  Pollen allergen
  misc_feature (1)..(189): NCBI GI NO: 14193773 NR Description: beta-expansin 7 [Zea mays]
  misc_feature (1)..(189): NCBI GI NO: 37536760 NR Description: beta-expansin EXPB3
  misc_feature (1)..(189): NCBI GI NO: 14330330 NR Description: beta expansin B3 [Festuca pratensis]
  misc_feature (1)..(189): NCBI GI NO: 37536756 NR Description: beta-expansin EXPB6
  misc_feature (1)..(189): NCBI GI NO: 8118432 NR Description: beta-expansin [Oryza sativa]
  misc_feature (1)..(189): NCBI GI NO: 14330328 NR Description: beta expansin B2 [Festuca pratensis]
  misc_feature (1)..(189): NCBI GI NO: 14193775 NR Description: beta-expansin 8 [Zea mays]
  misc_feature (1)..(189): NCBI GI NO: 8118425 NR Description: beta-expansin [Oryza sativa]
  misc_feature (1)..(189): NCBI GI NO: 37536762 NR Description: beta-expansin EXPB4
  misc_feature (1)..(189): NCBI GI NO: 11346546 NR Description: beta-expansin [Oryza sativa]
MTSCGNEPLFKDGKGCGSCYQIRCQNHPACSGNPETVIITDMNYYPVAKYHFDLSGTAFGAMAKPGRTDELRHAGIIDIQFKRVPCNYPGQKVTFHIEEGSNPVYLAVLVEFEDGDGDVVQVDLMEANSGSWTPMRESWGSIWRLDSGHRLAAPFSLRITNESGKTLVANQVIPANWVPNTYYRSIIQY

SEQ ID NO: 33450 - protein, 176 aa, Zea mays subsp. mays
  peptide (1)..(176): Ceres Seq. ID no. 12366643
MPKPPSLLRQSGDGDHHRHELLPRGQVPLRPQRHGVRRHGQARPHRRAPPRRHHRHPVQEGALQLPRAEGDVPHRGGVQPGVPGGARRVRGRRRRRGAGGPHGGQLRVVDADARVVGVHLAAGLRPPPRRALLPAHHQRVRQDAGGQPGHPGQLGSQHLLPFHHPVLALGGRRAPR

SEQ ID NO: 33451 - DNA, 1434 bp, Zea mays subsp. mays
  misc_feature (1)..(1434): Ceres Seq. ID no. 12345709
gatccccgttctcgctacgcccctgtctctccccgccgccaccctgccccggcgccgtagagcacggcgctggcccttgtttccctcccccggccggacctcggaagtatgtctcgggccatcgaatcgacaatgaggcaatctcggcagtttgtgaatctgatcatgaccaatctttacaacggcgccaagtccctgcacttcgtggacctgaagcggcagccactatttaagacaccactgccacctacggcatctacagacggagacagatttgaaacacaagacgctttctctcagacacagccaactgaatccttggtgttggagagacttcgccttccccgtccgagcttccaattcgaaacttccactgcacaagatcgcagctggtacattaactgcttaccgctttccgatcgcgtggtgttctgctcggatcagtgtggacacaactttgtggttgatggtatcgcacgttgtcttgtaaccatgcccagcctccacaaacgtaagatgatgcccctctccatcttcatccccagcactgatgtcgaaggcggtggcagcctcttccttgtggataggtcacccggcatcactgctacaagggtggaatttgagtccttagtgtaccgcaaggcaagcttcagcaacacctactcctggcaggctcaactcctcccaccagcaccgtaccccctttacacctcctactcctggcaggctcaactcctcccaccagcaccgtaccccctttacaccaagattagctcctatgctgtgatcggtggtggttcccacatctgcttatcagtcaagaatgaaggcacctattgcctggacacaaccagacacacatggagcaaagtcggcacgtggacactacccttcgacggcaaggttgagtatgtaccggagctgaagctctggtttggcgcctctgccgatcggcagaagttggctgccactgacctctcttatttgagcagcactgttgactcagccacgggtttccaaccagaggtcctgggctcttggatggagctgaccctgccagagggatgggagcagaaaggaagaactcagcttgtcaacctgggctcaggcaggttctgcgtcgcaaggttcttgaatgagatgtttgatccatacgggagtggatatgttttattgaccggtgtggagatcgttcctcattttgacaatctcactggtaatgacgttagtagtggcagtggagatggcagcaaagggaaacttaaactccaaataattcctcataaatcaagggtgtatatgcccaccaccgccttagcgttgattcaagatgtgttctgaataagtttggggctttgcactcaacaccctgttataatgattatgtattgtgttaattattttatccattgctgttgtggacttggttaatcc

SEQ ID NO: 33452 - protein, 410 aa, Zea mays subsp. mays
  peptide (1)..(410): Ceres Seq. ID no. 12345710
  misc_feature (26)..(366): NCBI GI NO: 37531434 NR Description: hypothetical protein
  misc_feature (9)..(397): NCBI GI NO: 34907072 NR Description: OSJNBa0093F16.25
  misc_feature (60)..(394): NCBI GI NO: 34902348 NR Description: Hypothetical protein
  misc_feature (58)..(398): NCBI GI NO: 15451604 NR Description: Hypothetical protein [Oryza sativa]
  misc_feature (9)..(197): NCBI GI NO: 38345446 NR Description: OSJNBa0042L16.1
  misc_feature (201)..(379): NCBI GI NO: 38345446 NR Description: OSJNBa0042L16.1
  misc_feature (9)..(410): NCBI GI NO: 34902338 NR Description: Unknown protein
  misc_feature (129)..(397): NCBI GI NO: 38344193 NR Description: OSJNBa0064G10.9
  misc_feature (9)..(162): NCBI GI NO: 34898928 NR Description: OJ1316_A04.17
  misc_feature (228)..(353): NCBI GI NO: 34898928 NR Description: OJ1316_A04.17
MSRAIESTMRQSRQFVNLIMTNLYNGAKSLHFVDLKRQPLFKTPLPPTASTDGDRFETQDAFSQTQPTESLVLERLRLPRPSFQFETSTAQDRSWYINCLPLSDRVVFCSDQCGHNFVVDGIARCLVTMPSLHKRKMMPLSIFIPSTDVEGGGSLFLVDRSPGITATRVEFESLVYRKASFSNTYSWQAQLLPPAPYPLYTSYSWQAQLLPPAPYPLYTKISSYAVIGGGSHICLSVKNEGTYCLDTTRHTWSKVGTWTLPFDGKVEYVPELKLWFGASADRQKLAATDLSYLSSTVDSATGFQPEVLGSWMELTLPEGWEQKGRTQLVNLGSGRFCVARFLNEMFDPYGSGYVLLTGVEIVPHFDNLTGNDVSSGSGDGSKGKLKLQIIPHKSRVYMPTTALALIQDVF

SEQ ID NO: 33453 - protein, 402 aa, Zea mays subsp. mays
  peptide (1)..(402): Ceres Seq. ID no. 12345711
  misc_feature (18)..(358): NCBI GI NO: 37531434 NR Description: hypothetical protein
  misc_feature (1)..(389): NCBI GI NO: 34907072 NR Description: OSJNBa0093F16.25
  misc_feature (52)..(386): NCBI GI NO: 34902348 NR Description: Hypothetical protein
  misc_feature (50)..(390): NCBI GI NO: 15451604 NR Description: Hypothetical protein [Oryza sativa]
  misc_feature (1)..(189): NCBI GI NO: 38345446 NR Description: OSJNBa0042L16.1
  misc_feature (193)..(371): NCBI GI NO: 38345446 NR Description: OSJNBa0042L16.1
  misc_feature (1)..(402): NCBI GI NO: 34902338 NR Description: Unknown protein
  misc_feature (121)..(389): NCBI GI NO: 38344193 NR Description: OSJNBa0064G10.9
  misc_feature (1)..(154): NCBI GI NO: 34898928 NR Description: OJ1316_A04.17
  misc_feature (220)..(345): NCBI GI NO: 34898928 NR Description: OJ1316_A04.17
MRQSRQFVNLIMTNLYNGAKSLHFVDLKRQPLFKTPLPPTASTDGDRFETQDAFSQTQPTESLVLERLRLPRPSFQFETSTAQDRSWYINCLPLSDRVVFCSDQCGHNFVVDGIARCLVTMPSLHKRKMMPLSIFIPSTDVEGGGSLFLVDRSPGITATRVEFESLVYRKASFSNTYSWQAQLLPPAPYPLYTSYSWQAQLLPPAPYPLYTKISSYAVIGGGSHICLSVKNEGTYCLDTTRHTWSKVGTWTLPFDGKVEYVPELKLWFGASADRQKLAATDLSYLSSTVDSATGFQPEVLGSWMELTLPEGWEQKGRTQLVNLGSGRFCVARFLNEMFDPYGSGYVLLTGVEIVPHFDNLTGNDVSSGSGDGSKGKLKLQIIPHKSRVYMPTTALALIQDVF

SEQ ID NO: 33454 - protein, 391 aa, Zea mays subsp. mays
  peptide (1)..(391): Ceres Seq. ID no. 12345712
  misc_feature (7)..(347): NCBI GI NO: 37531434 NR Description: hypothetical protein
  misc_feature (1)..(378): NCBI GI NO: 34907072 NR Description: OSJNBa0093F16.25
  misc_feature (41)..(375): NCBI GI NO: 34902348 NR Description: Hypothetical protein
  misc_feature (39)..(379): NCBI GI NO: 15451604 NR Description: Hypothetical protein [Oryza sativa]
  misc_feature (1)..(178): NCBI GI NO: 38345446 NR Description: OSJNBa0042L16.1
  misc_feature (182)..(360): NCBI GI NO: 38345446 NR Description: OSJNBa0042L16.1
  misc_feature (1)..(391): NCBI GI NO: 34902338 NR Description: Unknown protein
  misc_feature (110)..(378): NCBI GI NO: 38344193 NR Description: OSJNBa0064G10.9
  misc_feature (1)..(143): NCBI GI NO: 34898928 NR Description: OJ1316_A04.17
  misc_feature (209)..(334): NCBI GI NO: 34898928 NR Description: OJ1316_A04.17
MTNLYNGAKSLHFVDLKRQPLFKTPLPPTASTDGDRFETQDAFSQTQPTESLVLERLRLPRPSFQFETSTAQDRSWYINCLPLSDRVVFCSDQCGHNFVVDGIARCLVTMPSLHKRKMMPLSIFIPSTDVEGGGSLFLVDRSPGITATRVEFESLVYRKASFSNTYSWQAQLLPPAPYPLYTSYSWQAQLLPPAPYPLYTKISSYAVIGGGSHICLSVKNEGTYCLDTTRHTWSKVGTWTLPFDGKVEYVPELKLWFGASADRQKLAATDLSYLSSTVDSATGFQPEVLGSWMELTLPEGWEQKGRTQLVNLGSGRFCVARFLNEMFDPYGSGYVLLTGVEIVPHFDNLTGNDVSSGSGDGSKGKLKLQIIPHKSRVYMPTTALALIQDVF

SEQ ID NO: 33455 - DNA, 1283 bp, Zea mays subsp. mays
  misc_feature (1)..(1283): Ceres Seq. ID no. 12413628
aagcactcatccattccatcatcccctttgcaagtatagtctctctgctaagcgaagcgaagcttcaagctagtctcggcggctctagaagacgatgggcaaggacgacgtgatcgagagcggcgctggcggcggcgagttcgctgccaaggactacacggaccctcccccggcgccgctgatcgacgcggcggagctggggtcctggtcgctgtaccgcgccgtgatcgccgagttcatcgccacgctgctgttcctgtacatcacggtggccaccgtgatcgggtacaagcaccagacggacgcgtcggcgtcgggcgccgacgcggcgtgcggcggcgtgggcgtgctgggcatcgcctgggccttcggcggcatgatcttcgtcctcgtctactgcaccgccggcatctcggggggccacatcaaccccgccgtcaccttcggcctcttcctggcgcgcaaggtctccctggtgcgcgcgctgctctacatcgtggcgcagtgcctcggcgccatctgcggcgtcggcctcgtcaaggcgttccagagcgcctacttcgacaggtacggcggcggcgccaactcgctcgcctccggctactcccgcggcaccggcctcggcgccgagatcatcggcaccttcgtgctcgtctacaccgtcttctccgccaccgaccccaagcgcaacgcccgcgactcccacgtcccggttctggctcccctccccatcggcttcgccgtgttcatggtgcacctggccaccatccccgtcaccggcaccggcatcaacccggccaggagcctgggcgccgccgtcatctacaacaaggacaagccctgggacgaccactggatcttctgggtgggccctctcgtgggcgctgccatcgcggccttctaccaccagtacatcctccgggctggcgccatcaaggcccctcggctccttcaggagcaacgcgtgatgagcggggcttggctgtggagcaatggcgggcgacctacgggcggggggccgtgagcgaggagaatgccatcattcatcgatcgacttgggtgccggtggttggttcgggtcgcctttttttttgtttcagcagctgctgcgttgcgcgcgtgcgtgagatttggtttggtttcgttcccctgcaatgtaatcatgtcgtgactctcaagggattattccgctctgctcttatggtctctgttttctatttaatgattgttattaccatgtagcagtaaccatcgtcatcagtgagaaccttgttgcttctgtc

SEQ ID NO: 33456 - protein, 309 aa, Zea mays subsp. mays
  peptide (1)..(309): Ceres Seq. ID no. 12413629
  misc_feature (34)..(271): Pfam Name: Pfam Description:  Major intrinsic protein
  misc_feature (1)..(282): NCBI GI NO: 13447801 NR Description: plasma membrane integral protein ZmPIP2-1
  misc_feature (1)..(282): NCBI GI NO: 29650727 NR Description: aquaporin [Zea mays]
  misc_feature (1)..(282): NCBI GI NO: 13447803 NR Description: plasma membrane integral protein ZmPIP2-2
  misc_feature (1)..(282): NCBI GI NO: 34901270 NR Description: putative plasma membrane intrinsic protein
  misc_feature (1)..(282): NCBI GI NO: 7441249 NR Description: probable plasma membrane intrinsic protein - rice
  misc_feature (1)..(281): NCBI GI NO: 13447805 NR Description: plasma membrane integral protein ZmPIP2-3
  misc_feature (1)..(281): NCBI GI NO: 13447807 NR Description: plasma membrane integral protein ZmPIP2-4
  misc_feature (1)..(281): NCBI GI NO: 4741931 NR Description: plasma membrane intrinsic protein [Zea mays]
  misc_feature (1)..(281): NCBI GI NO: 7441245 NR Description: plasma membrane intrinsic protein BPW1 - barley
  misc_feature (1)..(279): NCBI GI NO: 34901254 NR Description: putative plasma membrane intrinsic protein
MGKDDVIESGAGGGEFAAKDYTDPPPAPLIDAAELGSWSLYRAVIAEFIATLLFLYITVATVIGYKHQTDASASGADAACGGVGVLGIAWAFGGMIFVLVYCTAGISGGHINPAVTFGLFLARKVSLVRALLYIVAQCLGAICGVGLVKAFQSAYFDRYGGGANSLASGYSRGTGLGAEIIGTFVLVYTVFSATDPKRNARDSHVPVLAPLPIGFAVFMVHLATIPVTGTGINPARSLGAAVIYNKDKPWDDHWIFWVGPLVGAAIAAFYHQYILRAGAIKAPRLLQEQRVMSGAWLWSNGGRPTGGGP

SEQ ID NO: 33457 - protein, 215 aa, Zea mays subsp. mays
  peptide (1)..(215): Ceres Seq. ID no. 12413630
  misc_feature (1)..(177): Pfam Name: Pfam Description:  Major intrinsic protein
  misc_feature (1)..(188): NCBI GI NO: 13447801 NR Description: plasma membrane integral protein ZmPIP2-1
  misc_feature (1)..(188): NCBI GI NO: 29650727 NR Description: aquaporin [Zea mays]
  misc_feature (1)..(188): NCBI GI NO: 13447803 NR Description: plasma membrane integral protein ZmPIP2-2
  misc_feature (1)..(188): NCBI GI NO: 34901270 NR Description: putative plasma membrane intrinsic protein
  misc_feature (1)..(188): NCBI GI NO: 7441249 NR Description: probable plasma membrane intrinsic protein - rice
  misc_feature (1)..(187): NCBI GI NO: 13447805 NR Description: plasma membrane integral protein ZmPIP2-3
  misc_feature (1)..(187): NCBI GI NO: 13447807 NR Description: plasma membrane integral protein ZmPIP2-4
  misc_feature (1)..(187): NCBI GI NO: 4741931 NR Description: plasma membrane intrinsic protein [Zea mays]
  misc_feature (1)..(187): NCBI GI NO: 7441245 NR Description: plasma membrane intrinsic protein BPW1 - barley
  misc_feature (1)..(185): NCBI GI NO: 34901254 NR Description: putative plasma membrane intrinsic protein
MIFVLVYCTAGISGGHINPAVTFGLFLARKVSLVRALLYIVAQCLGAICGVGLVKAFQSAYFDRYGGGANSLASGYSRGTGLGAEIIGTFVLVYTVFSATDPKRNARDSHVPVLAPLPIGFAVFMVHLATIPVTGTGINPARSLGAAVIYNKDKPWDDHWIFWVGPLVGAAIAAFYHQYILRAGAIKAPRLLQEQRVMSGAWLWSNGGRPTGGGP

SEQ ID NO: 33458 - DNA, 1299 bp, Zea mays subsp. mays
  misc_feature (1)..(1299): Ceres Seq. ID no. 12341243
aatacaagccgggaaccagaccccaccagcagcactccatatactgcatgcatagagatagatagatatatatagagcttaattactatagtcgtcgtcgtcgatcgtaactgcaatagctttagtttttgcagtcatcagataaatatagggtccataaatatatccatcagctagctgtaactgcaactgcagtcgcaatagctatagttttcagttgattagctagctactaactacaacaagctaggcaaatcgatcaaactaaggctcggcagcggcagcggcatggacgcgatcagcagcctgttgctgcagcagggatggaggaagggcccctggacggcgctggaggacaggctgctcaccgagtacgtgcagcagcacggcgagggctgctggaactccgtcgccaagctcacagggctgcggcggagcgggaagagctgccggctgcggtgggtgaactacctccggccggacctcaagcggggcaagatcacccccgacgaggagaccgtcatcctccacctgcacgccatgctcggcaacaggtggtcggcgatcgcgcggtgcctgccggggaggacggacaacgagatcaagaactactggcggacgcacttcaagaaggcccggccgtcgcggcgcgcccgggcgcagctgctgcaccagtaccagctgcagcagcaggagcagcgccgccagtacctgcagctcctgcagccgcagcagctgcagcagcagcagctgggggtggtgaaacaacagcagctggagcagcagagcccgccggagcctcatcaccaggccatgatggacagcctgcaaagcacggcggcgtgctactgcagcccggtgccggaggaatgctgcccgctcccggccgacgacgacgcggtgctgtgggatagcctgtggaggctggtggacggggatggatgcggcgacggcgacggcgatggctccagcggaggcgactactagccggctagcacgtacgtgtgcgtgtgtatgccaggctgccagccagccagtgtaaagaaataaagcggaagaggaggttctcttcaggtttcagctgctgcaagccaaggatcctgctagtggtagtagagacatgctaattttcctacgagaatagacgatcatgcttcatgcttttttcccctttatccatgaaccatgagcaagtgacattgtgtatcgaagggccctctgtttatgttattatggcctgattacaaggttggaataccttcatgttccttttggtttcaagaatcaagatcatgtttt

SEQ ID NO: 33459 - protein, 232 aa, Zea mays subsp. mays
  peptide (1)..(232): Ceres Seq. ID no. 12341244
  misc_feature (15)..(62): Pfam Name: Pfam Description:  Myb-like DNA-binding domain
  misc_feature (9)..(159): NCBI GI NO: 32489528 NR Description: OSJNBa0043L24.19
  misc_feature (8)..(155): NCBI GI NO: 15230095 NR Description: myb family transcription factor
  misc_feature (8)..(159): NCBI GI NO: 15236297 NR Description: myb family transcription factor
  misc_feature (8)..(115): NCBI GI NO: 1732513 NR Description: snapdragon myb protein 305 homolog
  misc_feature (10)..(228): NCBI GI NO: 15230123 NR Description: myb-like transcription factor, putative
  misc_feature (1)..(135): NCBI GI NO: 15225687 NR Description: putative MYB family transcription factor
  misc_feature (1)..(135): NCBI GI NO: 18087349 NR Description: putative transcription factor MYB101
  misc_feature (10)..(115): NCBI GI NO: 30024600 NR Description: transcription factor MYB102 [Lotus japonicus]
  misc_feature (1)..(169): NCBI GI NO: 10177377 NR Description: contains similarity to MYB-related transcriptionfactor~gene_id:K13P22
  misc_feature (1)..(169): NCBI GI NO: 18423700 NR Description: putative protein; protein id: At5g55020
MDAISSLLLQQGWRKGPWTALEDRLLTEYVQQHGEGCWNSVAKLTGLRRSGKSCRLRWVNYLRPDLKRGKITPDEETVILHLHAMLGNRWSAIARCLPGRTDNEIKNYWRTHFKKARPSRRARAQLLHQYQLQQQEQRRQYLQLLQPQQLQQQQLGVVKQQQLEQQSPPEPHHQAMMDSLQSTAACYCSPVPEECCPLPADDDAVLWDSLWRLVDGDGCGDGDGDGSSGGDY

SEQ ID NO: 33460 - protein, 196 aa, Zea mays subsp. mays
  peptide (1)..(196): Ceres Seq. ID no. 12341245
  misc_feature (105)..(163): NCBI GI NO: 18390103 NR Description: putative anthocyanin regulatory C1
MEEGPLDGAGGQAAHRVRAAARRGLLELRRQAHRAAAEREELPAAVGELPPAGPQAGQDHPRRGDRHPPPARHARQQVVGDRAVPAGEDGQRDQELLADALQEGPAVAARPGAAAAPVPAAAAGAAPPVPAAPAAAAAAAAAAGGGETTAAGAAEPAGASSPGHDGQPAKHGGVLLQPGAGGMLPAPGRRRRGAVG

SEQ ID NO: 33461 - protein, 148 aa, Zea mays subsp. mays
  peptide (1)..(148): Ceres Seq. ID no. 12341246
  misc_feature (1)..(75): NCBI GI NO: 32489528 NR Description: OSJNBa0043L24.19
  misc_feature (1)..(71): NCBI GI NO: 15230095 NR Description: myb family transcription factor
  misc_feature (1)..(75): NCBI GI NO: 15236297 NR Description: myb family transcription factor
  misc_feature (1)..(31): NCBI GI NO: 1732513 NR Description: snapdragon myb protein 305 homolog
  misc_feature (1)..(144): NCBI GI NO: 15230123 NR Description: myb-like transcription factor, putative
  misc_feature (1)..(51): NCBI GI NO: 15225687 NR Description: putative MYB family transcription factor
  misc_feature (1)..(51): NCBI GI NO: 18087349 NR Description: putative transcription factor MYB101
  misc_feature (1)..(31): NCBI GI NO: 30024600 NR Description: transcription factor MYB102 [Lotus japonicus]
  misc_feature (1)..(85): NCBI GI NO: 10177377 NR Description: contains similarity to MYB-related transcriptionfactor~gene_id:K13P22
  misc_feature (1)..(85): NCBI GI NO: 18423700 NR Description: putative protein; protein id: At5g55020
MLGNRWSAIARCLPGRTDNEIKNYWRTHFKKARPSRRARAQLLHQYQLQQQEQRRQYLQLLQPQQLQQQQLGVVKQQQLEQQSPPEPHHQAMMDSLQSTAACYCSPVPEECCPLPADDDAVLWDSLWRLVDGDGCGDGDGDGSSGGDY

SEQ ID NO: 33462 - DNA, 860 bp, Zea mays subsp. mays
  misc_feature (1)..(860): Ceres Seq. ID no. 12404667
attacccaccataccaaccccgcgttgcggttatatagggccgtatttcccccgcgtctccgcgtcagtggaagcgatcgacaccattcaagctaaagctgctttcttgggaaacgcttcatcgccacagctcgatcgatggcttcttcctggggttctcggttgccgctcgcagtagtgctgctgctcgtggcactgctcctcctccacggcagccgccacaagctacaccgtcggcgacgggtccggctggacaaccggcgtcgactacacatcttgggccgcctccaaaaacttcaaagtcggggacaatctcgtgttcaactacgcgaaagggctgcacacggtggtggaggtgagcgcggccgagtacatggcgtgcacggccgccaactcgctgggctccgacagcagcggcgcgaccaccgtggccctcaggacgccaggcacccactacttcgtgtgcagcatcacggggcactgcggcgccgggatgaagctggcggtgaccctcggcggctccaactcccctgctgccacgccgcggacgtcgtccccgacccctaccacgccgtacacgacgccggccaccaccacgccgtacacgacgccgacgtgctctggcggcggcggcaccacggcgaccccgggcatgactccgttcacgtcataccccagcgcggccggccttgggtcggcggcgttggctggatttagtctggtttggtgtgtgagtgtccggctagcgctgctctaggcaaagggcggccatggaccgtggtcgaccagggtatgtaacagtgtaacgtatgtgtttgttctttgttccggatcgagctagctggggtatagtatacttg

SEQ ID NO: 33463 - protein, 192 aa, Zea mays subsp. mays
  peptide (1)..(192): Ceres Seq. ID no. 12404668
MASSWGSRLPLAVVLLLVALLLLHGSRHKLHRRRRVRLDNRRRLHILGRLQKLQSRGQSRVQLRERAAHGGGGERGRVHGVHGRQLAGLRQQRRDHRGPQDARHPLLRVQHHGALRRRDEAGGDPRRLQLPCCHAADVVPDPYHAVHDAGHHHAVHDADVLWRRRHHGDPGHDSVHVIPQRGRPWVGGVGWI

SEQ ID NO: 33464 - protein, 127 aa, Zea mays subsp. mays
  peptide (1)..(127): Ceres Seq. ID no. 12404669
  misc_feature (1)..(127): NCBI GI NO: 14140127 NR Description: uclacyanin 3-like protein [Oryza sativa]
  misc_feature (1)..(90): NCBI GI NO: 2493318 NR Description: Blue copper protein precursor
  misc_feature (1)..(91): NCBI GI NO: 38346158 NR Description: OSJNBa0079A21.5
  misc_feature (1)..(117): NCBI GI NO: 25453522 NR Description: blue copper-binding protein II
  misc_feature (1)..(117): NCBI GI NO: 15224960 NR Description: phytocyanin; protein id: At2g44790
  misc_feature (1)..(117): NCBI GI NO: 21554060 NR Description: phytocyanin [Arabidopsis thaliana]
  misc_feature (1)..(117): NCBI GI NO: 25453521 NR Description: blue copper-binding protein II
  misc_feature (1)..(66): NCBI GI NO: 15219890 NR Description: uclacyanin II, putative; protein id: At1g22480.1
  misc_feature (1)..(33): NCBI GI NO: 3747044 NR Description: blue copper protein [Zea mays]
  misc_feature (1)..(118): NCBI GI NO: 38636764 NR Description: putative blue copper binding protein
MACTAANSLGSDSSGATTVALRTPGTHYFVCSITGHCGAGMKLAVTLGGSNSPAATPRTSSPTPTTPYTTPATTTPYTTPTCSGGGGTTATPGMTPFTSYPSAAGLGSAALAGFSLVWCVSVRLALL

SEQ ID NO: 33465 - DNA, 1107 bp, Zea mays subsp. mays
  misc_feature (1)..(1107): Ceres Seq. ID no. 12376269
gacgacggcgacgcttcagttgagtgcgggtgtagtgctcctgcgacttcggcctgtccactttttagggggcgccgaggggcgtgggggtacggccgtccgcacaataatctgcgctgcgcggaagaagggaaggggaaaagcagttaagcttgagcgcgcgcgacagggtcaagtcgagggccggggaatcgccggagaatggaggtgggcagggctccgcgacgacgggtgtccccagcagcggcggcggcggctgtgccttcgctgcttctgttcgccgttctattcgcgggccgggcggcggcgttcggccacctgcaagccgccggcgccggcgcgacggcgctgtacaagcacgcgtcgttcttcgaccgcgacggcgacggcgtcgtctccttctcggagacgtacggcgcgtttcgggcactcgggtttggattcggcctgtccagcgtcagcgctgcgctcatcaacggcgctcttggtagcaagtgcagacctcaaaatgcaacgtcatcgaagttggatatctacatagaggacatccagaaagggaaacatggaagcgattcagggtcatacgacgccgaaggaaggtttgttcctgacaagttcgaagagatattcgccaagcacgccaagactgtcccagacgccctgacgtcggacgagatcgaccagctgctccaggcgaacagagagcccggggactacagcggatgggctggcgcagaagcggagtggaagaccctctacagcctcggcaaggacaaggacggcctcctccgcaaggacgtcgcgagaagcgtctacgacgggacactgttccacatgctcgcgcccaactggaaatctcccgacgaggaggaggaacaggaactaagcgtgatccgggagagctgaaccgagaggtacaagcaaagtctggttgagagataaggactctgggaccctctgaacatgctgtcaagcaacatgtactactagctaagtttttacaatatatattcttattgtgtaattaaactttaaatgggttaatttcacaattaaaatcattgaaagggaaatagttttaaaactatttcttatattttggtgctc

SEQ ID NO: 33466 - protein, 234 aa, Zea mays subsp. mays
  peptide (1)..(234): Ceres Seq. ID no. 12376270
  misc_feature (50)..(213): Pfam Name: Pfam Description:  Caleosin related protein
  misc_feature (50)..(213): NCBI GI NO: 18409649 NR Description: Ca2+-binding EF-hand common family protein
  misc_feature (50)..(213): NCBI GI NO: 18409651 NR Description: Ca2+-binding EF-hand common family protein
  misc_feature (50)..(213): NCBI GI NO: 21593851 NR Description: unknown [Arabidopsis thaliana]
  misc_feature (50)..(213): NCBI GI NO: 21617961 NR Description: unknown [Arabidopsis thaliana]
  misc_feature (46)..(219): NCBI GI NO: 34902470 NR Description: Putative abscisic acid-induced protein - rice
  misc_feature (35)..(192): NCBI GI NO: 37652831 NR Description: calcium binding protein [Fagus sylvatica]
  misc_feature (48)..(228): NCBI GI NO: 15220687 NR Description: pollen coat EF-hand protein; protein id:At1g23240
  misc_feature (7)..(217): NCBI GI NO: 6900308 NR Description: putative calcium binding EF-hand protein
  misc_feature (48)..(223): NCBI GI NO: 6478218 NR Description: caleosin [Sesamum indicum]
  misc_feature (48)..(214): NCBI GI NO: 7459611 NR Description: Ca+2-binding EF hand protein homolog PM13
MEVGRAPRRRVSPAAAAAAVPSLLLFAVLFAGRAAAFGHLQAAGAGATALYKHASFFDRDGDGVVSFSETYGAFRALGFGFGLSSVSAALINGALGSKCRPQNATSSKLDIYIEDIQKGKHGSDSGSYDAEGRFVPDKFEEIFAKHAKTVPDALTSDEIDQLLQANREPGDYSGWAGAEAEWKTLYSLGKDKDGLLRKDVARSVYDGTLFHMLAPNWKSPDEEEEQELSVIRES

SEQ ID NO: 33467 - protein, 179 aa, Zea mays subsp. mays
  peptide (1)..(179): Ceres Seq. ID no. 12376271
TTATLQLSAGVVLLRLRPVHFLGGAEGRGGTAVRTIICAARKKGRGKAVKLERARQGQVEGRGIAGEWRWAGLRDDGCPQQRRRRLCLRCFCSPFYSRAGRRRSATCKPPAPARRRCTSTRRSSTATATASSPSRRRTARFGHSGLDSACPASALRSSTALLVASADLKMQRHRSWIST

SEQ ID NO: 33468 - DNA, 1048 bp, Zea mays subsp. mays
  misc_feature (1)..(1048): Ceres Seq. ID no. 13492045
aaccgcaaggatccaccacaacagcgaaggagaaagcagaccaacctagccacccagggagaaaggccaaaagggaggggagagtgtcgtcatggcttccattgtcgcttccaggagggccgttcctctagttcgctctctggagaagctcatcgcagcgtcctccgcgcccgggactggctccgccctcaggccggtggcagtcgccggcggcctccgtggctacaacaccggcgctccgctccgacgctacgagggggccgagtcggaagacgatagcgtccgcgagtacgatgggcggcacggcggccgggactacgccgtgcccagcctgttctcagatattttccgtgatccgcttagtgcgccgcacagcattggccgcctgctgaacctgatggacgacttggcggtggcggcgccaggtcgtgcggtgcgccgtggctggaacgcgaaggaggacgaggaggcgctgcacctgagggtggacatgccgggcctggggaaggagcacgtcaaggtgtgggcggagcagaacagcctggtgatcaagggcgagggcgagaaggaggatagcgaggacgaggccgccccgcctccgagatacagcggtcgcatcgagctcgcgccagaggtttacaggatggacaagatcaaggcggagatgaagaacggcgtgctcaaggtggtcgtgccgaaggtgaaggagcagcagcgcaaggacgtgttccaagtcaacgtcgagtagatgtttccaaatagaagcaagtgccggtacgggatggaggattggagcctggaggggcactgccaaactaggattcctctctctcaatctgatctggattctggaatcagatttctcttctttcatttttctcgtctatcttctatcagtatgaaataagcaacgtcgcttcagttttcgtgtcaaggccggtggagtcgcctatgtttattttattttctttgtatttcctacctggacacacgttctctatgccgtgtttggtttccgcagatttttaaaatatgcatgttcaaaccc

SEQ ID NO: 33469 - protein, 218 aa, Zea mays subsp. mays
  peptide (1)..(218): Ceres Seq. ID no. 13492046
  misc_feature (1)..(218): NCBI GI NO: 7441311 NR Description: heat shock protein hsp22 precursor
  misc_feature (1)..(218): NCBI GI NO: 4138869 NR Description: small heat shock protein Hsp23.5
  misc_feature (29)..(218): NCBI GI NO: 123564 NR Description: Small heat shock protein, chloroplast precursor
  misc_feature (33)..(218): NCBI GI NO: 7441310 NR Description: heat shock protein MTSHP precursor
  misc_feature (16)..(218): NCBI GI NO: 21554988 NR Description: mitochondrial heat shock 22 kd protein-like
  misc_feature (16)..(218): NCBI GI NO: 15242086 NR Description: heat shock protein, putative
  misc_feature (24)..(218): NCBI GI NO: 4138871 NR Description: small heat shock protein Hsp23.6
  misc_feature (24)..(218): NCBI GI NO: 1170368 NR Description: Heat shock 22 kDa protein, mitochondrial precursor
  misc_feature (16)..(218): NCBI GI NO: 7159338 NR Description: LMW heat shock protein [Euphorbia esula]
  misc_feature (16)..(217): NCBI GI NO: 15234969 NR Description: mitochondrion-localized small heat shock protein
MASIVASRRAVPLVRSLEKLIAASSAPGTGSALRPVAVAGGLRGYNTGAPLRRYEGAESEDDSVREYDGRHGGRDYAVPSLFSDIFRDPLSAPHSIGRLLNLMDDLAVAAPGRAVRRGWNAKEDEEALHLRVDMPGLGKEHVKVWAEQNSLVIKGEGEKEDSEDEAAPPPRYSGRIELAPEVYRMDKIKAEMKNGVLKVVVPKVKEQQRKDVFQVNVE

SEQ ID NO: 33470 - protein, 116 aa, Zea mays subsp. mays
  peptide (1)..(116): Ceres Seq. ID no. 13492047
  misc_feature (1)..(116): NCBI GI NO: 7441311 NR Description: heat shock protein hsp22 precursor
  misc_feature (1)..(116): NCBI GI NO: 4138869 NR Description: small heat shock protein Hsp23.5
  misc_feature (1)..(116): NCBI GI NO: 123564 NR Description: Small heat shock protein, chloroplast precursor
  misc_feature (1)..(116): NCBI GI NO: 7441310 NR Description: heat shock protein MTSHP precursor
  misc_feature (1)..(116): NCBI GI NO: 21554988 NR Description: mitochondrial heat shock 22 kd protein-like
  misc_feature (1)..(116): NCBI GI NO: 15242086 NR Description: heat shock protein, putative
  misc_feature (1)..(116): NCBI GI NO: 4138871 NR Description: small heat shock protein Hsp23.6
  misc_feature (1)..(116): NCBI GI NO: 1170368 NR Description: Heat shock 22 kDa protein, mitochondrial precursor
  misc_feature (1)..(116): NCBI GI NO: 7159338 NR Description: LMW heat shock protein [Euphorbia esula]
  misc_feature (1)..(115): NCBI GI NO: 15234969 NR Description: mitochondrion-localized small heat shock protein
MDDLAVAAPGRAVRRGWNAKEDEEALHLRVDMPGLGKEHVKVWAEQNSLVIKGEGEKEDSEDEAAPPPRYSGRIELAPEVYRMDKIKAEMKNGVLKVVVPKVKEQQRKDVFQVNVE

SEQ ID NO: 33471 - DNA, 876 bp, Zea mays subsp. mays
  misc_feature (1)..(876): Ceres Seq. ID no. 12403778
gcaccagcaccagcacggcgaccaaccctctcccaacccgactagtcggactcgcagctccgccccaagtccaggtccaagcatggaagtcgcggcggcgtcggcgaggcccgtcctgcgcgtggctgccatctgcggctccctccgcaaggcctccttcaaccgcggcctcctccgcgccgccgcggaggtgtgcgaggactccatcccggggctccgcatcgacgagctcgacatctccgacctgcccatcatcaacaccgaccttgagaccggcagcggcagcggcaccgtcttcccgcccgccgtcgaggccttccgcgccaaggtctgccaggccgactgcttcctcttcggcgcgcccgagtacaactactccatcgccacccccctgaagaacgtgcttgactgggcctctagaggaaagaactgttgggcagacaaacctgctgcgatcgtgagtgcaggcggcggctttggaggagggaggtcgcagtaccatctccgtcaggtcggggttttcctggatctccatttcatcaacaagccagaactgtgcgtccaagccttccagcagccacccaagtttgacagcgatggaaatctggtcgatgctgaaatcagagagcggctcaagaaagtgctcctatcccttcaggccttcacgctcaggcttcagaaggaggactgaatcaactcggtaccattgtagtacgtgcttccctgagaagcgtttattgctcttggaagtttgtaacgcgttgctgggtggcctggaagtttgtaataaatccaagaagtgttctcgctgaatatttaagatttgatcgcatctatatataataaagattgtgttctagcgtttttgcgtttccc

SEQ ID NO: 33472 - protein, 229 aa, Zea mays subsp. mays
  peptide (1)..(229): Ceres Seq. ID no. 12403779
  misc_feature (39)..(213): Pfam Name: Pfam Description:  NADPH-dependent FMN reductase
  misc_feature (32)..(229): NCBI GI NO: 34906648 NR Description: putative NADPH:quinone oxidoreductase
  misc_feature (34)..(226): NCBI GI NO: 24745889 NR Description: NAD(P)H:quinone oxidoreductase [Solanum tuberosum]
  misc_feature (28)..(226): NCBI GI NO: 15232856 NR Description: NADPH:quinone oxidoreductase
  misc_feature (28)..(226): NCBI GI NO: 5002232 NR Description: NADPH:quinone oxidoreductase
  misc_feature (34)..(226): NCBI GI NO: 34906652 NR Description: putative NADPH:quinone oxidoreductase
  misc_feature (39)..(226): NCBI GI NO: 15596401 NR Description: conserved hypothetical protein
  misc_feature (39)..(227): NCBI GI NO: 22406524 NR Description: hypothetical protein [Ferroplasma acidarmanus]
  misc_feature (39)..(209): NCBI GI NO: 17942391 NR Description: putative NADH-dependent reductase
  misc_feature (38)..(184): NCBI GI NO: 23061144 NR Description: hypothetical protein
  misc_feature (39)..(226): NCBI GI NO: 16767134 NR Description: putative oxidoreductase
HQHQHGDQPSPNPTSRTRSSAPSPGPSMEVAAASARPVLRVAAICGSLRKASFNRGLLRAAAEVCEDSIPGLRIDELDISDLPIINTDLETGSGSGTVFPPAVEAFRAKVCQADCFLFGAPEYNYSIATPLKNVLDWASRGKNCWADKPAAIVSAGGGFGGGRSQYHLRQVGVFLDLHFINKPELCVQAFQQPPKFDSDGNLVDAEIRERLKKVLLSLQAFTLRLQKED

SEQ ID NO: 33473 - protein, 202 aa, Zea mays subsp. mays
  peptide (1)..(202): Ceres Seq. ID no. 12403780
  misc_feature (12)..(186): Pfam Name: Pfam Description:  NADPH-dependent FMN reductase
  misc_feature (5)..(202): NCBI GI NO: 34906648 NR Description: putative NADPH:quinone oxidoreductase
  misc_feature (7)..(199): NCBI GI NO: 24745889 NR Description: NAD(P)H:quinone oxidoreductase [Solanum tuberosum]
  misc_feature (1)..(199): NCBI GI NO: 15232856 NR Description: NADPH:quinone oxidoreductase
  misc_feature (1)..(199): NCBI GI NO: 5002232 NR Description: NADPH:quinone oxidoreductase
  misc_feature (7)..(199): NCBI GI NO: 34906652 NR Description: putative NADPH:quinone oxidoreductase
  misc_feature (12)..(199): NCBI GI NO: 15596401 NR Description: conserved hypothetical protein
  misc_feature (12)..(200): NCBI GI NO: 22406524 NR Description: hypothetical protein [Ferroplasma acidarmanus]
  misc_feature (12)..(182): NCBI GI NO: 17942391 NR Description: putative NADH-dependent reductase
  misc_feature (11)..(157): NCBI GI NO: 23061144 NR Description: hypothetical protein
  misc_feature (12)..(199): NCBI GI NO: 16767134 NR Description: putative oxidoreductase
MEVAAASARPVLRVAAICGSLRKASFNRGLLRAAAEVCEDSIPGLRIDELDISDLPIINTDLETGSGSGTVFPPAVEAFRAKVCQADCFLFGAPEYNYSIATPLKNVLDWASRGKNCWADKPAAIVSAGGGFGGGRSQYHLRQVGVFLDLHFINKPELCVQAFQQPPKFDSDGNLVDAEIRERLKKVLLSLQAFTLRLQKED

SEQ ID NO: 33474 - protein, 130 aa, Zea mays subsp. mays
  peptide (1)..(130): Ceres Seq. ID no. 12403781
  misc_feature (2)..(130): Pfam Name: BLLF1 Pfam Description: Herpes virus major outer envelope glycoprotein
  misc_feature (43)..(130): NCBI GI NO: 5420387 NR Description: proteophosphoglycan [Leishmania major]
  misc_feature (18)..(130): NCBI GI NO: 11359723 NR Description: proteophosphoglycan, membrane-associated
  misc_feature (43)..(130): NCBI GI NO: 28829783 NR Description: similar to Leishmania major. Ppg3
  misc_feature (43)..(130): NCBI GI NO: 11359723 NR Description: proteophosphoglycan, membrane-associated
  misc_feature (1)..(130): NCBI GI NO: 5420387 NR Description: proteophosphoglycan [Leishmania major]
  misc_feature (1)..(130): NCBI GI NO: 13592175 NR Description: ppg3 [Leishmania major]
  misc_feature (37)..(130): NCBI GI NO: 11359723 NR Description: proteophosphoglycan, membrane-associated
  misc_feature (44)..(130): NCBI GI NO: 5420387 NR Description: proteophosphoglycan [Leishmania major]
  misc_feature (18)..(130): NCBI GI NO: 5420387 NR Description: proteophosphoglycan [Leishmania major]
  misc_feature (43)..(130): NCBI GI NO: 13592175 NR Description: ppg3 [Leishmania major]
TSTSTATNPLPTRLVGLAAPPQVQVQAWKSRRRRRGPSCAWLPSAAPSARPPSTAASSAPPRRCARTPSRGSASTSSTSPTCPSSTPTLRPAAAAAPSSRPPSRPSAPRSARPTASSSARPSTTTPSPPP

SEQ ID NO: 33475 - DNA, 745 bp, Zea mays subsp. mays
  misc_feature (1)..(745): Ceres Seq. ID no. 12382779
aaaaattccaagagatgaacatcttgttgagtcacttgtgttgctgcattcttattctaggcatctacgctccgacatccgccacatcagacaatcctcctctgcaggatgtatgccccatggctccccagggcgagcggcgagagttgtccatgaacgggttcctctgcaagcatccgagcaccatcctggcgtccgacttcaagactctgatgctaaaccacgccggagacctggacagcatagcctcggtcgtcggtgagcatggtgaccgctgccgagttcccaggcctgaacaccctgggcctgtcgatggcgcgcaccgacatcgccccctacggggtggtgctcccgcactcccacccgcgggcgtcggagatgatgttcgtacacggtggcagcgtggtggccggcttcctggacaccgagggcaggctgttccagaagcgtctcggtgagggagaggtgttcgtcttcccccgcggcttgcttcactacgtcatgaactacggtttcggcctcgcgacggcgttctccgtgctgaacagccagaaccccggcgtggtcggtgtcgcccacgccatgttttttgcgagtgagtcggacgtagtcgaaggtctaatggccaggatgctcaagtttggagagatggaggtgactagtgacaacaacatcactgctggtttcccatgggcattctgatctgagtaggtgcaattcaagatcgttggtggtttaagttccc

SEQ ID NO: 33476 - protein, 151 aa, Zea mays subsp. mays
  peptide (1)..(151): Ceres Seq. ID no. 12382780
  misc_feature (16)..(80): NCBI GI NO: 15240338 NR Description: germin-like protein - like; protein id: At5g61750
  misc_feature (29)..(77): NCBI GI NO: 22329473 NR Description: germin-like oxalate oxidase; protein id:At1g10460
  misc_feature (23)..(85): NCBI GI NO: 34906612 NR Description: germin(oxalate oxidase)-like protein
KFQEMNILLSHLCCCILILGIYAPTSATSDNPPLQDVCPMAPQGERRELSMNGFLCKHPSTILASDFKTLMLNHAGDLDSIASVVGEHGDRCRVPRPEHPGPVDGAHRHRPLRGGAPALPPAGVGDDVRTRWQRGGRLPGHRGQAVPEASR

SEQ ID NO: 33477 - protein, 147 aa, Zea mays subsp. mays
  peptide (1)..(147): Ceres Seq. ID no. 12382781
  misc_feature (12)..(76): NCBI GI NO: 15240338 NR Description: germin-like protein - like; protein id: At5g61750
  misc_feature (25)..(73): NCBI GI NO: 22329473 NR Description: germin-like oxalate oxidase; protein id:At1g10460
  misc_feature (19)..(81): NCBI GI NO: 34906612 NR Description: germin(oxalate oxidase)-like protein
MNILLSHLCCCILILGIYAPTSATSDNPPLQDVCPMAPQGERRELSMNGFLCKHPSTILASDFKTLMLNHAGDLDSIASVVGEHGDRCRVPRPEHPGPVDGAHRHRPLRGGAPALPPAGVGDDVRTRWQRGGRLPGHRGQAVPEASR

SEQ ID NO: 33478 - protein, 145 aa, Zea mays subsp. mays
  peptide (1)..(145): Ceres Seq. ID no. 12382782
  misc_feature (1)..(103): Pfam Name: Pfam Description:  Cupin
  misc_feature (1)..(137): NCBI GI NO: 15240338 NR Description: germin-like protein - like; protein id: At5g61750
  misc_feature (1)..(119): NCBI GI NO: 22329473 NR Description: germin-like oxalate oxidase; protein id:At1g10460
  misc_feature (1)..(111): NCBI GI NO: 34906612 NR Description: germin(oxalate oxidase)-like protein
  misc_feature (1)..(122): NCBI GI NO: 4996622 NR Description: germin-like protein [Atriplex lentiformis]
  misc_feature (3)..(141): NCBI GI NO: 34910362 NR Description: putative germin-like protein
  misc_feature (1)..(132): NCBI GI NO: 2745849 NR Description: germin-like protein; PcGER1 [Pinus caribaea]
  misc_feature (1)..(131): NCBI GI NO: 5852087 NR Description: zwh0010.1 [Oryza sativa (indica cultivar-group)]
  misc_feature (1)..(131): NCBI GI NO: 21741995 NR Description: OSJNBa0058K23.2
  misc_feature (1)..(132): NCBI GI NO: 19071771 NR Description: germin-like protein [Pinus sylvestris]
  misc_feature (1)..(132): NCBI GI NO: 7447346 NR Description: germin-like protein - Monterey pine
MVTAAEFPGLNTLGLSMARTDIAPYGVVLPHSHPRASEMMFVHGGSVVAGFLDTEGRLFQKRLGEGEVFVFPRGLLHYVMNYGFGLATAFSVLNSQNPGVVGVAHAMFFASESDVVEGLMARMLKFGEMEVTSDNNITAGFPWAF

SEQ ID NO: 33479 - DNA, 830 bp, Zea mays subsp. mays
  misc_feature (1)..(830): Ceres Seq. ID no. 12355697
gcacacgacgcaggcactcggcctgccgtctgtccctttcgaccttcataggcgcacttctccctcccgctctcgcgccgccgccctcgtgcgtttgagcgagatccatacatccccatcccattttgcacccggattggcttcttcttctactactgtacagcacttcttttgtgtggctgcaaagttctgtaattctagaggagcaagatggagattattatcatcatctcacttgtcattcttttggcactaggagctctctttgtgatcccaaagtcacaaaataaaggtaaatcaaagagaaacgacttaggagctggaacgacatctaggagctttacgacagaagagatctctaaacattccacaagggaggactgttggatcattatcaaggacaaggtctatgatgtcactccttatgtagaggaacatccaggcggagatgccattctaaataatgctgggggtgattccacggagggcttttttgggccacagcatggcactagggtcttcgatatcatcgaggatttctgcatcggtcagttgaaggcttcatgatgatgacaggatagtttgtattgaatttgttacgggacataaatttgtgagaagctacattttatctatgtttgagcattgcgaccatgagcatatgaatgccagtataattgttccacaactgttattaggcctgccctgagctgtgatgtaggagctcgtttttttttctctgctgggggcaatgtgagcatcagttcgaccactggttgttgtgcttgcacatttctgttgttggacaagactgaaacgtttttttcccg

SEQ ID NO: 33480 - protein, 118 aa, Zea mays subsp. mays
  peptide (1)..(118): Ceres Seq. ID no. 12355698
  misc_feature (43)..(115): Pfam Name: Pfam Description:  Cytochrome b5-like Heme/Steroid binding domain
  misc_feature (1)..(118): NCBI GI NO: 40253472 NR Description: cytochrome b5-like
  misc_feature (3)..(115): NCBI GI NO: 15219780 NR Description: cytochrome b5, putative; protein id: At1g60660
  misc_feature (39)..(118): NCBI GI NO: 25044825 NR Description: cytochrome b5 [Ananas comosus]
  misc_feature (40)..(115): NCBI GI NO: 20137975 NR Description: Cytochrome b5
  misc_feature (47)..(115): NCBI GI NO: 19921470 NR Description: CG6870-PA [Drosophila melanogaster]
  misc_feature (39)..(118): NCBI GI NO: 29469883 NR Description: cytochrome b5 [Candida tropicalis]
  misc_feature (47)..(118): NCBI GI NO: 15238776 NR Description: cytochrome b5 (dbj|BAA74839
  misc_feature (47)..(118): NCBI GI NO: 729252 NR Description: Cytochrome B5
  misc_feature (39)..(115): NCBI GI NO: 30090027 NR Description: cytochrome b5 [Sorghum bicolor]
  misc_feature (37)..(116): NCBI GI NO: 40644254 NR Description: cytochrome b5
MEIIIIISLVILLALGALFVIPKSQNKGKSKRNDLGAGTTSRSFTTEEISKHSTREDCWIIIKDKVYDVTPYVEEHPGGDAILNNAGGDSTEGFFGPQHGTRVFDIIEDFCIGQLKAS

SEQ ID NO: 33481 - protein, 84 aa, Zea mays subsp. mays
  peptide (1)..(84): Ceres Seq. ID no. 12355699
HTTQALGLPSVPFDLHRRTSPSRSRAAALVRLSEIHTSPSHFAPGLASSSTTVQHFFCVAAKFCNSRGARWRLLSSSHLSFFWH

SEQ ID NO: 33482 - DNA, 1095 bp, Zea mays subsp. mays
  misc_feature (1)..(1095): Ceres Seq. ID no. 12403775
aacaaattgaccgccattgtgcaaaccagaaccccttcgccattttcaccaactccctccgatcccggccatggcgggggaggactgccgctccggcgcggaaatggacgcgctcgtacgacgcttgaagctccaccggccgtccccatccccctacgaccccgatccggccgcggcccccgtccccgccaccgccggcgacggcgagctgttccggccgcggagagctgccgtgcttgtctgcctcttccggggagacggcggcgagctccgcgtcatcctcactaagcgctcgtcctccctctccacccactccggtgaagtttcattgccaggaggaaaagtcgaggagggtgatgctgatgatgtagcaacagcgttaagagagtcaaaagaggagattggacttgatccagctctggtaactgtggttgcctctcttgaacacttcttgtccaagcatcttctggtagttgttcctgttgttggcatactgttagacagacaagcatttaaacctgctcttaatattgctgaggtagacgaaatatttgatgtacccctggagatgttcctcaaggatgagaacaggacatcggaggagcgagaaaagatgggccagacattcacagttcattacttcacttatgagaacggaatccagaagtacttaatctggggtctgaccgcccgcatcttgatccatgctgcttcagttgtatacgagcgaccgccagactttacagagcgaagagcacattttaaattgccaatgttcacaaaggactgctcttcaatgctagcaggacctgctaaacattagtgcacactgcctacgctgctatctcagctacatgctatttggagtacgggatgttgcaccaacatagtttatagaatcgaagaggcgtccaaatcacttgatgtcatatgaatttagattctttcgacaaaacactatagtggcatttatgttcagaacaatgttcgtatatgatgcaccacaaatcatccatgttgatgctgttaatgacatggagcacttgctcggatgcaattggctcgtatatacacataagattgttctactgaatc

SEQ ID NO: 33483 - protein, 250 aa, Zea mays subsp. mays
  peptide (1)..(250): Ceres Seq. ID no. 12403776
  misc_feature (51)..(189): Pfam Name: Pfam Description:  NUDIX domain
  misc_feature (9)..(243): NCBI GI NO: 40253324 NR Description: putative phosphohydrolase
  misc_feature (44)..(243): NCBI GI NO: 18396900 NR Description: Expressed protein; protein id: At1g28960
  misc_feature (44)..(234): NCBI GI NO: 30690557 NR Description: MutT/nudix family protein [Arabidopsis thaliana]
  misc_feature (44)..(234): NCBI GI NO: 26450576 NR Description: unknown protein [Arabidopsis thaliana]
  misc_feature (44)..(243): NCBI GI NO: 10764850 NR Description: F1K23.5 [Arabidopsis thaliana]
  misc_feature (48)..(232): NCBI GI NO: 18403412 NR Description: expressed protein; protein id: At2g33980
  misc_feature (48)..(231): NCBI GI NO: 21553389 NR Description: unknown [Arabidopsis thaliana]
  misc_feature (48)..(231): NCBI GI NO: 15242543 NR Description: putative protein; protein id: At5g45940
  misc_feature (39)..(219): NCBI GI NO: 23470438 NR Description: hypothetical protein
  misc_feature (39)..(219): NCBI GI NO: 28868671 NR Description: mutT/nudix family protein
MAGEDCRSGAEMDALVRRLKLHRPSPSPYDPDPAAAPVPATAGDGELFRPRRAAVLVCLFRGDGGELRVILTKRSSSLSTHSGEVSLPGGKVEEGDADDVATALRESKEEIGLDPALVTVVASLEHFLSKHLLVVVPVVGILLDRQAFKPALNIAEVDEIFDVPLEMFLKDENRTSEEREKMGQTFTVHYFTYENGIQKYLIWGLTARILIHAASVVYERPPDFTERRAHFKLPMFTKDCSSMLAGPAKH

SEQ ID NO: 33484 - protein, 239 aa, Zea mays subsp. mays
  peptide (1)..(239): Ceres Seq. ID no. 12403777
  misc_feature (40)..(178): Pfam Name: Pfam Description:  NUDIX domain
  misc_feature (1)..(232): NCBI GI NO: 40253324 NR Description: putative phosphohydrolase
  misc_feature (33)..(232): NCBI GI NO: 18396900 NR Description: Expressed protein; protein id: At1g28960
  misc_feature (33)..(223): NCBI GI NO: 30690557 NR Description: MutT/nudix family protein [Arabidopsis thaliana]
  misc_feature (33)..(223): NCBI GI NO: 26450576 NR Description: unknown protein [Arabidopsis thaliana]
  misc_feature (33)..(232): NCBI GI NO: 10764850 NR Description: F1K23.5 [Arabidopsis thaliana]
  misc_feature (37)..(221): NCBI GI NO: 18403412 NR Description: expressed protein; protein id: At2g33980
  misc_feature (37)..(220): NCBI GI NO: 21553389 NR Description: unknown [Arabidopsis thaliana]
  misc_feature (37)..(220): NCBI GI NO: 15242543 NR Description: putative protein; protein id: At5g45940
  misc_feature (28)..(208): NCBI GI NO: 23470438 NR Description: hypothetical protein
  misc_feature (28)..(208): NCBI GI NO: 28868671 NR Description: mutT/nudix family protein
MDALVRRLKLHRPSPSPYDPDPAAAPVPATAGDGELFRPRRAAVLVCLFRGDGGELRVILTKRSSSLSTHSGEVSLPGGKVEEGDADDVATALRESKEEIGLDPALVTVVASLEHFLSKHLLVVVPVVGILLDRQAFKPALNIAEVDEIFDVPLEMFLKDENRTSEEREKMGQTFTVHYFTYENGIQKYLIWGLTARILIHAASVVYERPPDFTERRAHFKLPMFTKDCSSMLAGPAKH

SEQ ID NO: 33485 - DNA, 1688 bp, Zea mays subsp. mays
  misc_feature (1)..(1688): Ceres Seq. ID no. 12347726
cgtgccacacatccatccccgttcgcctcttctcctccctcctgccgggtccttaataaagagcagcagcgcaagaggttggtagagcgagcgagaagaaggcaatggcggcggagagcttcctgttcacctcggagtccgtgaacgaggggcacccagacaagctgtgcgaccaggtgtcggacgcggtgctggacgcctgcctggcgcaggaccccgacagcaaggtggcctgcgagacctgcaccaagacgaacatggtgatggtgttcggcgagatcaccaccaaggcgagcgtggactacgagaagatcgtgcgcgacacctgccgcgagatcgggttcacctccgacgacgtggggctcgacgccgaccgctgcaaggtgctggtgaacatcgagcagcagtcccccgacatcgcgcagggcgtgcacgggcacttcacgaagcggcccgaggagatcggcgccggcgaccagggccacatgttcgggtacgccaccgacgagacccccgagctgatgccgctgagccacgtgctggccaccaagctcggcgcgcgcctgacggaggtccgcaaggacggcacctgcgcctggctcaggcccgacagcaagacccaggtgacggtggagtacgtgaacgagggcggcgccatggtgcccgtccgcgtgcacaccgtgctcatctccacccagcacgacgagaccgtcaccaacgacgagatcgccgccgacctcaaggagcacgtcatcaagcccgtcatcccggagaggtacctggacgagaagaccatcttccacctcaacccgtcggggcgcttcgtcatcggcgggccccacggggacgccggcctcaccggccgcaagatcatcatcgacacctacggcggctggggagcccacggcgggggcgccttctccggcaaggaccccaccaaggtggaccgcagcggggcctacgtcgccaggcaggccgccaagagcatcgtggccagcggcctcgcccgccgctgcctcgtgcaggtgtcctacgccatcggcgtgccggagcccctgtccgtgttcgtcgactcctacggcaccgggaccatccccgacaaggagatcctaaagatcgtcaaggagaacttcgacttcaggccagggatggtcaccatcaacctcgacctcaagaagggcggcaacaggttcatcaagaccgccgcatacggccactttggccgtgacgacgccgacttcacctgggaggtggtcaagcccctaaagaaggcatccgcttaagaatgtattgggaagttcactggacatgaggttcatcttcgtctggctctgctgatacctgcaaggattgctgctgctgctgccgcccctggatgtgtgtttgatcagtgactggctgctctgctccatagaagatgaatgaagagagagatggtgaagaaggctttggcaaatggcaattgccgcagcaagccatgtcggcgccaccgaccgccttagtgattggtataatttggtgtggcagcagccaggattaatgcgctggtcttttatctttactactagtttggtctcgtccggtatcttatttttctttccccttttcgagtctgtactgaaactgctgagagatttgcagttttgatctatcataccctttggtaatactgttcatctcgagtgcgc

SEQ ID NO: 33486 - protein, 392 aa, Zea mays subsp. mays
  peptide (1)..(392): Ceres Seq. ID no. 12347727
  misc_feature (118)..(240): Pfam Name: Pfam Description:  S-adenosylmethionine synthetase, central domain
  misc_feature (1)..(392): NCBI GI NO: 1709000 NR Description: S-adenosylmethionine synthetase 1
  misc_feature (4)..(388): NCBI GI NO: 13540318 NR Description: S-adenosyl-L-methionine synthetase
  misc_feature (4)..(388): NCBI GI NO: 16226059 NR Description: S-adenosyl-L-methionine synthetase
  misc_feature (1)..(392): NCBI GI NO: 1170937 NR Description: S-adenosylmethionine synthetase 1
  misc_feature (4)..(388): NCBI GI NO: 13540316 NR Description: S-adenosyl-L-methionine synthetase
  misc_feature (4)..(388): NCBI GI NO: 10443981 NR Description: S-adenosylmethionine synthetase [Brassica juncea]
  misc_feature (3)..(388): NCBI GI NO: 1346524 NR Description: S-adenosylmethionine synthetase
  misc_feature (1)..(392): NCBI GI NO: 17529621 NR Description: S-adenosylmethionine synthetase [Oryza sativa]
  misc_feature (4)..(386): NCBI GI NO: 22774026 NR Description: S-adenosylmethionine synthase [Carica papaya]
  misc_feature (1)..(388): NCBI GI NO: 127046 NR Description: S-adenosylmethionine synthetase 2
MAAESFLFTSESVNEGHPDKLCDQVSDAVLDACLAQDPDSKVACETCTKTNMVMVFGEITTKASVDYEKIVRDTCREIGFTSDDVGLDADRCKVLVNIEQQSPDIAQGVHGHFTKRPEEIGAGDQGHMFGYATDETPELMPLSHVLATKLGARLTEVRKDGTCAWLRPDSKTQVTVEYVNEGGAMVPVRVHTVLISTQHDETVTNDEIAADLKEHVIKPVIPERYLDEKTIFHLNPSGRFVIGGPHGDAGLTGRKIIIDTYGGWGAHGGGAFSGKDPTKVDRSGAYVARQAAKSIVASGLARRCLVQVSYAIGVPEPLSVFVDSYGTGTIPDKEILKIVKENFDFRPGMVTINLDLKKGGNRFIKTAAYGHFGRDDADFTWEVVKPLKKASA

SEQ ID NO: 33487 - protein, 341 aa, Zea mays subsp. mays
  peptide (1)..(341): Ceres Seq. ID no. 12347728
  misc_feature (67)..(189): Pfam Name: Pfam Description:  S-adenosylmethionine synthetase, central domain
  misc_feature (1)..(341): NCBI GI NO: 1709000 NR Description: S-adenosylmethionine synthetase 1
  misc_feature (1)..(337): NCBI GI NO: 13540318 NR Description: S-adenosyl-L-methionine synthetase
  misc_feature (1)..(337): NCBI GI NO: 16226059 NR Description: S-adenosyl-L-methionine synthetase
  misc_feature (1)..(341): NCBI GI NO: 1170937 NR Description: S-adenosylmethionine synthetase 1
  misc_feature (1)..(337): NCBI GI NO: 13540316 NR Description: S-adenosyl-L-methionine synthetase
  misc_feature (1)..(337): NCBI GI NO: 10443981 NR Description: S-adenosylmethionine synthetase [Brassica juncea]
  misc_feature (1)..(337): NCBI GI NO: 1346524 NR Description: S-adenosylmethionine synthetase
  misc_feature (1)..(341): NCBI GI NO: 17529621 NR Description: S-adenosylmethionine synthetase [Oryza sativa]
  misc_feature (1)..(335): NCBI GI NO: 22774026 NR Description: S-adenosylmethionine synthase [Carica papaya]
  misc_feature (1)..(337): NCBI GI NO: 127046 NR Description: S-adenosylmethionine synthetase 2
MVMVFGEITTKASVDYEKIVRDTCREIGFTSDDVGLDADRCKVLVNIEQQSPDIAQGVHGHFTKRPEEIGAGDQGHMFGYATDETPELMPLSHVLATKLGARLTEVRKDGTCAWLRPDSKTQVTVEYVNEGGAMVPVRVHTVLISTQHDETVTNDEIAADLKEHVIKPVIPERYLDEKTIFHLNPSGRFVIGGPHGDAGLTGRKIIIDTYGGWGAHGGGAFSGKDPTKVDRSGAYVARQAAKSIVASGLARRCLVQVSYAIGVPEPLSVFVDSYGTGTIPDKEILKIVKENFDFRPGMVTINLDLKKGGNRFIKTAAYGHFGRDDADFTWEVVKPLKKASA

SEQ ID NO: 33488 - protein, 339 aa, Zea mays subsp. mays
  peptide (1)..(339): Ceres Seq. ID no. 12347729
  misc_feature (65)..(187): Pfam Name: Pfam Description:  S-adenosylmethionine synthetase, central domain
  misc_feature (1)..(339): NCBI GI NO: 1709000 NR Description: S-adenosylmethionine synthetase 1
  misc_feature (1)..(335): NCBI GI NO: 13540318 NR Description: S-adenosyl-L-methionine synthetase
  misc_feature (1)..(335): NCBI GI NO: 16226059 NR Description: S-adenosyl-L-methionine synthetase
  misc_feature (1)..(339): NCBI GI NO: 1170937 NR Description: S-adenosylmethionine synthetase 1
  misc_feature (1)..(335): NCBI GI NO: 13540316 NR Description: S-adenosyl-L-methionine synthetase
  misc_feature (1)..(335): NCBI GI NO: 10443981 NR Description: S-adenosylmethionine synthetase [Brassica juncea]
  misc_feature (1)..(335): NCBI GI NO: 1346524 NR Description: S-adenosylmethionine synthetase
  misc_feature (1)..(339): NCBI GI NO: 17529621 NR Description: S-adenosylmethionine synthetase [Oryza sativa]
  misc_feature (1)..(333): NCBI GI NO: 22774026 NR Description: S-adenosylmethionine synthase [Carica papaya]
  misc_feature (1)..(335): NCBI GI NO: 127046 NR Description: S-adenosylmethionine synthetase 2
MVFGEITTKASVDYEKIVRDTCREIGFTSDDVGLDADRCKVLVNIEQQSPDIAQGVHGHFTKRPEEIGAGDQGHMFGYATDETPELMPLSHVLATKLGARLTEVRKDGTCAWLRPDSKTQVTVEYVNEGGAMVPVRVHTVLISTQHDETVTNDEIAADLKEHVIKPVIPERYLDEKTIFHLNPSGRFVIGGPHGDAGLTGRKIIIDTYGGWGAHGGGAFSGKDPTKVDRSGAYVARQAAKSIVASGLARRCLVQVSYAIGVPEPLSVFVDSYGTGTIPDKEILKIVKENFDFRPGMVTINLDLKKGGNRFIKTAAYGHFGRDDADFTWEVVKPLKKASA

SEQ ID NO: 33489 - DNA, 1066 bp, Zea mays subsp. mays
  misc_feature (1)..(1066): Ceres Seq. ID no. 12411760
aaaagaaagcccagaccaaagcagagctgcttgcttctccacgccttgtgcttccacagagcaaccagttctcagaagcaatgtccgcacccctggtggacgccgagtacatggccgagatcgagagggcacggcgggacctccgcgctctcgtcgccagcaagaactgcgcgccgatcatgctccgcctcgcgtggcacgacgccggcacttacgacgccaagaccaacacaggaggccccaacggctccataaggttcccacaggagtacagccactcttcaaacgcagggatcaagatcgccattgacctcttagagcctgtgaagcagaagcaccccaagatcacatacgcagacctgtatcagctcgccggagttgtcgccgtcgaagtcactggtggaccgaccgttgacttcgtccctgggaggaaggattcttcgatttgtccagaggaaggacgcttgccggatgctagaagaggtgcttcgcatctcagacaagtattctaccggatgggtttatcagacagggacattgtggcgctctccggcggccatactctggggagagcgcatcgagagaggacagggtttgatggcccatggactagggatcctctgaaatttgacaactcttatttccttgagcttctgaaaggcgactctgaagggctcttgaaactccctactgacaaggttcttgtggaagatcctgaattccgtcagcatgtccaactatatgccaaggatgaagatgcatttttcagggactacgcggagtcacacaagaagctgtcagagctaggcttcaccccccctcgctcttgtctctcatccagatctgcgaataaacacaagtcgttgctggtgcaagctgcagctgggctcgcagttgctaccgcagttgtcgcatgggcgtacctgtgcgaatccaacaacaagttcatctaacttacgcttaccgttagtacaaatacaaattggagtcgccaaaatatttcagttctgtgcacatgtatttgcatctacatattgatataataccaagcatgttatgtgttgtg

SEQ ID NO: 33490 - protein, 316 aa, Zea mays subsp. mays
  peptide (1)..(316): Ceres Seq. ID no. 12411761
  misc_feature (43)..(250): Pfam Name: Pfam Description:  Peroxidase
  misc_feature (28)..(314): NCBI GI NO: 38344123 NR Description: OSJNBb0072N21.2
  misc_feature (28)..(314): NCBI GI NO: 37030052 NR Description: putative peroxisome-bound ascorbate peroxidase
  misc_feature (27)..(310): NCBI GI NO: 7484726 NR Description: L-ascorbate peroxidase (EC 1
  misc_feature (27)..(314): NCBI GI NO: 15080682 NR Description: peroxisome type ascorbate peroxidase
  misc_feature (27)..(314): NCBI GI NO: 5442410 NR Description: ascorbate peroxidase [Zantedeschia aethiopica]
  misc_feature (27)..(310): NCBI GI NO: 15430584 NR Description: peroxisomal ascorbate peroxidase
  misc_feature (27)..(310): NCBI GI NO: 15236239 NR Description: ascorbate peroxidase, putative
  misc_feature (27)..(314): NCBI GI NO: 17066705 NR Description: ascorbate peroxidase [Capsicum annuum]
  misc_feature (27)..(310): NCBI GI NO: 3288066 NR Description: ascorbate peroxidase [Arabidopsis thaliana]
  misc_feature (30)..(310): NCBI GI NO: 4835909 NR Description: cytosolic ascorbate peroxidase
KKAQTKAELLASPRLVLPQSNQFSEAMSAPLVDAEYMAEIERARRDLRALVASKNCAPIMLRLAWHDAGTYDAKTNTGGPNGSIRFPQEYSHSSNAGIKIAIDLLEPVKQKHPKITYADLYQLAGVVAVEVTGGPTVDFVPGRKDSSICPEEGRLPDARRGASHLRQVFYRMGLSDRDIVALSGGHTLGRAHRERTGFDGPWTRDPLKFDNSYFLELLKGDSEGLLKLPTDKVLVEDPEFRQHVQLYAKDEDAFFRDYAESHKKLSELGFTPPRSCLSSRSANKHKSLLVQAAAGLAVATAVVAWAYLCESNNKFI

SEQ ID NO: 33491 - protein, 290 aa, Zea mays subsp. mays
  peptide (1)..(290): Ceres Seq. ID no. 12411762
  misc_feature (17)..(224): Pfam Name: Pfam Description:  Peroxidase
  misc_feature (2)..(288): NCBI GI NO: 38344123 NR Description: OSJNBb0072N21.2
  misc_feature (2)..(288): NCBI GI NO: 37030052 NR Description: putative peroxisome-bound ascorbate peroxidase
  misc_feature (1)..(284): NCBI GI NO: 7484726 NR Description: L-ascorbate peroxidase (EC 1
  misc_feature (1)..(288): NCBI GI NO: 15080682 NR Description: peroxisome type ascorbate peroxidase
  misc_feature (1)..(288): NCBI GI NO: 5442410 NR Description: ascorbate peroxidase [Zantedeschia aethiopica]
  misc_feature (1)..(284): NCBI GI NO: 15430584 NR Description: peroxisomal ascorbate peroxidase
  misc_feature (1)..(284): NCBI GI NO: 15236239 NR Description: ascorbate peroxidase, putative
  misc_feature (1)..(288): NCBI GI NO: 17066705 NR Description: ascorbate peroxidase [Capsicum annuum]
  misc_feature (1)..(284): NCBI GI NO: 3288066 NR Description: ascorbate peroxidase [Arabidopsis thaliana]
  misc_feature (4)..(284): NCBI GI NO: 4835909 NR Description: cytosolic ascorbate peroxidase
MSAPLVDAEYMAEIERARRDLRALVASKNCAPIMLRLAWHDAGTYDAKTNTGGPNGSIRFPQEYSHSSNAGIKIAIDLLEPVKQKHPKITYADLYQLAGVVAVEVTGGPTVDFVPGRKDSSICPEEGRLPDARRGASHLRQVFYRMGLSDRDIVALSGGHTLGRAHRERTGFDGPWTRDPLKFDNSYFLELLKGDSEGLLKLPTDKVLVEDPEFRQHVQLYAKDEDAFFRDYAESHKKLSELGFTPPRSCLSSRSANKHKSLLVQAAAGLAVATAVVAWAYLCESNNKFI

SEQ ID NO: 33492 - protein, 280 aa, Zea mays subsp. mays
  peptide (1)..(280): Ceres Seq. ID no. 12411763
  misc_feature (7)..(214): Pfam Name: Pfam Description:  Peroxidase
  misc_feature (1)..(278): NCBI GI NO: 38344123 NR Description: OSJNBb0072N21.2
  misc_feature (1)..(278): NCBI GI NO: 37030052 NR Description: putative peroxisome-bound ascorbate peroxidase
  misc_feature (1)..(274): NCBI GI NO: 7484726 NR Description: L-ascorbate peroxidase (EC 1
  misc_feature (1)..(278): NCBI GI NO: 15080682 NR Description: peroxisome type ascorbate peroxidase
  misc_feature (1)..(278): NCBI GI NO: 5442410 NR Description: ascorbate peroxidase [Zantedeschia aethiopica]
  misc_feature (1)..(274): NCBI GI NO: 15430584 NR Description: peroxisomal ascorbate peroxidase
  misc_feature (1)..(274): NCBI GI NO: 15236239 NR Description: ascorbate peroxidase, putative
  misc_feature (1)..(278): NCBI GI NO: 17066705 NR Description: ascorbate peroxidase [Capsicum annuum]
  misc_feature (1)..(274): NCBI GI NO: 3288066 NR Description: ascorbate peroxidase [Arabidopsis thaliana]
  misc_feature (1)..(274): NCBI GI NO: 4835909 NR Description: cytosolic ascorbate peroxidase
MAEIERARRDLRALVASKNCAPIMLRLAWHDAGTYDAKTNTGGPNGSIRFPQEYSHSSNAGIKIAIDLLEPVKQKHPKITYADLYQLAGVVAVEVTGGPTVDFVPGRKDSSICPEEGRLPDARRGASHLRQVFYRMGLSDRDIVALSGGHTLGRAHRERTGFDGPWTRDPLKFDNSYFLELLKGDSEGLLKLPTDKVLVEDPEFRQHVQLYAKDEDAFFRDYAESHKKLSELGFTPPRSCLSSRSANKHKSLLVQAAAGLAVATAVVAWAYLCESNNKFI

SEQ ID NO: 33493 - DNA, 1479 bp, Zea mays subsp. mays
  misc_feature (1)..(1479): Ceres Seq. ID no. 12364992
atccgccgcccgcgcacttcttccttcgggcacacaggacaccaccgtcgacggattcatcgcgacgatggggctcgacgtcatggagatcgggatgggcgccgatttgagcctggatctgaggcacttcgcctccaaggccgtgaggcagagcaaggacgacacgccggcgccggacatggacgcatgcatccgccgcctcgaggaggagcggggtaagatcgagatgttcaagcgggacctcccgctctgcgcgcgcctcctcgccgacgtaattgatgtcatgaaggaggaggcggggaagaagaagacgacgacaaggaggagtgaccgcaggctggcgtctgcggcagctgatgaggaggaggaggaggaggacggcgccaccgcggacaagagcaagtggatgagcacggcgcagctctggacgggcgattccgggcgggaggacggggaatcagagaagcaagacaaggggcggtgctcgccggaggccaggtcccgcggcgctctcttaccgttcaaggctgatgtgggttctggcgcgccggcgttggcgccgctctgcttgagaacggacgacaaggctgcggctgcgcgcgtcggggtgccggatctgtcgtccttgctgtcgccgccggcgaccatgcctcctgcggacgccggcgccgaggagagccgtcgccaggttgtgggatttgcgcaagctgcggccagggcggctgccatggccccgtgtgcccctgcgcttgggctccagtcccagtcgcagcagcagcagcagcagcagcagcaggcaaggaaggctcggcgttgctggtcgacggagctgcatcgcaagttcgtcgccgccttggatcagctcggtggcccccaagttgccacgccgaagcaaatcagggagctgatgaaggtggatgggctgacaaacgacgaagtgaaaagccatcttcagaaataccggctgcacaaccggagggcgcctggatccggcgtggtgcgccagccgatcgtgctcgtgggagggctgtggattccccaggagcaaggcagccctcagtctggatctccccacggccccctccaccacctgtccacctcggtggccgccgtctcgtccgccgccaccgccagctgcgaggaggaagacggccggtccgagagctatggctggcaatgatgtctggctgctgctgctgctgcaccaccaatgtgtgttcactgttcagagaggggaggtttcttggcatggtggggatcgccatgggccatggcggaggccaccagttgcagcttcaggaatcgggaggggaattgagtgtagtgtagctgtctgtacacatacatacatacatacagtgagatgggatgagatgagagcgggccttgagcgctcgagatcagaactgatggtgcttcgtcgtcgggtttgtacatcccaaagagaaagagatactagctacagttttgcggcttgct

SEQ ID NO: 33494 - protein, 392 aa, Zea mays subsp. mays
  peptide (1)..(392): Ceres Seq. ID no. 12364993
  misc_feature (119)..(392): NCBI GI NO: 33146555 NR Description: putative cytoskeletal protein-like protein
  misc_feature (119)..(392): NCBI GI NO: 34915398 NR Description: contains ESTsAU055771
  misc_feature (34)..(187): NCBI GI NO: 18395562 NR Description: expressed protein; protein id: At2g03500
  misc_feature (264)..(381): NCBI GI NO: 18395562 NR Description: expressed protein; protein id: At2g03500
  misc_feature (126)..(370): NCBI GI NO: 34910306 NR Description: P0013F10.12
  misc_feature (34)..(124): NCBI GI NO: 34910306 NR Description: P0013F10.12
  misc_feature (30)..(192): NCBI GI NO: 18419989 NR Description: putative cytoskeletal protein
  misc_feature (253)..(387): NCBI GI NO: 18419989 NR Description: putative cytoskeletal protein
  misc_feature (30)..(192): NCBI GI NO: 14532434 NR Description: AT4g37180/C7A10_180 [Arabidopsis thaliana]
  misc_feature (253)..(387): NCBI GI NO: 14532434 NR Description: AT4g37180/C7A10_180 [Arabidopsis thaliana]
SAARALLPSGTQDTTVDGFIATMGLDVMEIGMGADLSLDLRHFASKAVRQSKDDTPAPDMDACIRRLEEERGKIEMFKRDLPLCARLLADVIDVMKEEAGKKKTTTRRSDRRLASAAADEEEEEEDGATADKSKWMSTAQLWTGDSGREDGESEKQDKGRCSPEARSRGALLPFKADVGSGAPALAPLCLRTDDKAAAARVGVPDLSSLLSPPATMPPADAGAEESRRQVVGFAQAAARAAAMAPCAPALGLQSQSQQQQQQQQQARKARRCWSTELHRKFVAALDQLGGPQVATPKQIRELMKVDGLTNDEVKSHLQKYRLHNRRAPGSGVVRQPIVLVGGLWIPQEQGSPQSGSPHGPLHHLSTSVAAVSSAATASCEEEDGRSESYGWQ

SEQ ID NO: 33495 - protein, 370 aa, Zea mays subsp. mays
  peptide (1)..(370): Ceres Seq. ID no. 12364994
  misc_feature (97)..(370): NCBI GI NO: 33146555 NR Description: putative cytoskeletal protein-like protein
  misc_feature (97)..(370): NCBI GI NO: 34915398 NR Description: contains ESTsAU055771
  misc_feature (12)..(165): NCBI GI NO: 18395562 NR Description: expressed protein; protein id: At2g03500
  misc_feature (242)..(359): NCBI GI NO: 18395562 NR Description: expressed protein; protein id: At2g03500
  misc_feature (104)..(348): NCBI GI NO: 34910306 NR Description: P0013F10.12
  misc_feature (12)..(102): NCBI GI NO: 34910306 NR Description: P0013F10.12
  misc_feature (8)..(170): NCBI GI NO: 18419989 NR Description: putative cytoskeletal protein
  misc_feature (231)..(365): NCBI GI NO: 18419989 NR Description: putative cytoskeletal protein
  misc_feature (8)..(170): NCBI GI NO: 14532434 NR Description: AT4g37180/C7A10_180 [Arabidopsis thaliana]
  misc_feature (231)..(365): NCBI GI NO: 14532434 NR Description: AT4g37180/C7A10_180 [Arabidopsis thaliana]
MGLDVMEIGMGADLSLDLRHFASKAVRQSKDDTPAPDMDACIRRLEEERGKIEMFKRDLPLCARLLADVIDVMKEEAGKKKTTTRRSDRRLASAAADEEEEEEDGATADKSKWMSTAQLWTGDSGREDGESEKQDKGRCSPEARSRGALLPFKADVGSGAPALAPLCLRTDDKAAAARVGVPDLSSLLSPPATMPPADAGAEESRRQVVGFAQAAARAAAMAPCAPALGLQSQSQQQQQQQQQARKARRCWSTELHRKFVAALDQLGGPQVATPKQIRELMKVDGLTNDEVKSHLQKYRLHNRRAPGSGVVRQPIVLVGGLWIPQEQGSPQSGSPHGPLHHLSTSVAAVSSAATASCEEEDGRSESYGWQ

SEQ ID NO: 33496 - protein, 365 aa, Zea mays subsp. mays
  peptide (1)..(365): Ceres Seq. ID no. 12364995
  misc_feature (92)..(365): NCBI GI NO: 33146555 NR Description: putative cytoskeletal protein-like protein
  misc_feature (92)..(365): NCBI GI NO: 34915398 NR Description: contains ESTsAU055771
  misc_feature (7)..(160): NCBI GI NO: 18395562 NR Description: expressed protein; protein id: At2g03500
  misc_feature (237)..(354): NCBI GI NO: 18395562 NR Description: expressed protein; protein id: At2g03500
  misc_feature (99)..(343): NCBI GI NO: 34910306 NR Description: P0013F10.12
  misc_feature (7)..(97): NCBI GI NO: 34910306 NR Description: P0013F10.12
  misc_feature (3)..(165): NCBI GI NO: 18419989 NR Description: putative cytoskeletal protein
  misc_feature (226)..(360): NCBI GI NO: 18419989 NR Description: putative cytoskeletal protein
  misc_feature (3)..(165): NCBI GI NO: 14532434 NR Description: AT4g37180/C7A10_180 [Arabidopsis thaliana]
  misc_feature (226)..(360): NCBI GI NO: 14532434 NR Description: AT4g37180/C7A10_180 [Arabidopsis thaliana]
MEIGMGADLSLDLRHFASKAVRQSKDDTPAPDMDACIRRLEEERGKIEMFKRDLPLCARLLADVIDVMKEEAGKKKTTTRRSDRRLASAAADEEEEEEDGATADKSKWMSTAQLWTGDSGREDGESEKQDKGRCSPEARSRGALLPFKADVGSGAPALAPLCLRTDDKAAAARVGVPDLSSLLSPPATMPPADAGAEESRRQVVGFAQAAARAAAMAPCAPALGLQSQSQQQQQQQQQARKARRCWSTELHRKFVAALDQLGGPQVATPKQIRELMKVDGLTNDEVKSHLQKYRLHNRRAPGSGVVRQPIVLVGGLWIPQEQGSPQSGSPHGPLHHLSTSVAAVSSAATASCEEEDGRSESYGWQ

SEQ ID NO: 33497 - DNA, 1921 bp, Zea mays subsp. mays
  misc_feature (1)..(1921): Ceres Seq. ID no. 12404929
  misc_feature (413)..(413): n is a, c, t, g, unknown, or other
  misc_feature (291)..(291): n is a, c, t, g, unknown, or other
gacccacttactaatccagccagccaatgagtcccccgtttcatcacgcaacgccaacccacaccaacgccacccggacccacccacccctcccgtccgtcgcataccatcccatcccatccccgtgcgccgagttcacggccgccgccaccaccaccaccacaaccgattacacaaggccacgcggcttctggaagcttcccttgccttgcctctcaacccaaatcgccacggctcctccgcccgcagcgccctcggcacgaccgccggattcgcctctgggtggggttngttttgtctcccccaccaccctacccacccctctcctctcctccaaggcttggcttgcctcgtgtcgtgtgtccctccaccgcccgctatgccgacgaggcttgccccccaccgccgatcgnacacggtcatatgattgcaatgaatcctgacatcgtactactgtcttggaaacaacttccaccaacggtcgatcctgtgaaacactaagacacccgttgccactggaaaggagagagcaaagtgatttgctgtctcctggcgatcgttgctcgtgaggcctagtgatggcagatgctagctcaaggactgacacctcaattgttttagacgacaacgacaagaatcataggatggagaatggaagtggtgcggttgtaccttctaattcttcagataggtccgacaggtctgataaacctttggaccaaaagacaatgcgacggcttgcccaaaatcgtgaggcagcaagaaaaagtcggctgaggaaaaaggcatatgtgcagcagctggagagcagtaagctgaaacttgcacaactggaacaggaactccagaaagctcgccagcagggaatcttcatttctagctctggagaccaaacccatgccatgagtggaaatggagctttgacttttgacatagaatatgctagatggctagaggaccccaaaataagcagataaatgagttgaggactgcagtgaatgctcatgcaagtgacagcgatctacgacttattgtagatggcataatggcacactatgatgaaatattcaaggtcaaaggtgttgctgcaaaggctgatgtgtttcatatactttcaggcatgtggaagacacctgctgaaaggtgcttcctatggcttgggggttttcgtccatctgagcttttaaagctcctagcgaatcacctcgagcctctaactgagcagcaaatgctgggtttgaccaacctccagcaatcttcccaacaagcagaggatgcgttgtcacagggcatggaagcactgcagcaatctttggcagagactttggctggatctctcggtccagcaggttcttcaggaaatgtggcaaactacatgggtcagatggccatggccatgggcaaactcgggacgctagagaattttcttcgccaagccgacaacctgcgacagcagacgttgcatcaaatgcaacgtatcctaacgatccgacaggcttctcgtgctcttcttgcaatccacgactatttttcacgattgcgcgctttaagttctctgtggcttgctaggccacgtgaataacgaagggccgtcagtattttgagttccctctgccttacggtgctgctgcgtcgttcgcagcgatgcatcacagatctttggtggtactgtttttgttgtacaattacttttggccgctgcttggtccaaattgtactcaggtgggtgtacaagtaggtcaatataatcctgtaagttatggtgatttatgggtgtgttagcaatgcaataataattagagagggcaggatcagggtttctgttgtttgtactggttagagatttagtcctaatgtaacttcctgggacatggggggcggaatgggaagagagtaacaagaatcttcctttggttactgt

SEQ ID NO: 33498 - protein, 211 aa, Zea mays subsp. mays
  peptide (1)..(211): Ceres Seq. ID no. 12404930
  misc_feature (6)..(211): NCBI GI NO: 17025920 NR Description: bZIP transcription factor [Oryza sativa]
  misc_feature (6)..(211): NCBI GI NO: 17025918 NR Description: bZIP transcription factor [Oryza sativa]
  misc_feature (6)..(164): NCBI GI NO: 34898092 NR Description: putative bZIP transcription factor
  misc_feature (6)..(211): NCBI GI NO: 15148924 NR Description: TGA-type basic leucine zipper protein TGA2.1
  misc_feature (7)..(211): NCBI GI NO: 17025922 NR Description: bZIP transcription factor [Oryza sativa]
  misc_feature (7)..(211): NCBI GI NO: 17025924 NR Description: bZIP transcription factor [Oryza sativa]
  misc_feature (7)..(211): NCBI GI NO: 422029 NR Description: transcription factor OBF3.2 - maize
  misc_feature (7)..(211): NCBI GI NO: 34909110 NR Description: putative transcription factor HBP-1b
  misc_feature (7)..(211): NCBI GI NO: 122772 NR Description: Transcription factor HBP-1b
  misc_feature (7)..(211): NCBI GI NO: 34921538 NR Description: Transcription factor HBP-1b(c1)
MARGPQNKQINELRTAVNAHASDSDLRLIVDGIMAHYDEIFKVKGVAAKADVFHILSGMWKTPAERCFLWLGGFRPSELLKLLANHLEPLTEQQMLGLTNLQQSSQQAEDALSQGMEALQQSLAETLAGSLGPAGSSGNVANYMGQMAMAMGKLGTLENFLRQADNLRQQTLHQMQRILTIRQASRALLAIHDYFSRLRALSSLWLARPRE

SEQ ID NO: 33499 - protein, 178 aa, Zea mays subsp. mays
  peptide (1)..(178): Ceres Seq. ID no. 12404931
  misc_feature (1)..(178): NCBI GI NO: 17025920 NR Description: bZIP transcription factor [Oryza sativa]
  misc_feature (1)..(178): NCBI GI NO: 17025918 NR Description: bZIP transcription factor [Oryza sativa]
  misc_feature (1)..(131): NCBI GI NO: 34898092 NR Description: putative bZIP transcription factor
  misc_feature (1)..(178): NCBI GI NO: 15148924 NR Description: TGA-type basic leucine zipper protein TGA2.1
  misc_feature (1)..(178): NCBI GI NO: 17025922 NR Description: bZIP transcription factor [Oryza sativa]
  misc_feature (1)..(178): NCBI GI NO: 17025924 NR Description: bZIP transcription factor [Oryza sativa]
  misc_feature (1)..(178): NCBI GI NO: 422029 NR Description: transcription factor OBF3.2 - maize
  misc_feature (1)..(178): NCBI GI NO: 34909110 NR Description: putative transcription factor HBP-1b
  misc_feature (1)..(178): NCBI GI NO: 122772 NR Description: Transcription factor HBP-1b
  misc_feature (1)..(178): NCBI GI NO: 34921538 NR Description: Transcription factor HBP-1b(c1)
MAHYDEIFKVKGVAAKADVFHILSGMWKTPAERCFLWLGGFRPSELLKLLANHLEPLTEQQMLGLTNLQQSSQQAEDALSQGMEALQQSLAETLAGSLGPAGSSGNVANYMGQMAMAMGKLGTLENFLRQADNLRQQTLHQMQRILTIRQASRALLAIHDYFSRLRALSSLWLARPRE

SEQ ID NO: 33500 - protein, 153 aa, Zea mays subsp. mays
  peptide (1)..(153): Ceres Seq. ID no. 12404932
  misc_feature (1)..(153): NCBI GI NO: 17025920 NR Description: bZIP transcription factor [Oryza sativa]
  misc_feature (1)..(153): NCBI GI NO: 17025918 NR Description: bZIP transcription factor [Oryza sativa]
  misc_feature (1)..(106): NCBI GI NO: 34898092 NR Description: putative bZIP transcription factor
  misc_feature (1)..(153): NCBI GI NO: 15148924 NR Description: TGA-type basic leucine zipper protein TGA2.1
  misc_feature (1)..(153): NCBI GI NO: 17025922 NR Description: bZIP transcription factor [Oryza sativa]
  misc_feature (1)..(153): NCBI GI NO: 17025924 NR Description: bZIP transcription factor [Oryza sativa]
  misc_feature (1)..(153): NCBI GI NO: 422029 NR Description: transcription factor OBF3.2 - maize
  misc_feature (1)..(153): NCBI GI NO: 34909110 NR Description: putative transcription factor HBP-1b
  misc_feature (1)..(153): NCBI GI NO: 122772 NR Description: Transcription factor HBP-1b
  misc_feature (1)..(153): NCBI GI NO: 34921538 NR Description: Transcription factor HBP-1b(c1)
MWKTPAERCFLWLGGFRPSELLKLLANHLEPLTEQQMLGLTNLQQSSQQAEDALSQGMEALQQSLAETLAGSLGPAGSSGNVANYMGQMAMAMGKLGTLENFLRQADNLRQQTLHQMQRILTIRQASRALLAIHDYFSRLRALSSLWLARPRE

SEQ ID NO: 33501 - DNA, 1099 bp, Zea mays subsp. mays
  misc_feature (1)..(1099): Ceres Seq. ID no. 13493423
aactgcagccgtcggatactcccacaggagcgttccgaagccctaatgctcgcccttcccataagtactctcctctgaccacgccgccgccatttccttcctcctcccacctcggcggccggcctcctcttctcttcacccacacgctggtcatagagatgtcggctgcagaggcgaaggcggcggcggtcccggagtctgtgctgcggaagcgcaagcgggaggagcaatgggcagcggacaagaaggagaaggcgctcgcggacaggaagaaggcgctcgagagccgcaagatcatcttcgcccgcgccaagcagtacgccgaggagtaccacgcccaggagaaggagcttgtgcagctcaagcgtgaggcccggttgaagggtgggttctatgtgagcccagaggccaagcttctgtttgtggttcgcatccgtggtatcaatgccatgcaccccaagacccgcaagatcttgcagctcctgcgattgaggcagatcttcaacggtgtcttcctcaaggttaacaaggcaaccattaacatgctgcgcagggtggagccatatgttgcgtacggataccccaacctgaagagcgttagggagttgatctacaagagaggttacgggaagctgaacaagcagaggattccacttagcaacaacagtgtcatcgaggagggcctcgggaagcacaatatcatctgcattgaggaccttgtccacgagatcatgacggtgggcccgcacttcaaggaggccaacaacttcctctggccgttcaagctgaaggcacccctcggcggcctcaagaagaagaggaaccactacgtggagggcggtgacgccggaaaccgtgagaactacatcaacgagctcatcaagaggatgaactaggttctctcttgtatcctgtgagaatgcttttctgtgtcagcgtggttgtttttgctctagtaagttgacggataatgatggatatgcaattttttttggtgttcattggctctaatacagccagacttcactaggaactgtgtcgctgtttatgttggcagtagcttctggaggtttttgtgtacttttgttatttttattct

SEQ ID NO: 33502 - protein, 297 aa, Zea mays subsp. mays
  peptide (1)..(297): Ceres Seq. ID no. 13493424
  misc_feature (137)..(189): Pfam Name: Pfam Description:  Ribosomal protein L30p/L7e
  misc_feature (53)..(297): NCBI GI NO: 38637548 NR Description: putative 60S ribosomal protein L7
  misc_feature (55)..(297): NCBI GI NO: 38346542 NR Description: OSJNBa0035M09.3
  misc_feature (53)..(297): NCBI GI NO: 15231288 NR Description: 60S ribosomal protein L7 (RPL7D)
  misc_feature (56)..(297): NCBI GI NO: 30689617 NR Description: 60S ribosomal protein L7 (RPL7C)
  misc_feature (56)..(297): NCBI GI NO: 30689623 NR Description: 60S ribosomal protein L7 (RPL7C)
  misc_feature (56)..(297): NCBI GI NO: 27311547 NR Description: Unknown protein [Arabidopsis thaliana]
  misc_feature (57)..(297): NCBI GI NO: 15226212 NR Description: 60S ribosomal protein L7 (RPL7B)
  misc_feature (63)..(297): NCBI GI NO: 445613 NR Description: ribosomal protein L7
  misc_feature (58)..(296): NCBI GI NO: 28630259 NR Description: ribosomal protein L7 [Branchiostoma lanceolatum]
  misc_feature (59)..(296): NCBI GI NO: 18253049 NR Description: ribosomal protein L7 [Spodoptera frugiperda]
LQPSDTPTGAFRSPNARPSHKYSPLTTPPPFPSSSHLGGRPPLLFTHTLVIEMSAAEAKAAAVPESVLRKRKREEQWAADKKEKALADRKKALESRKIIFARAKQYAEEYHAQEKELVQLKREARLKGGFYVSPEAKLLFVVRIRGINAMHPKTRKILQLLRLRQIFNGVFLKVNKATINMLRRVEPYVAYGYPNLKSVRELIYKRGYGKLNKQRIPLSNNSVIEEGLGKHNIICIEDLVHEIMTVGPHFKEANNFLWPFKLKAPLGGLKKKRNHYVEGGDAGNRENYINELIKRMN

SEQ ID NO: 33503 - protein, 245 aa, Zea mays subsp. mays
  peptide (1)..(245): Ceres Seq. ID no. 13493425
  misc_feature (85)..(137): Pfam Name: Pfam Description:  Ribosomal protein L30p/L7e
  misc_feature (1)..(245): NCBI GI NO: 38637548 NR Description: putative 60S ribosomal protein L7
  misc_feature (3)..(245): NCBI GI NO: 38346542 NR Description: OSJNBa0035M09.3
  misc_feature (1)..(245): NCBI GI NO: 15231288 NR Description: 60S ribosomal protein L7 (RPL7D)
  misc_feature (4)..(245): NCBI GI NO: 30689617 NR Description: 60S ribosomal protein L7 (RPL7C)
  misc_feature (4)..(245): NCBI GI NO: 30689623 NR Description: 60S ribosomal protein L7 (RPL7C)
  misc_feature (4)..(245): NCBI GI NO: 27311547 NR Description: Unknown protein [Arabidopsis thaliana]
  misc_feature (5)..(245): NCBI GI NO: 15226212 NR Description: 60S ribosomal protein L7 (RPL7B)
  misc_feature (11)..(245): NCBI GI NO: 445613 NR Description: ribosomal protein L7
  misc_feature (6)..(244): NCBI GI NO: 28630259 NR Description: ribosomal protein L7 [Branchiostoma lanceolatum]
  misc_feature (7)..(244): NCBI GI NO: 18253049 NR Description: ribosomal protein L7 [Spodoptera frugiperda]
MSAAEAKAAAVPESVLRKRKREEQWAADKKEKALADRKKALESRKIIFARAKQYAEEYHAQEKELVQLKREARLKGGFYVSPEAKLLFVVRIRGINAMHPKTRKILQLLRLRQIFNGVFLKVNKATINMLRRVEPYVAYGYPNLKSVRELIYKRGYGKLNKQRIPLSNNSVIEEGLGKHNIICIEDLVHEIMTVGPHFKEANNFLWPFKLKAPLGGLKKKRNHYVEGGDAGNRENYINELIKRMN

SEQ ID NO: 33504 - protein, 148 aa, Zea mays subsp. mays
  peptide (1)..(148): Ceres Seq. ID no. 13493426
  misc_feature (1)..(40): Pfam Name: Pfam Description:  Ribosomal protein L30p/L7e
  misc_feature (1)..(148): NCBI GI NO: 38637548 NR Description: putative 60S ribosomal protein L7
  misc_feature (1)..(148): NCBI GI NO: 38346542 NR Description: OSJNBa0035M09.3
  misc_feature (1)..(148): NCBI GI NO: 15231288 NR Description: 60S ribosomal protein L7 (RPL7D)
  misc_feature (1)..(148): NCBI GI NO: 30689617 NR Description: 60S ribosomal protein L7 (RPL7C)
  misc_feature (1)..(148): NCBI GI NO: 30689623 NR Description: 60S ribosomal protein L7 (RPL7C)
  misc_feature (1)..(148): NCBI GI NO: 27311547 NR Description: Unknown protein [Arabidopsis thaliana]
  misc_feature (1)..(148): NCBI GI NO: 15226212 NR Description: 60S ribosomal protein L7 (RPL7B)
  misc_feature (1)..(148): NCBI GI NO: 445613 NR Description: ribosomal protein L7
  misc_feature (1)..(147): NCBI GI NO: 28630259 NR Description: ribosomal protein L7 [Branchiostoma lanceolatum]
  misc_feature (1)..(147): NCBI GI NO: 18253049 NR Description: ribosomal protein L7 [Spodoptera frugiperda]
MHPKTRKILQLLRLRQIFNGVFLKVNKATINMLRRVEPYVAYGYPNLKSVRELIYKRGYGKLNKQRIPLSNNSVIEEGLGKHNIICIEDLVHEIMTVGPHFKEANNFLWPFKLKAPLGGLKKKRNHYVEGGDAGNRENYINELIKRMN

SEQ ID NO: 33505 - DNA, 938 bp, Zea mays subsp. mays
  misc_feature (1)..(938): Ceres Seq. ID no. 13580171
cccactttactcctatccactgcggcctggacgcgtgcgagaggcttgaccaagcagcagcagcagcagcagcgatggcgcctctgaagctgtacgggatgccgctgtcccccaacgtggtgcgcgtggccaccgtgctcaacgagaagggcctcgacttcgagatcgtccccgtcgacctcaccaccggcgcccacaagcagcccgacttcctcgccctcaaccctttcggccagatcccggctctcgtcgacggagacgaagtcctcttcgagtcccgtgcgatcaaccggtacatcgccagcaagtacgcgtcggagggcacggacctgctccccgcgacggcgtcggcggcgaagctggaggtgtggctggaggtggagtcgcaccacttccacccgaacgcgtcgccgctggtgttccagctgctcgtgaggccgctcctgggcggcgcccccgacgcggcggtggtggagaagcacgcggagcagctcgccaaggtgctcgacgtgtacgaggcgcacctggcccgcaacaagtacctcgccggggacgagttcacgctcgccgacgccaaccacgcgctcctacctgctctcacctcagcaagacccccaaggccgggctgcgtcgccgcccgcccccacgtcaaggcctggtgggaggccatcgccgcccgccccgcgttccagaagaccgtcgccgccatccccttgcccccgccgccctcctcctcggcttgacctcgccttgcgttgcctgggtcgcggatgcgtcggagccctgagtcgaataaaagaggccgcatcctgtcttgcatttgctcgtgcgccatgtgctataacagcctgtgtaataaacactgttgcctttcgtgtgtgttcattgccttttggttggttggtccttgcatatcctactagtgctgatctttttgt

SEQ ID NO: 33506 - protein, 246 aa, Zea mays subsp. mays
  peptide (1)..(246): Ceres Seq. ID no. 13580172
  misc_feature (25)..(246): NCBI GI NO: 1170090 NR Description: GLUTATHIONE S-TRANSFERASE III
  misc_feature (25)..(246): NCBI GI NO: 25287127 NR Description: glutathione transferase (EC 2.5.1.18) III(b)
  misc_feature (25)..(246): NCBI GI NO: 25287128 NR Description: glutathione transferase (EC 2.5.1.18) III(a)
  misc_feature (26)..(242): NCBI GI NO: 3891593 NR Description: Structure Of Glutathione S-Transferase Iii In ApoForm
  misc_feature (25)..(246): NCBI GI NO: 66616 NR Description: glutathione transferase (EC 2
  misc_feature (28)..(240): NCBI GI NO: 34907162 NR Description: putative glutathione S-transferase
  misc_feature (28)..(240): NCBI GI NO: 11177843 NR Description: putative glutathione S-transferase OsGSTF4
  misc_feature (25)..(240): NCBI GI NO: 23504745 NR Description: glutathione transferase F5 [Triticum aestivum]
  misc_feature (28)..(232): NCBI GI NO: 18150415 NR Description: glutathione S-transferase [Allium cepa]
  misc_feature (25)..(240): NCBI GI NO: 34909798 NR Description: glutathione S-transferase II
HFTPIHCGLDACERLDQAAAAAAAMAPLKLYGMPLSPNVVRVATVLNEKGLDFEIVPVDLTTGAHKQPDFLALNPFGQIPALVDGDEVLFESRAINRYIASKYASEGTDLLPATASAAKLEVWLEVESHHFHPNASPLVFQLLVRPLLGGAPDAAVVEKHAEQLAKVLDVYEAHLARNKYLAGDEFTLADANHALLPALTSARPPRPGCVAARPHVKAWWEAIAARPAFQKTVAAIPLPPPPSSSA

SEQ ID NO: 33507 - protein, 222 aa, Zea mays subsp. mays
  peptide (1)..(222): Ceres Seq. ID no. 13580173
  misc_feature (1)..(222): NCBI GI NO: 1170090 NR Description: GLUTATHIONE S-TRANSFERASE III
  misc_feature (1)..(222): NCBI GI NO: 25287127 NR Description: glutathione transferase (EC 2.5.1.18) III(b)
  misc_feature (1)..(222): NCBI GI NO: 25287128 NR Description: glutathione transferase (EC 2.5.1.18) III(a)
  misc_feature (2)..(218): NCBI GI NO: 3891593 NR Description: Structure Of Glutathione S-Transferase Iii In ApoForm
  misc_feature (1)..(222): NCBI GI NO: 66616 NR Description: glutathione transferase (EC 2
  misc_feature (4)..(216): NCBI GI NO: 34907162 NR Description: putative glutathione S-transferase
  misc_feature (4)..(216): NCBI GI NO: 11177843 NR Description: putative glutathione S-transferase OsGSTF4
  misc_feature (1)..(216): NCBI GI NO: 23504745 NR Description: glutathione transferase F5 [Triticum aestivum]
  misc_feature (4)..(208): NCBI GI NO: 18150415 NR Description: glutathione S-transferase [Allium cepa]
  misc_feature (1)..(216): NCBI GI NO: 34909798 NR Description: glutathione S-transferase II
MAPLKLYGMPLSPNVVRVATVLNEKGLDFEIVPVDLTTGAHKQPDFLALNPFGQIPALVDGDEVLFESRAINRYIASKYASEGTDLLPATASAAKLEVWLEVESHHFHPNASPLVFQLLVRPLLGGAPDAAVVEKHAEQLAKVLDVYEAHLARNKYLAGDEFTLADANHALLPALTSARPPRPGCVAARPHVKAWWEAIAARPAFQKTVAAIPLPPPPSSSA

SEQ ID NO: 33508 - protein, 214 aa, Zea mays subsp. mays
  peptide (1)..(214): Ceres Seq. ID no. 13580174
  misc_feature (1)..(214): NCBI GI NO: 1170090 NR Description: GLUTATHIONE S-TRANSFERASE III
  misc_feature (1)..(214): NCBI GI NO: 25287127 NR Description: glutathione transferase (EC 2.5.1.18) III(b)
  misc_feature (1)..(214): NCBI GI NO: 25287128 NR Description: glutathione transferase (EC 2.5.1.18) III(a)
  misc_feature (1)..(210): NCBI GI NO: 3891593 NR Description: Structure Of Glutathione S-Transferase Iii In ApoForm
  misc_feature (1)..(214): NCBI GI NO: 66616 NR Description: glutathione transferase (EC 2
  misc_feature (1)..(208): NCBI GI NO: 34907162 NR Description: putative glutathione S-transferase
  misc_feature (1)..(208): NCBI GI NO: 11177843 NR Description: putative glutathione S-transferase OsGSTF4
  misc_feature (1)..(208): NCBI GI NO: 23504745 NR Description: glutathione transferase F5 [Triticum aestivum]
  misc_feature (1)..(200): NCBI GI NO: 18150415 NR Description: glutathione S-transferase [Allium cepa]
  misc_feature (1)..(208): NCBI GI NO: 34909798 NR Description: glutathione S-transferase II
MPLSPNVVRVATVLNEKGLDFEIVPVDLTTGAHKQPDFLALNPFGQIPALVDGDEVLFESRAINRYIASKYASEGTDLLPATASAAKLEVWLEVESHHFHPNASPLVFQLLVRPLLGGAPDAAVVEKHAEQLAKVLDVYEAHLARNKYLAGDEFTLADANHALLPALTSARPPRPGCVAARPHVKAWWEAIAARPAFQKTVAAIPLPPPPSSSA

SEQ ID NO: 33509 - DNA, 880 bp, Zea mays subsp. mays
  misc_feature (1)..(880): Ceres Seq. ID no. 12343712
aaaaaaccccgaaggttcggactgaatgaagcgaaagcccaaatccccttccccttcccctcttcgtctccgtcggcggcgtcggaccgaacccgatcccgcagccctaactaaccctaggaggcaggcggcggcggggatggtgtactacgcgctgttggtgggcgcggagctggatggcctcaccaacctgcagccccgccacggctgcgacgaccccagcttcccctactacctcaagctcaagtgcgagaactgcggggaggtcaccgccaagtccacctacgtcaccctcagcgagcaagtcgacctgcccagaggacacggtgccgctcacctcgtccagaagtgcaagctttgtgggagagatggaacaattgtgatgattcctggtcaggggacaccacttactattgagcagagccagaaagaggagaagacttgtttgatggtgtttgactgcagaggctatgaacctgttgagttttcctttggcactggctggaaggctgaatctgtgcatgggactccttttgaaattgactgctctgaaggtgaattttctgagtatgatgagaagggagaatgccccgttgagctaggcaagctgcagtcaacattcaaagtggtgaagaagcatgagaagggtgggaagactagatttgtctagatcgagtgacttggaatctggcagatattggagttggcggtgtgtataaatggtagatttgggctgaaggtcatgcgtgatccgacctcctttttcttctatctgttgattctgtggatgcagtgaaccatgcgaagctttcggtgatagtgtccacaggggcattaccctgtaccgaaactgatctttataacttaccaccaatgctcg

SEQ ID NO: 33510 - protein, 214 aa, Zea mays subsp. mays
  peptide (1)..(214): Ceres Seq. ID no. 12343713
  misc_feature (39)..(202): Pfam Name: DUF866 Pfam Description: Eukaryotic protein of unknown function
  misc_feature (1)..(212): NCBI GI NO: 34914208 NR Description: OSJNBb0049O23.17
  misc_feature (39)..(203): NCBI GI NO: 18418118 NR Description: putative protein; protein id: At4g32930
  misc_feature (39)..(203): NCBI GI NO: 7486215 NR Description: hypothetical protein F26P21
  misc_feature (2)..(207): NCBI GI NO: 7503539 NR Description: hypothetical protein F46B6
  misc_feature (43)..(203): NCBI GI NO: 8923541 NR Description: hypothetical protein FLJ20580 [Homo sapiens]
  misc_feature (71)..(207): NCBI GI NO: 17561054 NR Description: Putative protein of eukaryotic origin
  misc_feature (43)..(203): NCBI GI NO: 27715611 NR Description: similar to hypothetical protein FLJ20580
  misc_feature (43)..(203): NCBI GI NO: 21539639 NR Description: RIKEN cDNA 0610037L13 [Mus musculus]
  misc_feature (43)..(203): NCBI GI NO: 26328397 NR Description: unnamed protein product [Mus musculus]
  misc_feature (71)..(207): NCBI GI NO: 39594673 NR Description: Hypothetical protein CBG19371
MKRKPKSPSPSPLRLRRRRRTEPDPAALTNPRRQAAAGMVYYALLVGAELDGLTNLQPRHGCDDPSFPYYLKLKCENCGEVTAKSTYVTLSEQVDLPRGHGAAHLVQKCKLCGRDGTIVMIPGQGTPLTIEQSQKEEKTCLMVFDCRGYEPVEFSFGTGWKAESVHGTPFEIDCSEGEFSEYDEKGECPVELGKLQSTFKVVKKHEKGGKTRFV

SEQ ID NO: 33511 - protein, 176 aa, Zea mays subsp. mays
  peptide (1)..(176): Ceres Seq. ID no. 12343714
  misc_feature (1)..(164): Pfam Name: DUF866 Pfam Description: Eukaryotic protein of unknown function
  misc_feature (1)..(174): NCBI GI NO: 34914208 NR Description: OSJNBb0049O23.17
  misc_feature (1)..(165): NCBI GI NO: 18418118 NR Description: putative protein; protein id: At4g32930
  misc_feature (1)..(165): NCBI GI NO: 7486215 NR Description: hypothetical protein F26P21
  misc_feature (1)..(169): NCBI GI NO: 7503539 NR Description: hypothetical protein F46B6
  misc_feature (5)..(165): NCBI GI NO: 8923541 NR Description: hypothetical protein FLJ20580 [Homo sapiens]
  misc_feature (33)..(169): NCBI GI NO: 17561054 NR Description: Putative protein of eukaryotic origin
  misc_feature (5)..(165): NCBI GI NO: 27715611 NR Description: similar to hypothetical protein FLJ20580
  misc_feature (5)..(165): NCBI GI NO: 21539639 NR Description: RIKEN cDNA 0610037L13 [Mus musculus]
  misc_feature (5)..(165): NCBI GI NO: 26328397 NR Description: unnamed protein product [Mus musculus]
  misc_feature (33)..(169): NCBI GI NO: 39594673 NR Description: Hypothetical protein CBG19371
MVYYALLVGAELDGLTNLQPRHGCDDPSFPYYLKLKCENCGEVTAKSTYVTLSEQVDLPRGHGAAHLVQKCKLCGRDGTIVMIPGQGTPLTIEQSQKEEKTCLMVFDCRGYEPVEFSFGTGWKAESVHGTPFEIDCSEGEFSEYDEKGECPVELGKLQSTFKVVKKHEKGGKTRFV

SEQ ID NO: 33512 - DNA, 711 bp, Zea mays subsp. mays; identical to SEQ ID NO: 24057
  misc_feature (1)..(711): Ceres Seq. ID no. 12588472

SEQ ID NO: 33513 - protein, 149 aa, Zea mays subsp. mays; identical to SEQ ID NO: 24058
  peptide (1)..(149): Ceres Seq. ID no. 12588473
  misc_feature (21)..(149): Pfam Name: Pfam Description:  Core histone H2A/H2B/H3/H4
  misc_feature (1)..(149): NCBI GI NO: 122022 NR Description: Histone H2B
  misc_feature (1)..(149): NCBI GI NO: 399854 NR Description: Histone H2B.2
  misc_feature (1)..(149): NCBI GI NO: 1708107 NR Description: Histone H2B
  misc_feature (1)..(149): NCBI GI NO: 3913804 NR Description: Histone H2B.3
  misc_feature (1)..(149): NCBI GI NO: 399853 NR Description: Histone H2B.1
  misc_feature (1)..(149): NCBI GI NO: 34895838 NR Description: putative histone H2B
  misc_feature (1)..(149): NCBI GI NO: 122041 NR Description: Histone H2B-IV
  misc_feature (4)..(149): NCBI GI NO: 34876159 NR Description: similar to Histone H2B 291B [Rattus norvegicus]
  misc_feature (2)..(146): NCBI GI NO: 15223150 NR Description: histone H2B, putative; protein id: At1g08170.1
  misc_feature (1)..(145): NCBI GI NO: 18596433 NR Description: similar to dJ839M11.2 (Core histone H2A/H2B/H3/H4)

SEQ ID NO: 33514 - protein, 99 aa, Zea mays subsp. mays; identical to SEQ ID NO: 24059
  peptide (1)..(99): Ceres Seq. ID no. 12588474
  misc_feature (31)..(91): Pfam Name: Pfam Description:  TT viral orf 1
  misc_feature (8)..(99): NCBI GI NO: 5032119 NR Description: Ser/Arg-related nuclear matrix protein
  misc_feature (3)..(99): NCBI GI NO: 9843651 NR Description: SRM102 [Arabidopsis thaliana]
  misc_feature (3)..(99): NCBI GI NO: 30684163 NR Description: proline-rich protein -related
  misc_feature (3)..(99): NCBI GI NO: 25408026 NR Description: probable proline-rich protein
  misc_feature (8)..(99): NCBI GI NO: 7949115 NR Description: Ser/Arg-related nuclear matrix protein
  misc_feature (3)..(99): NCBI GI NO: 28972153 NR Description: mKIAA0324 protein [Mus musculus]
  misc_feature (3)..(99): NCBI GI NO: 30424862 NR Description: RIKEN cDNA 5033413A03 [Mus musculus]
  misc_feature (8)..(99): NCBI GI NO: 23274133 NR Description: Similar to serine/arginine repetitive matrix 1

SEQ ID NO: 33515 - DNA, 761 bp, Zea mays subsp. mays
  misc_feature (1)..(761): Ceres Seq. ID no. 12345679
aattgccttaccttgccttgccttcccctccattccacctccacctcgccgcccgaatccccccacccaacaatcccccatggggtcgcaggccatcgaggcgcaccgcgcgggcgcggaggtgtaccgcggcgcggcgctgtgcgcggagaagtcgacggagctgctggcagaggcgcacctcccgctgggcctgctgccgctggccgacatggaggaggtcggctacaaccgcgccacgggcttcgtgtggctgcgccagaggaaggcgctcacgcacacgttccgcccgatcgcgcgccaggtctcgtacgccgccgaggtcaccgcgttcgtggaggaccggcggatgaagcgcatgaccggggtcaagaccaaggagctcctcatctgggtcaccctctccgacatgttcgtcgacagggacgacccgtccaagatcaccttcaagacgcccaccgggctcggcaggacctaccccgtctccgccttcgccaaggaaggcgccggtgacgacggcgcggcggccaagcacaaggatgatgcccccgccccgaccgccgccggtaaggctgctgccagcaagtgaggtggcggcgtccggagctttttaccttgccgtagtcgccatacttgcctcctcaataatggcgtttgtaccccctctacctgcttcaaattagtgtgttttatgaatggaaacgaccatccaactttccatccgtccttgcaatgccaatgtgtcacggggtgtttttact

SEQ ID NO: 33516 - protein, 195 aa, Zea mays subsp. mays
  peptide (1)..(195): Ceres Seq. ID no. 12345680
  misc_feature (30)..(173): Pfam Name: Pfam Description:  Protein of unknown function, DUF538
  misc_feature (27)..(193): NCBI GI NO: 34903866 NR Description: unnamed protein product
  misc_feature (27)..(165): NCBI GI NO: 34915410 NR Description: hypothetical protein~similar to Arabidopsisthaliana chromosome1
  misc_feature (27)..(165): NCBI GI NO: 34915422 NR Description: hypothetical protein~similar to Arabidopsisthaliana chromosome1
  misc_feature (27)..(165): NCBI GI NO: 33146557 NR Description: unknown protein
  misc_feature (27)..(165): NCBI GI NO: 34915418 NR Description: hypothetical protein~similar to Arabidopsisthaliana chromosome1
  misc_feature (27)..(165): NCBI GI NO: 34915426 NR Description: hypothetical protein~similar to Arabidopsisthaliana chromosome1
  misc_feature (27)..(167): NCBI GI NO: 18422648 NR Description: expressed protein; protein id: At5g46230
  misc_feature (33)..(195): NCBI GI NO: 18391006 NR Description: expressed protein; protein id: At1g09310
  misc_feature (32)..(165): NCBI GI NO: 34915430 NR Description: hypothetical protein~similar to Arabidopsisthaliana chromosome3
IALPCLAFPSIPPPPRRPNPPTQQSPMGSQAIEAHRAGAEVYRGAALCAEKSTELLAEAHLPLGLLPLADMEEVGYNRATGFVWLRQRKALTHTFRPIARQVSYAAEVTAFVEDRRMKRMTGVKTKELLIWVTLSDMFVDRDDPSKITFKTPTGLGRTYPVSAFAKEGAGDDGAAAKHKDDAPAPTAAGKAAASK

SEQ ID NO: 33517 - protein, 170 aa, Zea mays subsp. mays
  peptide (1)..(170): Ceres Seq. ID no. 12345681
NCLTLPCLPLHSTSTSPPESPHPTIPHGVAGHRGAPRGRGGVPRRGAVRGEVDGAAGRGAPPAGPAAAGRHGGGRLQPRHGLRVAAPEEGAHAHVPPDRAPGLVRRRGHRVRGGPADEAHDRGQDQGAPHLGHPLRHVRRQGRPVQDHLQDAHRARQDLPRLRLRQGRRR

SEQ ID NO: 33518 - protein, 169 aa, Zea mays subsp. mays
  peptide (1)..(169): Ceres Seq. ID no. 12345682
  misc_feature (4)..(147): Pfam Name: Pfam Description:  Protein of unknown function, DUF538
  misc_feature (1)..(167): NCBI GI NO: 34903866 NR Description: unnamed protein product
  misc_feature (1)..(139): NCBI GI NO: 34915410 NR Description: hypothetical protein~similar to Arabidopsisthaliana chromosome1
  misc_feature (1)..(139): NCBI GI NO: 34915422 NR Description: hypothetical protein~similar to Arabidopsisthaliana chromosome1
  misc_feature (1)..(139): NCBI GI NO: 33146557 NR Description: unknown protein
  misc_feature (1)..(139): NCBI GI NO: 34915418 NR Description: hypothetical protein~similar to Arabidopsisthaliana chromosome1
  misc_feature (1)..(139): NCBI GI NO: 34915426 NR Description: hypothetical protein~similar to Arabidopsisthaliana chromosome1
  misc_feature (1)..(141): NCBI GI NO: 18422648 NR Description: expressed protein; protein id: At5g46230
  misc_feature (7)..(169): NCBI GI NO: 18391006 NR Description: expressed protein; protein id: At1g09310
  misc_feature (6)..(139): NCBI GI NO: 34915430 NR Description: hypothetical protein~similar to Arabidopsisthaliana chromosome3
MGSQAIEAHRAGAEVYRGAALCAEKSTELLAEAHLPLGLLPLADMEEVGYNRATGFVWLRQRKALTHTFRPIARQVSYAAEVTAFVEDRRMKRMTGVKTKELLIWVTLSDMFVDRDDPSKITFKTPTGLGRTYPVSAFAKEGAGDDGAAAKHKDDAPAPTAAGKAAASK

SEQ ID NO: 33519 - DNA, 929 bp, Zea mays subsp. mays
  misc_feature (1)..(929): Ceres Seq. ID no. 12361956
  misc_feature (651)..(651): n is a, c, t, g, unknown, or other
aaggccattctttgtggaatttgataataacattttctcgtctagtcatcttcgtcgctcgagtactcgagctgaaaggggaagaccaagctccctttttgaagaaagtcctcgacaaatgttccatagtctcatgggggagagggacagacatagacacataaccatggaaggaattacagaggttttggctgcattggagaggattgaacagcaagcagagctgacctatgatcaattgctaatgctggaggctaatctattttttggcgcctttgcctcctatgatcggcatagagacatgcggatggatattgatgatatgtcctatgaggaattattggccctggaggagagaataggctctgtgagcacagctctttcagaggagcagttcacaaaatgcctcaaaagaagcatatatagtcaggtcgctctagaagtgaacaaatcaaccgttgatgacatgaaatgcagcatctgtcaggaagagtacgcggagggcgaagaggttgggaggctgccatgcgagcaccggtaccatgtgtgctgcataggccagtggcttgggcagaagaactggtgtccagtatgcaaagcgtctgccgtgccttccaagggctgaagcattggggatgctggaaaccccgntccggattacaaaccatccttgcttttgtctacgtacattgttcttttccctatatgcattagatatagatcatgtctagatgtatgacgctagaacagcttgcgatttgggaggaagctaagagagtaatagttagctggttaataatagttcatagctaatatttgctagataactattacttggctacctattagctgtgcctttcacattgtggtacaggacaaatgcttgtcagatcgtgaacaaccttataacttgatgaatggcctaagtc

SEQ ID NO: 33520 - protein, 207 aa, Zea mays subsp. mays
  peptide (1)..(207): Ceres Seq. ID no. 12361957
  misc_feature (158)..(198): Pfam Name: RING finger Pfam Description: Zinc finger, C3HC4 type
  misc_feature (24)..(202): NCBI GI NO: 30689641 NR Description: RING finger-related protein [Arabidopsis thaliana]
  misc_feature (12)..(206): NCBI GI NO: 10129643 NR Description: Pspzf zinc finger protein-like
  misc_feature (12)..(206): NCBI GI NO: 20466428 NR Description: Pspzf zinc finger protein-like
  misc_feature (12)..(206): NCBI GI NO: 22326712 NR Description: Pspzf zinc finger protein - like
  misc_feature (13)..(205): NCBI GI NO: 7486381 NR Description: hypothetical protein F3L17
  misc_feature (13)..(205): NCBI GI NO: 18417809 NR Description: putative protein; protein id: At4g31450
  misc_feature (59)..(205): NCBI GI NO: 38345496 NR Description: OSJNBa0010D21.9
  misc_feature (92)..(203): NCBI GI NO: 38344153 NR Description: OSJNBa0041A02.20
  misc_feature (42)..(203): NCBI GI NO: 15220067 NR Description: hypothetical protein; protein id: At1g45180.1
  misc_feature (93)..(206): NCBI GI NO: 40253261 NR Description: DNA binding zinc finger protein-like
RPFFVEFDNNIFSSSHLRRSSTRAERGRPSSLFEESPRQMFHSLMGERDRHRHITMEGITEVLAALERIEQQAELTYDQLLMLEANLFFGAFASYDRHRDMRMDIDDMSYEELLALEERIGSVSTALSEEQFTKCLKRSIYSQVALEVNKSTVDDMKCSICQEEYAEGEEVGRLPCEHRYHVCCIGQWLGQKNWCPVCKASAVPSKG

SEQ ID NO: 33521 - protein, 168 aa, Zea mays subsp. mays
  peptide (1)..(168): Ceres Seq. ID no. 12361958
  misc_feature (119)..(159): Pfam Name: RING finger Pfam Description: Zinc finger, C3HC4 type
  misc_feature (1)..(163): NCBI GI NO: 30689641 NR Description: RING finger-related protein [Arabidopsis thaliana]
  misc_feature (1)..(167): NCBI GI NO: 10129643 NR Description: Pspzf zinc finger protein-like
  misc_feature (1)..(167): NCBI GI NO: 22326712 NR Description: Pspzf zinc finger protein - like
  misc_feature (1)..(167): NCBI GI NO: 20466428 NR Description: Pspzf zinc finger protein-like
  misc_feature (1)..(166): NCBI GI NO: 7486381 NR Description: hypothetical protein F3L17
  misc_feature (1)..(166): NCBI GI NO: 18417809 NR Description: putative protein; protein id: At4g31450
  misc_feature (20)..(166): NCBI GI NO: 38345496 NR Description: OSJNBa0010D21.9
  misc_feature (53)..(164): NCBI GI NO: 38344153 NR Description: OSJNBa0041A02.20
  misc_feature (3)..(164): NCBI GI NO: 15220067 NR Description: hypothetical protein; protein id: At1g45180.1
  misc_feature (54)..(167): NCBI GI NO: 40253261 NR Description: DNA binding zinc finger protein-like
MFHSLMGERDRHRHITMEGITEVLAALERIEQQAELTYDQLLMLEANLFFGAFASYDRHRDMRMDIDDMSYEELLALEERIGSVSTALSEEQFTKCLKRSIYSQVALEVNKSTVDDMKCSICQEEYAEGEEVGRLPCEHRYHVCCIGQWLGQKNWCPVCKASAVPSKG

SEQ ID NO: 33522 - protein, 163 aa, Zea mays subsp. mays
  peptide (1)..(163): Ceres Seq. ID no. 12361959
  misc_feature (114)..(154): Pfam Name: RING finger Pfam Description: Zinc finger, C3HC4 type
  misc_feature (1)..(158): NCBI GI NO: 30689641 NR Description: RING finger-related protein [Arabidopsis thaliana]
  misc_feature (1)..(162): NCBI GI NO: 10129643 NR Description: Pspzf zinc finger protein-like
  misc_feature (1)..(162): NCBI GI NO: 20466428 NR Description: Pspzf zinc finger protein-like
  misc_feature (1)..(162): NCBI GI NO: 22326712 NR Description: Pspzf zinc finger protein - like
  misc_feature (1)..(161): NCBI GI NO: 7486381 NR Description: hypothetical protein F3L17
  misc_feature (1)..(161): NCBI GI NO: 18417809 NR Description: putative protein; protein id: At4g31450
  misc_feature (15)..(161): NCBI GI NO: 38345496 NR Description: OSJNBa0010D21.9
  misc_feature (48)..(159): NCBI GI NO: 38344153 NR Description: OSJNBa0041A02.20
  misc_feature (1)..(159): NCBI GI NO: 15220067 NR Description: hypothetical protein; protein id: At1g45180.1
  misc_feature (49)..(162): NCBI GI NO: 40253261 NR Description: DNA binding zinc finger protein-like
MGERDRHRHITMEGITEVLAALERIEQQAELTYDQLLMLEANLFFGAFASYDRHRDMRMDIDDMSYEELLALEERIGSVSTALSEEQFTKCLKRSIYSQVALEVNKSTVDDMKCSICQEEYAEGEEVGRLPCEHRYHVCCIGQWLGQKNWCPVCKASAVPSKG

SEQ ID NO: 33523 - DNA, 1577 bp, Zea mays subsp. mays
  misc_feature (1)..(1577): Ceres Seq. ID no. 12413088
attgggggtgttaaaccgcatcgcatcgtcttctagggtttcctcctcccgccgccacttgctgccccacgagcccattcccctcagcccttcaccatctccggcggtcgcagtggcatcagcagctccggctcacgcgcagcaaaggaacgacaatatggcgaccatcgtaaacacgacggaggaggagccgatgctggccgtggtccgcttcaccgctgagctcgcctgggccgacgcgggcccggaagtcgccgaccccgaggtcgcccgcctatgtctcgaggcgcaggagcatatcctcgcggggcggtggctcgacatggcctcccttatgctcgcctccgccgacctcctcctcacctccccgtcgcgcgtctcggacaaagacctggagtgcgttctctccgtcatctgcagcctcgtcaccaaggccggatccgaggaccaggcgctgcagatcaccgaactcatctgcgctaagctcacccagcaacacggtgacaagccagcgctgcgcctcaaagttcttttcagcttgtacaatctgctcccgagcccgtacggcaaggcatttgtttacaagaaggctcttgagctcgccacggctggaaaggctgctgagtacatcatcccatctttcaagaacattgacagttttgtcagtgagtggggaattgacaatttggagaagagggagctataccttgctatcactaccatcctcaaagaccacaagggcatggctaaggagtactttaactttctcaataagtaccttgccacattcaaagggtcagatgatgaatcaggtataattggtgatgcgaaggaagaggctgttgcggcaatcatcgagtttgttaaatcgcctaatctctttcagtgtgatttgctcaacatgccagctgtttcacagcttgagaaggacggaaagtatcagttggtgtatgaactactaaagatattccttactaagaagcttgattcctacttggagtttcaaagtgcaaactctgacttgctgaaagattatggtctcgttcatgaggaatgtgtaaccaaaatgcgcctcatgtctttgctcgatctgagcagccgatgctctggtgaaatcccttattctgcaatcactgttgaactcaggatcaatgatgacgaggtggagcaatggattgtgaaggcaattgcatccaagatattggattgcaaggttgaccagcttaaccagactgtcattgtcagtcggcacacagagaggatctttgggatggaacattggcatgctctgcgcacaaagctcggagcttggaggggaaacattgccagagctatcaacacaatacaagctaacaaagtcaccgaagagggggcacaagggatgcaaggcttggcgatccactgattcggggcgggtcagcgggttcgtgaattgagattatagcgtgggagattagaagggcaaccttttttgtatgagacaagttgtaatggtttatttacttagatcccgtaaccatgcctggttattccttgtatttggtcagacacgccgcgcagtgcaaggcagttgttac

SEQ ID NO: 33524 - protein, 467 aa, Zea mays subsp. mays
  peptide (1)..(467): Ceres Seq. ID no. 12413089
  misc_feature (316)..(414): Pfam Name: Pfam Description:  PCI domain
  misc_feature (53)..(466): NCBI GI NO: 30685439 NR Description: expressed protein [Arabidopsis thaliana]
  misc_feature (53)..(414): NCBI GI NO: 15242346 NR Description: putative protein; protein id: At5g15610
  misc_feature (414)..(466): NCBI GI NO: 15242346 NR Description: putative protein; protein id: At5g15610
  misc_feature (53)..(465): NCBI GI NO: 22330807 NR Description: unknown protein; protein id: At3g02200
  misc_feature (120)..(466): NCBI GI NO: 32489165 NR Description: OSJNBa0094O15.2
  misc_feature (53)..(414): NCBI GI NO: 30678503 NR Description: expressed protein [Arabidopsis thaliana]
  misc_feature (53)..(409): NCBI GI NO: 6041797 NR Description: unknown protein [Arabidopsis thaliana]
  misc_feature (53)..(177): NCBI GI NO: 32489165 NR Description: OSJNBa0094O15.2
  misc_feature (96)..(448): NCBI GI NO: 3152660 NR Description: GA17 protein [Homo sapiens]
  misc_feature (96)..(448): NCBI GI NO: 23397429 NR Description: dendritic cell protein [Homo sapiens]
LGVLNRIASSSRVSSSRRHLLPHEPIPLSPSPSPAVAVASAAPAHAQQRNDNMATIVNTTEEEPMLAVVRFTAELAWADAGPEVADPEVARLCLEAQEHILAGRWLDMASLMLASADLLLTSPSRVSDKDLECVLSVICSLVTKAGSEDQALQITELICAKLTQQHGDKPALRLKVLFSLYNLLPSPYGKAFVYKKALELATAGKAAEYIIPSFKNIDSFVSEWGIDNLEKRELYLAITTILKDHKGMAKEYFNFLNKYLATFKGSDDESGIIGDAKEEAVAAIIEFVKSPNLFQCDLLNMPAVSQLEKDGKYQLVYELLKIFLTKKLDSYLEFQSANSDLLKDYGLVHEECVTKMRLMSLLDLSSRCSGEIPYSAITVELRINDDEVEQWIVKAIASKILDCKVDQLNQTVIVSRHTERIFGMEHWHALRTKLGAWRGNIARAINTIQANKVTEEGAQGMQGLAIH

SEQ ID NO: 33525 - protein, 415 aa, Zea mays subsp. mays
  peptide (1)..(415): Ceres Seq. ID no. 12413090
  misc_feature (264)..(362): Pfam Name: Pfam Description:  PCI domain
  misc_feature (1)..(414): NCBI GI NO: 30685439 NR Description: expressed protein [Arabidopsis thaliana]
  misc_feature (1)..(362): NCBI GI NO: 15242346 NR Description: putative protein; protein id: At5g15610
  misc_feature (362)..(414): NCBI GI NO: 15242346 NR Description: putative protein; protein id: At5g15610
  misc_feature (1)..(413): NCBI GI NO: 22330807 NR Description: unknown protein; protein id: At3g02200
  misc_feature (68)..(414): NCBI GI NO: 32489165 NR Description: OSJNBa0094O15.2
  misc_feature (1)..(362): NCBI GI NO: 30678503 NR Description: expressed protein [Arabidopsis thaliana]
  misc_feature (1)..(357): NCBI GI NO: 6041797 NR Description: unknown protein [Arabidopsis thaliana]
  misc_feature (1)..(125): NCBI GI NO: 32489165 NR Description: OSJNBa0094O15.2
  misc_feature (44)..(396): NCBI GI NO: 3152660 NR Description: GA17 protein [Homo sapiens]
  misc_feature (44)..(396): NCBI GI NO: 23397429 NR Description: dendritic cell protein [Homo sapiens]
MATIVNTTEEEPMLAVVRFTAELAWADAGPEVADPEVARLCLEAQEHILAGRWLDMASLMLASADLLLTSPSRVSDKDLECVLSVICSLVTKAGSEDQALQITELICAKLTQQHGDKPALRLKVLFSLYNLLPSPYGKAFVYKKALELATAGKAAEYIIPSFKNIDSFVSEWGIDNLEKRELYLAITTILKDHKGMAKEYFNFLNKYLATFKGSDDESGIIGDAKEEAVAAIIEFVKSPNLFQCDLLNMPAVSQLEKDGKYQLVYELLKIFLTKKLDSYLEFQSANSDLLKDYGLVHEECVTKMRLMSLLDLSSRCSGEIPYSAITVELRINDDEVEQWIVKAIASKILDCKVDQLNQTVIVSRHTERIFGMEHWHALRTKLGAWRGNIARAINTIQANKVTEEGAQGMQGLAIH

SEQ ID NO: 33526 - protein, 403 aa, Zea mays subsp. mays
  peptide (1)..(403): Ceres Seq. ID no. 12413091
  misc_feature (252)..(350): Pfam Name: Pfam Description:  PCI domain
  misc_feature (1)..(402): NCBI GI NO: 30685439 NR Description: expressed protein [Arabidopsis thaliana]
  misc_feature (1)..(350): NCBI GI NO: 15242346 NR Description: putative protein; protein id: At5g15610
  misc_feature (350)..(402): NCBI GI NO: 15242346 NR Description: putative protein; protein id: At5g15610
  misc_feature (1)..(401): NCBI GI NO: 22330807 NR Description: unknown protein; protein id: At3g02200
  misc_feature (56)..(402): NCBI GI NO: 32489165 NR Description: OSJNBa0094O15.2
  misc_feature (1)..(350): NCBI GI NO: 30678503 NR Description: expressed protein [Arabidopsis thaliana]
  misc_feature (1)..(345): NCBI GI NO: 6041797 NR Description: unknown protein [Arabidopsis thaliana]
  misc_feature (1)..(113): NCBI GI NO: 32489165 NR Description: OSJNBa0094O15.2
  misc_feature (32)..(384): NCBI GI NO: 3152660 NR Description: GA17 protein [Homo sapiens]
  misc_feature (32)..(384): NCBI GI NO: 23397429 NR Description: dendritic cell protein [Homo sapiens]
MLAVVRFTAELAWADAGPEVADPEVARLCLEAQEHILAGRWLDMASLMLASADLLLTSPSRVSDKDLECVLSVICSLVTKAGSEDQALQITELICAKLTQQHGDKPALRLKVLFSLYNLLPSPYGKAFVYKKALELATAGKAAEYIIPSFKNIDSFVSEWGIDNLEKRELYLAITTILKDHKGMAKEYFNFLNKYLATFKGSDDESGIIGDAKEEAVAAIIEFVKSPNLFQCDLLNMPAVSQLEKDGKYQLVYELLKIFLTKKLDSYLEFQSANSDLLKDYGLVHEECVTKMRLMSLLDLSSRCSGEIPYSAITVELRINDDEVEQWIVKAIASKILDCKVDQLNQTVIVSRHTERIFGMEHWHALRTKLGAWRGNIARAINTIQANKVTEEGAQGMQGLAIH

SEQ ID NO: 33527 - DNA, 679 bp, Zea mays subsp. mays
  misc_feature (1)..(679): Ceres Seq. ID no. 12403782
aaatcgcaattcgcaattcccagccccattccccgtcgcccggtcggaagcaccaccagctaccagggatgtctggcgaggaggaggagaacgccgcggagctcaagatcggcgaagagttcctcaaggccaagtgcctgatgaactgcgaggtggcgatcatcctggagcacaagtacgagcagatccagcagcacgcgtcgtcggagtcggacccgtcgtcgcaggtgtcgcaggtgttcgagaagtcgctgcagtacgtgaagcgcttcagccgctacaagaaccccgacgccgtgcgccaggtccgcgagacgctgagccgctacggcctcgccgagttcgagctctgcacgctcggcaacctctgccccgacaccagcggcgaggccaccgcgctcgtcccctccctcaagtccggcggcaggttcgtcggcgaccccggggacgagaagatcgagaagatgctcaacgacctctccctcatcaagaagttcgagtagagcgggagcccccagggtccgtatctcccccctcttctcttcttttctcttggagtagcgagcatccagagaggaggggaattcaacatcaagacgatgtactgctaaaattttacttgccttactactatcgttgaggtttgcgtctgcgtattgattagaaccttgtttgatcg

SEQ ID NO: 33528 - protein, 212 aa, Zea mays subsp. mays
  peptide (1)..(212): Ceres Seq. ID no. 12403783
NRNSQFPAPFPVARSEAPPATRDVWRGGGERRGAQDRRRVPQGQVPDELRGGDHPGAQVRADPAARVVGVGPVVAGVAGVREVAAVREALQPLQEPRRRAPGPRDAEPLRPRRVRALHARQPLPRHQRRGHRARPLPQVRRQVRRRPRGREDREDAQRPLPHQEVRVEREPPGSVSPPSSLLFSWSSEHPERRGIQHQDDVLLKFYLPYYYR

SEQ ID NO: 33529 - protein, 166 aa, Zea mays subsp. mays
  peptide (1)..(166): Ceres Seq. ID no. 12403784
  misc_feature (41)..(165): Pfam Name: Pfam Description:  RNA polymerase Rpb4
  misc_feature (23)..(166): NCBI GI NO: 15242547 NR Description: 15
  misc_feature (24)..(166): NCBI GI NO: 4758574 NR Description: DNA directed RNA polymerase II polypeptide D
  misc_feature (24)..(166): NCBI GI NO: 34878674 NR Description: similar to RIKEN cDNA 2610028L19
  misc_feature (25)..(166): NCBI GI NO: 17533967 NR Description: RNA polymerase Rpb4 family member
  misc_feature (25)..(166): NCBI GI NO: 39582357 NR Description: Hypothetical protein CBG13151
  misc_feature (25)..(139): NCBI GI NO: 7503310 NR Description: hypothetical protein F43E2
  misc_feature (28)..(159): NCBI GI NO: 27263229 NR Description: RNA polymerase II accessory factor rpb4
  misc_feature (53)..(166): NCBI GI NO: 28076931 NR Description: RIKEN cDNA 2610028L19 [Mus musculus]
  misc_feature (39)..(159): NCBI GI NO: 24647897 NR Description: CG31237-PA [Drosophila melanogaster]
IAIRNSQPHSPSPGRKHHQLPGMSGEEEENAAELKIGEEFLKAKCLMNCEVAIILEHKYEQIQQHASSESDPSSQVSQVFEKSLQYVKRFSRYKNPDAVRQVRETLSRYGLAEFELCTLGNLCPDTSGEATALVPSLKSGGRFVGDPGDEKIEKMLNDLSLIKKFE

SEQ ID NO: 33530 - protein, 144 aa, Zea mays subsp. mays
  peptide (1)..(144): Ceres Seq. ID no. 12403785
  misc_feature (19)..(143): Pfam Name: Pfam Description:  RNA polymerase Rpb4
  misc_feature (1)..(144): NCBI GI NO: 15242547 NR Description: 15
  misc_feature (2)..(144): NCBI GI NO: 4758574 NR Description: DNA directed RNA polymerase II polypeptide D
  misc_feature (2)..(144): NCBI GI NO: 34878674 NR Description: similar to RIKEN cDNA 2610028L19
  misc_feature (3)..(144): NCBI GI NO: 17533967 NR Description: RNA polymerase Rpb4 family member
  misc_feature (3)..(144): NCBI GI NO: 39582357 NR Description: Hypothetical protein CBG13151
  misc_feature (3)..(117): NCBI GI NO: 7503310 NR Description: hypothetical protein F43E2
  misc_feature (6)..(137): NCBI GI NO: 27263229 NR Description: RNA polymerase II accessory factor rpb4
  misc_feature (31)..(144): NCBI GI NO: 28076931 NR Description: RIKEN cDNA 2610028L19 [Mus musculus]
  misc_feature (17)..(137): NCBI GI NO: 24647897 NR Description: CG31237-PA [Drosophila melanogaster]
MSGEEEENAAELKIGEEFLKAKCLMNCEVAIILEHKYEQIQQHASSESDPSSQVSQVFEKSLQYVKRFSRYKNPDAVRQVRETLSRYGLAEFELCTLGNLCPDTSGEATALVPSLKSGGRFVGDPGDEKIEKMLNDLSLIKKFE

SEQ ID NO: 33531 - DNA, 1439 bp, Zea mays subsp. mays
  misc_feature (1)..(1439): Ceres Seq. ID no. 12411752
gatcaagaactgctgctcatgtgcgcagcgcgaggctcgagccgccaaagcagggaagcagagagcaagctaataagcaaccgcgtttcccagattccttggcactgcagcagctgcgtccaagcttgctaggtggtggcggcagcagcagcctgcgcctatgtacactgcaatggcagcgcgaccgctgcttcttccccctccggtcctcctcctcctggtggtgctggctgcttcgtcggccgcccatggctatggcgcctacggctacggcgacgctgctgctgagctcagggtcgggttctacaaggactcgtgcccggacgccgaggccgtcgtccgcaggatcgtcgccaaggccgtccgcgaggaccccacggccaacgcgccgctgctcaggctccacttccacgactgcttcgtccggggctgcgacggctccgtgctcgtcaactccaccagggggaacacggcggagaaggacgccaagcccaaccacacgctggacgccttcgacgtcatcgacgacatcaaggaggcgctggagaagcgctgcccggggaccgtctcctgcgccgacatccttgccatcgccgccagggacgccgtctcgctggccaccaaggtggtgaccaagggcggctggagcagggacggcaacctctaccaggtggagaccggcaggcgggacggccgcgtgtccagagccaaggaggcggtcaagaacttgccggactccatggatggcatccgcaagctcatcaggaggttcgcttccaagaacctcagcgtcaaggatctcgctgttctctcaggcgcccacgcgatcggcaaatcgcactgcccgtcgatcgccaagcggctgcgcaacttcacggcgcaccgggacagcgacccgaccctggacgccgcgtacgcggcggagctgaggcggcagtgccggagccgcagggacaacacgacggagctggagatggtgccggggggctccaccgcgttcggcacggcctactacggcctggtcgcggagcggagggcgctcttccactccgacgaggcgctgctcaggaacggggagaccagggcgctcgtctaccgctacagggacgcgccgtcggaggcggcgttccttgcggacttcggagcgtccatgctcaacatgggcagggtgggcgtgctcaccggcgcccagggggagatcaggaagaggtgcgcctttgtcaactagctagcgatgctgtgttgtactttgtaccctctcgccttaattaaaatttaaatgctggagtttcacctagtctcgagagaatcttccatttttactcctacatagatttaggaacgtttctaggtttcatatgattgtgaaacgtttgggctgagctcatctgtaactgtaaactctgatggaatgcgataacgtgttccatattgtgtgc

SEQ ID NO: 33532 - protein, 355 aa, Zea mays subsp. mays
  peptide (1)..(355): Ceres Seq. ID no. 12411753
  misc_feature (60)..(314): Pfam Name: Pfam Description:  Peroxidase
  misc_feature (5)..(355): NCBI GI NO: 14702035 NR Description: putative peroxidase
  misc_feature (18)..(355): NCBI GI NO: 27261041 NR Description: putative peroxidase
  misc_feature (40)..(355): NCBI GI NO: 585661 NR Description: Peroxidase 1 precursor
  misc_feature (44)..(355): NCBI GI NO: 15232058 NR Description: peroxidase, putative; protein id: At3g01190
  misc_feature (44)..(355): NCBI GI NO: 15242237 NR Description: peroxidase, putative; protein id: At5g15180
  misc_feature (42)..(355): NCBI GI NO: 1546692 NR Description: peroxidase; peroxidase ATP19a
  misc_feature (42)..(355): NCBI GI NO: 15237128 NR Description: peroxidase, putative; protein id: At4g11290.1
  misc_feature (42)..(355): NCBI GI NO: 34915480 NR Description: putative peroxidase
  misc_feature (38)..(355): NCBI GI NO: 15220463 NR Description: peroxidase, putative; protein id: At1g05260
  misc_feature (38)..(355): NCBI GI NO: 21536908 NR Description: putative peroxidase [Arabidopsis thaliana]
MYTAMAARPLLLPPPVLLLLVVLAASSAAHGYGAYGYGDAAAELRVGFYKDSCPDAEAVVRRIVAKAVREDPTANAPLLRLHFHDCFVRGCDGSVLVNSTRGNTAEKDAKPNHTLDAFDVIDDIKEALEKRCPGTVSCADILAIAARDAVSLATKVVTKGGWSRDGNLYQVETGRRDGRVSRAKEAVKNLPDSMDGIRKLIRRFASKNLSVKDLAVLSGAHAIGKSHCPSIAKRLRNFTAHRDSDPTLDAAYAAELRRQCRSRRDNTTELEMVPGGSTAFGTAYYGLVAERRALFHSDEALLRNGETRALVYRYRDAPSEAAFLADFGASMLNMGRVGVLTGAQGEIRKRCAFVN

SEQ ID NO: 33533 - protein, 351 aa, Zea mays subsp. mays
  peptide (1)..(351): Ceres Seq. ID no. 12411754
  misc_feature (56)..(310): Pfam Name: Pfam Description:  Peroxidase
  misc_feature (1)..(351): NCBI GI NO: 14702035 NR Description: putative peroxidase
  misc_feature (14)..(351): NCBI GI NO: 27261041 NR Description: putative peroxidase
  misc_feature (36)..(351): NCBI GI NO: 585661 NR Description: Peroxidase 1 precursor
  misc_feature (40)..(351): NCBI GI NO: 15232058 NR Description: peroxidase, putative; protein id: At3g01190
  misc_feature (40)..(351): NCBI GI NO: 15242237 NR Description: peroxidase, putative; protein id: At5g15180
  misc_feature (38)..(351): NCBI GI NO: 1546692 NR Description: peroxidase; peroxidase ATP19a
  misc_feature (38)..(351): NCBI GI NO: 15237128 NR Description: peroxidase, putative; protein id: At4g11290.1
  misc_feature (38)..(351): NCBI GI NO: 34915480 NR Description: putative peroxidase
  misc_feature (34)..(351): NCBI GI NO: 15220463 NR Description: peroxidase, putative; protein id: At1g05260
  misc_feature (34)..(351): NCBI GI NO: 21536908 NR Description: putative peroxidase [Arabidopsis thaliana]
MAARPLLLPPPVLLLLVVLAASSAAHGYGAYGYGDAAAELRVGFYKDSCPDAEAVVRRIVAKAVREDPTANAPLLRLHFHDCFVRGCDGSVLVNSTRGNTAEKDAKPNHTLDAFDVIDDIKEALEKRCPGTVSCADILAIAARDAVSLATKVVTKGGWSRDGNLYQVETGRRDGRVSRAKEAVKNLPDSMDGIRKLIRRFASKNLSVKDLAVLSGAHAIGKSHCPSIAKRLRNFTAHRDSDPTLDAAYAAELRRQCRSRRDNTTELEMVPGGSTAFGTAYYGLVAERRALFHSDEALLRNGETRALVYRYRDAPSEAAFLADFGASMLNMGRVGVLTGAQGEIRKRCAFVN

SEQ ID NO: 33534 - protein, 209 aa, Zea mays subsp. mays
  peptide (1)..(209): Ceres Seq. ID no. 12411755
  misc_feature (81)..(209): Pfam Name: BLLF1 Pfam Description: Herpes virus major outer envelope glycoprotein
  misc_feature (79)..(209): NCBI GI NO: 5821151 NR Description: RNA binding protein [Homo sapiens]
  misc_feature (82)..(209): NCBI GI NO: 28574039 NR Description: Salivary gland secretion 1 CG3047-PA
  misc_feature (82)..(209): NCBI GI NO: 28574039 NR Description: Salivary gland secretion 1 CG3047-PA
  misc_feature (79)..(209): NCBI GI NO: 6634015 NR Description: KIAA0324 protein [Homo sapiens]
  misc_feature (79)..(209): NCBI GI NO: 7512967 NR Description: hypothetical protein KIAA0324 - human (fragment)
  misc_feature (79)..(209): NCBI GI NO: 6649242 NR Description: splicing coactivator subunit SRm300 [Homo sapiens]
  misc_feature (82)..(209): NCBI GI NO: 28574039 NR Description: Salivary gland secretion 1 CG3047-PA
  misc_feature (79)..(209): NCBI GI NO: 19923466 NR Description: splicing coactivator subunit SRm300
  misc_feature (82)..(209): NCBI GI NO: 28574039 NR Description: Salivary gland secretion 1 CG3047-PA
  misc_feature (82)..(209): NCBI GI NO: 28574039 NR Description: Salivary gland secretion 1 CG3047-PA
SRTAAHVRSARLEPPKQGSREQANKQPRFPDSLALQQLRPSLLGGGGSSSLRLCTLQWQRDRCFFPLRSSSSWWCWLLRRPPMAMAPTATATLLLSSGSGSTRTRARTPRPSSAGSSPRPSARTPRPTRRCSGSTSTTASSGAATAPCSSTPPGGTRRRRTPSPTTRWTPSTSSTTSRRRWRSAARGPSPAPTSLPSPPGTPSRWPPRW

SEQ ID NO: 33535 - DNA, 1400 bp, Zea mays subsp. mays
  misc_feature (1)..(1400): Ceres Seq. ID no. 12411748
atcctatgatatgagccaaagctccgaactccatcccagttcttctccacctcgtcctcctcctgctcctgcattctcgcccgtcccccaaattcacctcggccaccctccaccacctcgtcggcgcgggcagcagttcgcctcatcgtcctcccacctgacgacgtcgcggttcgcgctctcgcggcgtgccgcgcacccattcctcgcccacgtctccccgagttccacgccttctgtgccacgcgccacccggagccactgtttgccgcgccctccgcatctctgacctctacatctccatccgcggaagcagaccacctcgaatccttctctttcacgcagtcattgcttgcctccttagcccaactgttggtaccagaggttcatgtttcatcataaggaatgaacagtagtcgacaaatggaactccactacataaacactggatttccatacacaatcaccgagagcttcatggatttctttgagggtctcacttatgctcatgctgactttgctctcacggatggctttcaggatcagggtaatccatactgggcaatgatgcatacaaactcgtacaaatatggatactctggtcctgggaactattacagttatgctgatgtctatgacatagacgattacatgcatagagccaatggtgagcgcagaatatgggataacactacacctgtaaacaatgtcgattctgccaatgttgtcctgcagggtggtgaagctccccgcacaacggcaaatactattaacaaggaatgcatccaacaggtacaccaaagtccaggtagtcctcaggttgtttggcaagataacattgagcctgataatatgacatatgaggaactgttggatttgggtgaggcagttggaacccagagccgtggtctctcccaagaacgcatttcatcgcttcctgtcacgaagtataagtgtggttttttttcaaggaagaaaacatgccgtgagaggtgtgtgatttgccaaatggagtacaggagaggaaatttgcagatgacacttccatgcaagcatgtataccatgccagctgcgtgacaagatggcttggcataaacaaggtatgccctgtttgctttgctgaagttcctggcgaggatcctgaggcaatgagtcaacagttatgaggccactgggaagttgttgcactttgaagctgagtactgcccccaatgaacgcatgatgtttgcttgaaggcagcttattgtccccactttataattgtgtattagcaccgtattaccaaatataggttattgttagatcagatgtatttagtgtttggttcagcgttttgtaacgtaatcaaatcaggaacagagagataccgttacttgcgtttggttgaacgaggcccat

SEQ ID NO: 33536 - protein, 253 aa, Zea mays subsp. mays
  peptide (1)..(253): Ceres Seq. ID no. 12411749
  misc_feature (197)..(237): Pfam Name: RING finger Pfam Description: Zinc finger, C3HC4 type
  misc_feature (1)..(244): NCBI GI NO: 22331928 NR Description: putative protein; protein id: At3g63530.1
  misc_feature (5)..(243): NCBI GI NO: 38567912 NR Description: OSJNBa0088I22.8
  misc_feature (119)..(241): NCBI GI NO: 18402411 NR Description: expressed protein; protein id: At3g19910
  misc_feature (119)..(241): NCBI GI NO: 21536693 NR Description: unknown [Arabidopsis thaliana]
  misc_feature (121)..(241): NCBI GI NO: 10334499 NR Description: hypothetical protein [Cicer arietinum]
  misc_feature (2)..(243): NCBI GI NO: 34898016 NR Description: ESTs C26000
  misc_feature (142)..(240): NCBI GI NO: 15232746 NR Description: zinc-finger protein-like protein
  misc_feature (145)..(237): NCBI GI NO: 11358785 NR Description: RING-H2 finger protein RHG1a
  misc_feature (145)..(237): NCBI GI NO: 10129643 NR Description: Pspzf zinc finger protein-like
  misc_feature (148)..(245): NCBI GI NO: 1076498 NR Description: RING finger protein Pzf - soybean (fragment)
MNSSRQMELHYINTGFPYTITESFMDFFEGLTYAHADFALTDGFQDQGNPYWAMMHTNSYKYGYSGPGNYYSYADVYDIDDYMHRANGERRIWDNTTPVNNVDSANVVLQGGEAPRTTANTINKECIQQVHQSPGSPQVVWQDNIEPDNMTYEELLDLGEAVGTQSRGLSQERISSLPVTKYKCGFFSRKKTCRERCVICQMEYRRGNLQMTLPCKHVYHASCVTRWLGINKVCPVCFAEVPGEDPEAMSQQL

SEQ ID NO: 33537 - protein, 247 aa, Zea mays subsp. mays
  peptide (1)..(247): Ceres Seq. ID no. 12411750
  misc_feature (191)..(231): Pfam Name: RING finger Pfam Description: Zinc finger, C3HC4 type
  misc_feature (1)..(238): NCBI GI NO: 22331928 NR Description: putative protein; protein id: At3g63530.1
  misc_feature (1)..(237): NCBI GI NO: 38567912 NR Description: OSJNBa0088I22.8
  misc_feature (113)..(235): NCBI GI NO: 18402411 NR Description: expressed protein; protein id: At3g19910
  misc_feature (113)..(235): NCBI GI NO: 21536693 NR Description: unknown [Arabidopsis thaliana]
  misc_feature (115)..(235): NCBI GI NO: 10334499 NR Description: hypothetical protein [Cicer arietinum]
  misc_feature (1)..(237): NCBI GI NO: 34898016 NR Description: ESTs C26000
  misc_feature (136)..(234): NCBI GI NO: 15232746 NR Description: zinc-finger protein-like protein
  misc_feature (139)..(231): NCBI GI NO: 11358785 NR Description: RING-H2 finger protein RHG1a
  misc_feature (139)..(231): NCBI GI NO: 10129643 NR Description: Pspzf zinc finger protein-like
  misc_feature (142)..(239): NCBI GI NO: 1076498 NR Description: RING finger protein Pzf - soybean (fragment)
MELHYINTGFPYTITESFMDFFEGLTYAHADFALTDGFQDQGNPYWAMMHTNSYKYGYSGPGNYYSYADVYDIDDYMHRANGERRIWDNTTPVNNVDSANVVLQGGEAPRTTANTINKECIQQVHQSPGSPQVVWQDNIEPDNMTYEELLDLGEAVGTQSRGLSQERISSLPVTKYKCGFFSRKKTCRERCVICQMEYRRGNLQMTLPCKHVYHASCVTRWLGINKVCPVCFAEVPGEDPEAMSQQL

SEQ ID NO: 33538 - protein, 229 aa, Zea mays subsp. mays
  peptide (1)..(229): Ceres Seq. ID no. 12411751
  misc_feature (173)..(213): Pfam Name: RING finger Pfam Description: Zinc finger, C3HC4 type
  misc_feature (1)..(220): NCBI GI NO: 22331928 NR Description: putative protein; protein id: At3g63530.1
  misc_feature (1)..(219): NCBI GI NO: 38567912 NR Description: OSJNBa0088I22.8
  misc_feature (95)..(217): NCBI GI NO: 18402411 NR Description: expressed protein; protein id: At3g19910
  misc_feature (95)..(217): NCBI GI NO: 21536693 NR Description: unknown [Arabidopsis thaliana]
  misc_feature (97)..(217): NCBI GI NO: 10334499 NR Description: hypothetical protein [Cicer arietinum]
  misc_feature (1)..(219): NCBI GI NO: 34898016 NR Description: ESTs C26000
  misc_feature (118)..(216): NCBI GI NO: 15232746 NR Description: zinc-finger protein-like protein
  misc_feature (121)..(213): NCBI GI NO: 11358785 NR Description: RING-H2 finger protein RHG1a
  misc_feature (121)..(213): NCBI GI NO: 10129643 NR Description: Pspzf zinc finger protein-like
  misc_feature (124)..(221): NCBI GI NO: 1076498 NR Description: RING finger protein Pzf - soybean (fragment)
MDFFEGLTYAHADFALTDGFQDQGNPYWAMMHTNSYKYGYSGPGNYYSYADVYDIDDYMHRANGERRIWDNTTPVNNVDSANVVLQGGEAPRTTANTINKECIQQVHQSPGSPQVVWQDNIEPDNMTYEELLDLGEAVGTQSRGLSQERISSLPVTKYKCGFFSRKKTCRERCVICQMEYRRGNLQMTLPCKHVYHASCVTRWLGINKVCPVCFAEVPGEDPEAMSQQL

SEQ ID NO: 33539 - DNA, 1558 bp, Zea mays subsp. mays
  misc_feature (1)..(1558): Ceres Seq. ID no. 12343899
aagcaaccggggccgagagagacgagatgaggcctgcctcttctccctccgtcacacgcgagacggagacgcgtctgaagctgaggcctgtataaaagcgctaaagatccctcgctctcttcccccccgtgcgctgtgtcccgtctctgcagcaagttctgtcttcgtccatccatccgtccccgtctcactgcctgtggcccgtgggtagcggttgtcgatcagcttacccacgccggcgtgttctccctgacatggtcggccggatggagcggcagaccgcgtcgtcgtcagcgtcatgctcccccgccgccgccgccaccacctcctcctcgtcctgcggcggcaagaagcggcctgatatcctcaacatgatccggaatgcatcctgtcttaattcgtcgtctgctgataccggcaagggaaggagtaaattgtcgaccaacaaagttacacatggattccacctggtggaaggcaagtccggccatgacatggaagactaccatgtggcagagtacaagtatgtgaagaatcatgagcttggtctctttgccatttttgatggccatttaggagataaggtgccaagttacttgaaagctaacctttttagcaacataatgaaagagcctctcttctggtctagccctcaagaagcaataaagaatgcatactgctctacaaacaagtatattctagaaaataccaaacaacttggaccaggtggttcgacagcagttactgctattgtagttgatggtaaggacatgtggatagcaaatgtaggcgactctagagctgttgtgtgtgaaagaggctctgctaagcagctcactgttgaccatgagccccatgaaactaatgaaagacagaggattgaaaagcacggtggctttgtgacgacatttcctggtgatgttcctcgggtgaatggtcagctcgctgttgctagggcatttggtgaccaaagcctcaaggcccacttgagctctgaacctgatattagtcatgtaccaataaactcaagtatagagtttgtcatacttgccagtgatggattgtggaaggtaatgaagaaccaggaagccgtcgatctcgtgaagtcaatcaaggatccacaggcagcagcgaaacgattgaccactgaagcgttggcaaggaagagcaaggatgatatctcttgcattgtcatccgtttccgctgctgagttaccctctctccacggcactgatatccagtcttcacctcatgatttagattgagacaatttgtctttgccgaattttctgatagaatatgctgtacctatcatagctgtcgacaggcctggaactaattagggtagtgaagacttgagagctggttggtgagtgtgtgcagggtgcctattcgcctgtgcatatgttgactctgcatccgttgatccggacttgggcgactgtcaggaccttagtgcttgtgtgcttgtgatggtaatggacctaatggctaatggtggtaagggaacttgttgataccaaatttggttaatttagttttttttcatggctcgcc

SEQ ID NO: 33540 - protein, 318 aa, Zea mays subsp. mays
  peptide (1)..(318): Ceres Seq. ID no. 12343900
  misc_feature (47)..(309): Pfam Name: Pfam Description:  Protein phosphatase 2C
  misc_feature (5)..(318): NCBI GI NO: 32488822 NR Description: OSJNBa0085I10.2
  misc_feature (81)..(318): NCBI GI NO: 38567903 NR Description: OSJNBa0060N03.23
  misc_feature (36)..(316): NCBI GI NO: 18417190 NR Description: protein phosphatase 2C
  misc_feature (48)..(318): NCBI GI NO: 23307574 NR Description: putative protein phosphatase 2C homolog
  misc_feature (36)..(317): NCBI GI NO: 4336436 NR Description: protein phosphatase type 2C [Lotus japonicus]
  misc_feature (36)..(317): NCBI GI NO: 18399423 NR Description: protein phosphatase 2C
  misc_feature (48)..(317): NCBI GI NO: 15232538 NR Description: protein phosphatase 2C
  misc_feature (48)..(317): NCBI GI NO: 21539551 NR Description: putative protein phosphatase type 2C
  misc_feature (50)..(317): NCBI GI NO: 18395099 NR Description: protein phosphatase 2C
  misc_feature (36)..(317): NCBI GI NO: 25411985 NR Description: probable protein phosphatase 2C
MVGRMERQTASSSASCSPAAAATTSSSSCGGKKRPDILNMIRNASCLNSSSADTGKGRSKLSTNKVTHGFHLVEGKSGHDMEDYHVAEYKYVKNHELGLFAIFDGHLGDKVPSYLKANLFSNIMKEPLFWSSPQEAIKNAYCSTNKYILENTKQLGPGGSTAVTAIVVDGKDMWIANVGDSRAVVCERGSAKQLTVDHEPHETNERQRIEKHGGFVTTFPGDVPRVNGQLAVARAFGDQSLKAHLSSEPDISHVPINSSIEFVILASDGLWKVMKNQEAVDLVKSIKDPQAAAKRLTTEALARKSKDDISCIVIRFRC

SEQ ID NO: 33541 - protein, 314 aa, Zea mays subsp. mays
  peptide (1)..(314): Ceres Seq. ID no. 12343901
  misc_feature (43)..(305): Pfam Name: Pfam Description:  Protein phosphatase 2C
  misc_feature (1)..(314): NCBI GI NO: 32488822 NR Description: OSJNBa0085I10.2
  misc_feature (77)..(314): NCBI GI NO: 38567903 NR Description: OSJNBa0060N03.23
  misc_feature (32)..(312): NCBI GI NO: 18417190 NR Description: protein phosphatase 2C
  misc_feature (44)..(314): NCBI GI NO: 23307574 NR Description: putative protein phosphatase 2C homolog
  misc_feature (32)..(313): NCBI GI NO: 4336436 NR Description: protein phosphatase type 2C [Lotus japonicus]
  misc_feature (32)..(313): NCBI GI NO: 18399423 NR Description: protein phosphatase 2C
  misc_feature (44)..(313): NCBI GI NO: 15232538 NR Description: protein phosphatase 2C
  misc_feature (44)..(313): NCBI GI NO: 21539551 NR Description: putative protein phosphatase type 2C
  misc_feature (46)..(313): NCBI GI NO: 18395099 NR Description: protein phosphatase 2C
  misc_feature (32)..(313): NCBI GI NO: 25411985 NR Description: probable protein phosphatase 2C
MERQTASSSASCSPAAAATTSSSSCGGKKRPDILNMIRNASCLNSSSADTGKGRSKLSTNKVTHGFHLVEGKSGHDMEDYHVAEYKYVKNHELGLFAIFDGHLGDKVPSYLKANLFSNIMKEPLFWSSPQEAIKNAYCSTNKYILENTKQLGPGGSTAVTAIVVDGKDMWIANVGDSRAVVCERGSAKQLTVDHEPHETNERQRIEKHGGFVTTFPGDVPRVNGQLAVARAFGDQSLKAHLSSEPDISHVPINSSIEFVILASDGLWKVMKNQEAVDLVKSIKDPQAAAKRLTTEALARKSKDDISCIVIRFRC

SEQ ID NO: 33542 - protein, 279 aa, Zea mays subsp. mays
  peptide (1)..(279): Ceres Seq. ID no. 12343902
  misc_feature (8)..(270): Pfam Name: Pfam Description:  Protein phosphatase 2C
  misc_feature (1)..(279): NCBI GI NO: 32488822 NR Description: OSJNBa0085I10.2
  misc_feature (42)..(279): NCBI GI NO: 38567903 NR Description: OSJNBa0060N03.23
  misc_feature (1)..(277): NCBI GI NO: 18417190 NR Description: protein phosphatase 2C
  misc_feature (9)..(279): NCBI GI NO: 23307574 NR Description: putative protein phosphatase 2C homolog
  misc_feature (1)..(278): NCBI GI NO: 4336436 NR Description: protein phosphatase type 2C [Lotus japonicus]
  misc_feature (1)..(278): NCBI GI NO: 18399423 NR Description: protein phosphatase 2C
  misc_feature (9)..(278): NCBI GI NO: 15232538 NR Description: protein phosphatase 2C
  misc_feature (9)..(278): NCBI GI NO: 21539551 NR Description: putative protein phosphatase type 2C
  misc_feature (11)..(278): NCBI GI NO: 18395099 NR Description: protein phosphatase 2C
  misc_feature (1)..(278): NCBI GI NO: 25411985 NR Description: probable protein phosphatase 2C
MIRNASCLNSSSADTGKGRSKLSTNKVTHGFHLVEGKSGHDMEDYHVAEYKYVKNHELGLFAIFDGHLGDKVPSYLKANLFSNIMKEPLFWSSPQEAIKNAYCSTNKYILENTKQLGPGGSTAVTAIVVDGKDMWIANVGDSRAVVCERGSAKQLTVDHEPHETNERQRIEKHGGFVTTFPGDVPRVNGQLAVARAFGDQSLKAHLSSEPDISHVPINSSIEFVILASDGLWKVMKNQEAVDLVKSIKDPQAAAKRLTTEALARKSKDDISCIVIRFRC

SEQ ID NO: 33543 - DNA, 1164 bp, Zea mays subsp. mays
  misc_feature (1)..(1164): Ceres Seq. ID no. 12411745
tcatttcttaaatttaagatttagagagttgtttagagaactattgaagttgctcttagaggcccttgttgtcttgttgaagagttgaagacaccgcagttccggaaacttctgtagcagctgaaatagtacggacgtgtttgaacatgtacaggatctcgaggccacatctgtaaaacgaccacccctcacgcggaagcggagactggaaatcgggagggagaccggtagacgagaccgccggagatggagccgagatctgcaatctacagatccggcgccttccttctcctcgccgccatccttgcggaggtcgtcatccctgcatccgccatcggagacaagtgcgccgcctgcaaggccgttgctgcggagctagagattggaatttcgagtgagaagccgagaaatcacttggacttgcgcaaccgcttaaattctaaaggccagagggaggggaaggtcattgattatagggtcagtgagcttcgggttgtggaacttctggatggcctatgcgataagatgcaagattataccttaaagaagttggaatcaggcgaaaagggatgggttaaagtaacagactggaatagctttcaaactgaaaataaggcagcagcaagagctcactccaaaaaattgtccaccttctgtggaaggctactggaggaaacggaggatgagctctctgagtggatcaaaacaacctccacagaatcagaatatgtaagcaaggccctttgtgaagatattagcaaacactgccgatctacaagtgctaccatccagattgatgatgagctatgacatgccgggggcaggtcgttgtttcgcaaaaagcaaaacaggcgacaggttggaaaatgttaaagaacacagctctagtagtccctgacaccatttagagagacatgcagctgccaattctgattgtttgtgttgcactcatatttcctgtaaacaaaagcttagactgatctgtagagaaagcaactggacatcaatttttgcataccgatgaactacagtttaaaacggccggttgaattatcatgtcaggggctataggaaatttgaatgcttctattctaaggtcttgttgttgagtactgagtatagtttgatgactgcatgttggtcaatgacagcatcaaagattac

SEQ ID NO: 33544 - protein, 187 aa, Zea mays subsp. mays
  peptide (1)..(187): Ceres Seq. ID no. 12411746
  misc_feature (14)..(186): NCBI GI NO: 18400653 NR Description: expressed protein; protein id: At1g42480
  misc_feature (14)..(186): NCBI GI NO: 21593763 NR Description: unknown [Arabidopsis thaliana]
  misc_feature (123)..(186): NCBI GI NO: 25373216 NR Description: unknown protein [imported] - Arabidopsis thaliana
  misc_feature (14)..(73): NCBI GI NO: 25373216 NR Description: unknown protein [imported] - Arabidopsis thaliana
  misc_feature (82)..(117): NCBI GI NO: 25373216 NR Description: unknown protein [imported] - Arabidopsis thaliana
MEPRSAIYRSGAFLLLAAILAEVVIPASAIGDKCAACKAVAAELEIGISSEKPRNHLDLRNRLNSKGQREGKVIDYRVSELRVVELLDGLCDKMQDYTLKKLESGEKGWVKVTDWNSFQTENKAAARAHSKKLSTFCGRLLEETEDELSEWIKTTSTESEYVSKALCEDISKHCRSTSATIQIDDEL

SEQ ID NO: 33545 - protein, 94 aa, Zea mays subsp. mays
  peptide (1)..(94): Ceres Seq. ID no. 12411747
  misc_feature (1)..(93): NCBI GI NO: 18400653 NR Description: expressed protein; protein id: At1g42480
  misc_feature (1)..(93): NCBI GI NO: 21593763 NR Description: unknown [Arabidopsis thaliana]
  misc_feature (30)..(93): NCBI GI NO: 25373216 NR Description: unknown protein [imported] - Arabidopsis thaliana
  misc_feature (1)..(24): NCBI GI NO: 25373216 NR Description: unknown protein [imported] - Arabidopsis thaliana
MQDYTLKKLESGEKGWVKVTDWNSFQTENKAAARAHSKKLSTFCGRLLEETEDELSEWIKTTSTESEYVSKALCEDISKHCRSTSATIQIDDEL

SEQ ID NO: 33546 - DNA, 1085 bp, Zea mays subsp. mays
  misc_feature (1)..(1085): Ceres Seq. ID no. 12340630
aactctctctctctctctctctatctgtctgcccgtggcgtgctccactgattcttcttcttcttctacctcccggcctcctcccccttcttctttgcctgccttattagtatctcgcctcacaccacacagctagcagacagccagacacgcgctgctttctgatctctccccggatcggaggctcctcccaacataccaccctgccagccgcgccgccacgtccacgccggccggccaccaagcaagcatggatatggtttcgcagtccgagcacctgtgctacgtccgctgcacctactgcaacaccgtgctcgcggttggggttccatgcaagaggctgatggacacggtgactgtcaagtgcggccactgcaacaacctctcctacctcagtccacggccccccatggtgcagccgctctcgccgactgatcaccctttggggccattccagtgtcagggaccctgcaacgactgcaggaggaaccaaccgctgccgctggcttcgccgtcatcaactgagctaagcccgagaatgcccttcgtagtcaagcccccggagaagaaacaccgcctcccatctgcttataatcgcttcatgagggaggagattcagcgcatcaaagctgcgaagccagatatccctcacagggaggccttcagcatggctgccaagaattgggcaaagtgtgacccgcgctgctcgacggctgcctctaccgaaacttctaacagcgctcctgctgagcctagagttgtgcccactccccagttaactgagccacgctttgacctggaggatagggccaaggggcaagtcattgagagcttcgacatcttcaagcatattgagcgcagcatctagaggtcgttcgatgccgctgttgtagcccagtatcgatcgagtaccatcagctatatgtataacctatcccgtatcgccgtcgtcgcctcgcaatcatgcatccccatcctgtacttttacccccgtacgtgttactgttgctgttattctcgttatggttggattgtacgcaccatttaattatgaacagctgctacctatatatataatatttgcc

SEQ ID NO: 33547 - protein, 205 aa, Zea mays subsp. mays
  peptide (1)..(205): Ceres Seq. ID no. 12340631
  misc_feature (6)..(155): Pfam Name: Pfam Description:  YABBY protein
  misc_feature (1)..(204): NCBI GI NO: 40362873 NR Description: drooping leaf
  misc_feature (1)..(204): NCBI GI NO: 33333529 NR Description: CRC-related protein [Triticum aestivum]
  misc_feature (1)..(164): NCBI GI NO: 37542843 NR Description: crabs claw
  misc_feature (6)..(162): NCBI GI NO: 15222228 NR Description: transcription factor CRC; protein id: At1g69180
  misc_feature (6)..(162): NCBI GI NO: 21617944 NR Description: transcription factor CRC [Arabidopsis thaliana]
  misc_feature (82)..(146): NCBI GI NO: 32330677 NR Description: yabby15 protein [Zea mays]
  misc_feature (5)..(60): NCBI GI NO: 32330677 NR Description: yabby15 protein [Zea mays]
  misc_feature (1)..(146): NCBI GI NO: 27804377 NR Description: MADS-box transcription factor CDM51
  misc_feature (4)..(146): NCBI GI NO: 30683176 NR Description: expressed protein [Arabidopsis thaliana]
  misc_feature (1)..(146): NCBI GI NO: 4928751 NR Description: YABBY2 [Arabidopsis thaliana]
MDMVSQSEHLCYVRCTYCNTVLAVGVPCKRLMDTVTVKCGHCNNLSYLSPRPPMVQPLSPTDHPLGPFQCQGPCNDCRRNQPLPLASPSSTELSPRMPFVVKPPEKKHRLPSAYNRFMREEIQRIKAAKPDIPHREAFSMAAKNWAKCDPRCSTAASTETSNSAPAEPRVVPTPQLTEPRFDLEDRAKGQVIESFDIFKHIERSI

SEQ ID NO: 33548 - protein, 203 aa, Zea mays subsp. mays
  peptide (1)..(203): Ceres Seq. ID no. 12340632
  misc_feature (4)..(153): Pfam Name: Pfam Description:  YABBY protein
  misc_feature (1)..(202): NCBI GI NO: 40362873 NR Description: drooping leaf
  misc_feature (1)..(202): NCBI GI NO: 33333529 NR Description: CRC-related protein [Triticum aestivum]
  misc_feature (1)..(162): NCBI GI NO: 37542843 NR Description: crabs claw
  misc_feature (4)..(160): NCBI GI NO: 15222228 NR Description: transcription factor CRC; protein id: At1g69180
  misc_feature (4)..(160): NCBI GI NO: 21617944 NR Description: transcription factor CRC [Arabidopsis thaliana]
  misc_feature (80)..(144): NCBI GI NO: 32330677 NR Description: yabby15 protein [Zea mays]
  misc_feature (3)..(58): NCBI GI NO: 32330677 NR Description: yabby15 protein [Zea mays]
  misc_feature (1)..(144): NCBI GI NO: 27804377 NR Description: MADS-box transcription factor CDM51
  misc_feature (2)..(144): NCBI GI NO: 30683176 NR Description: expressed protein [Arabidopsis thaliana]
  misc_feature (1)..(144): NCBI GI NO: 4928751 NR Description: YABBY2 [Arabidopsis thaliana]
MVSQSEHLCYVRCTYCNTVLAVGVPCKRLMDTVTVKCGHCNNLSYLSPRPPMVQPLSPTDHPLGPFQCQGPCNDCRRNQPLPLASPSSTELSPRMPFVVKPPEKKHRLPSAYNRFMREEIQRIKAAKPDIPHREAFSMAAKNWAKCDPRCSTAASTETSNSAPAEPRVVPTPQLTEPRFDLEDRAKGQVIESFDIFKHIERSI

SEQ ID NO: 33549 - protein, 174 aa, Zea mays subsp. mays
  peptide (1)..(174): Ceres Seq. ID no. 12340633
  misc_feature (1)..(124): Pfam Name: Pfam Description:  YABBY protein
  misc_feature (1)..(173): NCBI GI NO: 40362873 NR Description: drooping leaf
  misc_feature (1)..(173): NCBI GI NO: 33333529 NR Description: CRC-related protein [Triticum aestivum]
  misc_feature (1)..(133): NCBI GI NO: 37542843 NR Description: crabs claw
  misc_feature (1)..(131): NCBI GI NO: 15222228 NR Description: transcription factor CRC; protein id: At1g69180
  misc_feature (1)..(131): NCBI GI NO: 21617944 NR Description: transcription factor CRC [Arabidopsis thaliana]
  misc_feature (51)..(115): NCBI GI NO: 32330677 NR Description: yabby15 protein [Zea mays]
  misc_feature (1)..(29): NCBI GI NO: 32330677 NR Description: yabby15 protein [Zea mays]
  misc_feature (1)..(115): NCBI GI NO: 27804377 NR Description: MADS-box transcription factor CDM51
  misc_feature (1)..(115): NCBI GI NO: 30683176 NR Description: expressed protein [Arabidopsis thaliana]
  misc_feature (1)..(115): NCBI GI NO: 4928751 NR Description: YABBY2 [Arabidopsis thaliana]
MDTVTVKCGHCNNLSYLSPRPPMVQPLSPTDHPLGPFQCQGPCNDCRRNQPLPLASPSSTELSPRMPFVVKPPEKKHRLPSAYNRFMREEIQRIKAAKPDIPHREAFSMAAKNWAKCDPRCSTAASTETSNSAPAEPRVVPTPQLTEPRFDLEDRAKGQVIESFDIFKHIERSI

SEQ ID NO: 33550 - DNA, 832 bp, Zea mays subsp. mays; identical to SEQ ID NO: 25705
  misc_feature (1)..(832): Ceres Seq. ID no. 12366950

SEQ ID NO: 33551 - protein, 161 aa, Zea mays subsp. mays; identical to SEQ ID NO: 23397
  peptide (1)..(161): Ceres Seq. ID no. 12366951
  misc_feature (3)..(73): Pfam Name: Pfam Description:  Ribosomal protein L24e
  misc_feature (1)..(161): NCBI GI NO: 1710521 NR Description: 60S RIBOSOMAL PROTEIN L24
  misc_feature (4)..(161): NCBI GI NO: 34900364 NR Description: putative 60S ribosomal protein L24
  misc_feature (1)..(160): NCBI GI NO: 6094040 NR Description: 60S ribosomal protein L24
  misc_feature (1)..(156): NCBI GI NO: 10180025 NR Description: 60S ribosomal protein L24 [Prunus avium]
  misc_feature (1)..(161): NCBI GI NO: 18404176 NR Description: 60S ribosomal protein L24; protein id: At2g36620
  misc_feature (1)..(161): NCBI GI NO: 15231730 NR Description: 60S ribosomal protein - like; protein id:At3g53020
  misc_feature (5)..(161): NCBI GI NO: 25295112 NR Description: 60S ribosomal protein L24
  misc_feature (3)..(150): NCBI GI NO: 19075214 NR Description: 60s ribosomal protein L24
  misc_feature (3)..(150): NCBI GI NO: 19115030 NR Description: 60S ribosomal protein L24
  misc_feature (10)..(154): NCBI GI NO: 40741063 NR Description: conserved hypothetical protein

SEQ ID NO: 33552 - protein, 106 aa, Zea mays subsp. mays; identical to SEQ ID NO: 23398
  peptide (1)..(106): Ceres Seq. ID no. 12366952
  misc_feature (1)..(106): NCBI GI NO: 1710521 NR Description: 60S RIBOSOMAL PROTEIN L24
  misc_feature (1)..(106): NCBI GI NO: 34900364 NR Description: putative 60S ribosomal protein L24
  misc_feature (1)..(105): NCBI GI NO: 6094040 NR Description: 60S ribosomal protein L24
  misc_feature (1)..(101): NCBI GI NO: 10180025 NR Description: 60S ribosomal protein L24 [Prunus avium]
  misc_feature (1)..(106): NCBI GI NO: 18404176 NR Description: 60S ribosomal protein L24; protein id: At2g36620
  misc_feature (1)..(106): NCBI GI NO: 15231730 NR Description: 60S ribosomal protein - like; protein id:At3g53020
  misc_feature (1)..(106): NCBI GI NO: 25295112 NR Description: 60S ribosomal protein L24
  misc_feature (1)..(95): NCBI GI NO: 19075214 NR Description: 60s ribosomal protein L24
  misc_feature (1)..(95): NCBI GI NO: 19115030 NR Description: 60S ribosomal protein L24
  misc_feature (1)..(99): NCBI GI NO: 40741063 NR Description: conserved hypothetical protein

SEQ ID NO: 33553 - DNA, 834 bp, Zea mays subsp. mays
  misc_feature (1)..(834): Ceres Seq. ID no. 12341141
ataacattataacccacgcaactccggggtccgggttctggctcgccaaaccctagccgccgagtgccgcccaccgcccgcccgccctccgccgcgcgtcggacggtgccgagggaagaggcaccatgaggttggagaagtgctggttctgctcctctaccatctaccccggccatggaatccagttcgtccgcaacgacgccaaggtcttccgcttttgccggtcaaagtgccataaaaacttcaagatgaagaggaaccctcgtaaggttaagtggacaaaagcatacaggcatttgcatggcaaggacatgacccaggatacaacctttgagtttgagaggaagaggaacaggcccgagcgctacgaccgcaatttgacggagcagactctgaaggctatcccgcttattgcaaagattaggcatgaccgtatgggaaaacacatctcaaacagacataaacctggtaaacgcaaggagatggaaaaggactccaaggagctggagcaggacatcggcatgctcccgaagaagcttattatcaaccatctcgcggctgagaaaacgaaggtcaaggttgaagttgttcagcagcagacagaagataacgctatggaagagtagtgcgtggcattttgtgtgcttgtgttttcatgtctgatgcagatccttttgtatttgcgtaagaagctatgtagttgatgaaagatgtttatttgatatatatattaatggatggattcgtggactgagtatcagcaagtttgttgttctggaatgtaagcttgctctgcttatgctataattgtcttgtcaggaaagtctcaatcct

SEQ ID NO: 33554 - protein, 166 aa, Zea mays subsp. mays
  peptide (1)..(166): Ceres Seq. ID no. 12341142
  misc_feature (1)..(75): Pfam Name: Pfam Description:  Ribosomal protein L24e
  misc_feature (1)..(166): NCBI GI NO: 27817966 NR Description: putative 60S ribosomal protein L30
  misc_feature (1)..(166): NCBI GI NO: 15225363 NR Description: 60S ribosomal protein L30; protein id: At2g44860
  misc_feature (1)..(67): NCBI GI NO: 34914662 NR Description: putative ribosomal protein
  misc_feature (1)..(166): NCBI GI NO: 38083793 NR Description: similar to ribosomal protein L24-like
  misc_feature (1)..(166): NCBI GI NO: 16740902 NR Description: 60S ribosomal protein L30 isolog [Homo sapiens]
  misc_feature (1)..(166): NCBI GI NO: 10047102 NR Description: ribosomal protein L24-like; my024 protein
  misc_feature (1)..(166): NCBI GI NO: 34864348 NR Description: similar to ribosomal protein L24-like
  misc_feature (1)..(166): NCBI GI NO: 27769143 NR Description: Similar to chromosome 15 open reading frame 15
  misc_feature (1)..(166): NCBI GI NO: 14250160 NR Description: 60S ribosomal protein L30 isolog [Homo sapiens]
  misc_feature (1)..(166): NCBI GI NO: 15779001 NR Description: 60S ribosomal protein L30 isolog [Homo sapiens]
MRLEKCWFCSSTIYPGHGIQFVRNDAKVFRFCRSKCHKNFKMKRNPRKVKWTKAYRHLHGKDMTQDTTFEFERKRNRPERYDRNLTEQTLKAIPLIAKIRHDRMGKHISNRHKPGKRKEMEKDSKELEQDIGMLPKKLIINHLAAEKTKVKVEVVQQQTEDNAMEE

SEQ ID NO: 33555 - protein, 125 aa, Zea mays subsp. mays
  peptide (1)..(125): Ceres Seq. ID no. 12341143
  misc_feature (1)..(125): NCBI GI NO: 27817966 NR Description: putative 60S ribosomal protein L30
  misc_feature (1)..(125): NCBI GI NO: 15225363 NR Description: 60S ribosomal protein L30; protein id: At2g44860
  misc_feature (1)..(26): NCBI GI NO: 34914662 NR Description: putative ribosomal protein
  misc_feature (1)..(125): NCBI GI NO: 38083793 NR Description: similar to ribosomal protein L24-like
  misc_feature (1)..(125): NCBI GI NO: 16740902 NR Description: 60S ribosomal protein L30 isolog [Homo sapiens]
  misc_feature (1)..(125): NCBI GI NO: 10047102 NR Description: ribosomal protein L24-like; my024 protein
  misc_feature (1)..(125): NCBI GI NO: 34864348 NR Description: similar to ribosomal protein L24-like
  misc_feature (1)..(125): NCBI GI NO: 27769143 NR Description: Similar to chromosome 15 open reading frame 15
  misc_feature (1)..(125): NCBI GI NO: 14250160 NR Description: 60S ribosomal protein L30 isolog [Homo sapiens]
  misc_feature (1)..(125): NCBI GI NO: 15779001 NR Description: 60S ribosomal protein L30 isolog [Homo sapiens]
MKRNPRKVKWTKAYRHLHGKDMTQDTTFEFERKRNRPERYDRNLTEQTLKAIPLIAKIRHDRMGKHISNRHKPGKRKEMEKDSKELEQDIGMLPKKLIINHLAAEKTKVKVEVVQQQTEDNAMEE

SEQ ID NO: 33556 - protein, 104 aa, Zea mays subsp. mays
  peptide (1)..(104): Ceres Seq. ID no. 12341144
  misc_feature (1)..(104): NCBI GI NO: 27817966 NR Description: putative 60S ribosomal protein L30
  misc_feature (1)..(104): NCBI GI NO: 15225363 NR Description: 60S ribosomal protein L30; protein id: At2g44860
  misc_feature (1)..(104): NCBI GI NO: 38083793 NR Description: similar to ribosomal protein L24-like
  misc_feature (1)..(104): NCBI GI NO: 16740902 NR Description: 60S ribosomal protein L30 isolog [Homo sapiens]
  misc_feature (1)..(104): NCBI GI NO: 10047102 NR Description: ribosomal protein L24-like; my024 protein
  misc_feature (1)..(104): NCBI GI NO: 34864348 NR Description: similar to ribosomal protein L24-like
  misc_feature (1)..(104): NCBI GI NO: 27769143 NR Description: Similar to chromosome 15 open reading frame 15
  misc_feature (1)..(104): NCBI GI NO: 14250160 NR Description: 60S ribosomal protein L30 isolog [Homo sapiens]
  misc_feature (1)..(104): NCBI GI NO: 15779001 NR Description: 60S ribosomal protein L30 isolog [Homo sapiens]
  misc_feature (1)..(97): NCBI GI NO: 28828084 NR Description: similar to Mus musculus (Mouse)
MTQDTTFEFERKRNRPERYDRNLTEQTLKAIPLIAKIRHDRMGKHISNRHKPGKRKEMEKDSKELEQDIGMLPKKLIINHLAAEKTKVKVEVVQQQTEDNAMEE

SEQ ID NO: 33557 - DNA, 811 bp, Zea mays subsp. mays
  misc_feature (1)..(811): Ceres Seq. ID no. 12383720
gcacgagaccattacctagaacatcctaatcaaaaaaaaccctaggccgccgccgccagtcctcactcctcaccatttcccaaaccctacccgtacccccgccgccgccgccaccgccatgccgcccaagctcgacccgtcgcaggtggtggaggtcttcgtccgggtgacgggcggcgaggtcggcgcggcgtcgtccctggcgcccaagatcggcccgctcgggctctccccgaagaagatcggcgaggacatcgccaaggagacggccaaggactggaagggcctgcgcgtcaccgtcaagctcaccgtccagaaccgccaggccaaggtctccgtcgtcccctccgccgccgcgctcgtcatcaaggcgctcaaggagcccgagagggaccggaagaaggtcaagaacatcaagcacagcggcaacatcggcctcgacgacgtcgtcgagatcgccaggaccatgaggaacaggtccatggccaaggagttggccggcaccgtcaaggagatcctcggcacctgcgtcagcgtcgggtgcaccgtcgacggcaaggaccccaaggacctgcagcaggagattgatgacggagaggtcgagatcccgtccgcttgaagactagccatccaaggggacttccattggtgctgctgaagtgttgttgttctgcatgctatcgatgtacctttttcaagcaacgcgagccatctattttttttgtctagctatgttagtgatatcttgtgagagacctcaatgttaccatcgtatctttgtctttgttggatggagagatttaagcacctc

SEQ ID NO: 33558 - protein, 166 aa, Zea mays subsp. mays
  peptide (1)..(166): Ceres Seq. ID no. 12383721
  misc_feature (76)..(144): Pfam Name: Pfam Description:  Ribosomal protein L11, RNA binding domain
  misc_feature (1)..(166): NCBI GI NO: 38567975 NR Description: OSJNBa0093F12.16
  misc_feature (1)..(164): NCBI GI NO: 40287508 NR Description: 60S ribosomal protein L12 [Capsicum annuum]
  misc_feature (1)..(164): NCBI GI NO: 15228098 NR Description: 60S ribosomal protein L12; protein id: At2g37190
  misc_feature (1)..(164): NCBI GI NO: 6094002 NR Description: 60S RIBOSOMAL PROTEIN L12
  misc_feature (1)..(164): NCBI GI NO: 15231814 NR Description: 60S RIBOSOMAL PROTEIN L12 -like
  misc_feature (1)..(165): NCBI GI NO: 15239409 NR Description: 60S ribosomal protein L12 - like
  misc_feature (1)..(142): NCBI GI NO: 3986695 NR Description: ribosomal protein L12 [Cichorium intybus]
  misc_feature (1)..(164): NCBI GI NO: 19075397 NR Description: 60s ribosomal protein l12
  misc_feature (10)..(166): NCBI GI NO: 1710485 NR Description: 60S RIBOSOMAL PROTEIN L12
  misc_feature (1)..(166): NCBI GI NO: 27371046 NR Description: Similar to ribosomal protein L12 [Xenopus laevis]
MPPKLDPSQVVEVFVRVTGGEVGAASSLAPKIGPLGLSPKKIGEDIAKETAKDWKGLRVTVKLTVQNRQAKVSVVPSAAALVIKALKEPERDRKKVKNIKHSGNIGLDDVVEIARTMRNRSMAKELAGTVKEILGTCVSVGCTVDGKDPKDLQQEIDDGEVEIPSA

SEQ ID NO: 33559 - DNA, 761 bp, Zea mays subsp. mays
  misc_feature (1)..(761): Ceres Seq. ID no. 12402751
aatccgcagtccatacagtgacccccacgaggtcaagaacctgtacgaggagaggaaagaacctggaagagaggagcttgaggagatggcgagcgccgagggcgagaggtgggtgggactggcgacggacttctcgcaggggagccgagaggcgctgcagtgggcggcgaccaacctgctccgcgccggcgaccacctgctgctgctgcacgtcatcaaggagcccgactacgagccagagcgaggccatcctctgggaatccaccggctccccgttgattcccctctcggagttctctgaccctattatcgcgaagaaatatggagcaaaacccgacatggaaaccttggacctcctgaacactacagctacccagaaggaaattatggtggttgtgaaagtcctgtggggagatccgcgtgagaagctctgtcaagttatccatgacaccccgttgagctgcttggttataggaagcaggggccttggcaaactcaagagggtgctcttaggaagtgtcagcgattacgtcgtgaacaacgcaacctgccctgtcaccgttgtcaagtcatcaagcaccgaaggttgatctcatcaccaaaatgcctgaatattgctgttgttataataaaagatggttggcctcatgaagaacatgcactagtttctagctacctgaaacatgttgaaccgggcaatcctattgtaataatagacaaagtgccttatgaagggcatggttatgtaataggtctgttcc

SEQ ID NO: 33560 - protein, 195 aa, Zea mays subsp. mays
  peptide (1)..(195): Ceres Seq. ID no. 12402752
  misc_feature (79)..(189): Pfam Name: Pfam Description:  Universal stress protein family
  misc_feature (79)..(190): NCBI GI NO: 18401345 NR Description: expressed protein; protein id: At3g17020
  misc_feature (79)..(191): NCBI GI NO: 15528707 NR Description: P0583G08.8
  misc_feature (79)..(190): NCBI GI NO: 20160561 NR Description: P0414E03.3
  misc_feature (83)..(191): NCBI GI NO: 30678807 NR Description: expressed protein [Arabidopsis thaliana]
  misc_feature (79)..(191): NCBI GI NO: 30693971 NR Description: expressed protein [Arabidopsis thaliana]
  misc_feature (74)..(193): NCBI GI NO: 11602747 NR Description: early nodulin ENOD18 [Vicia faba]
  misc_feature (74)..(193): NCBI GI NO: 11602751 NR Description: ENOD18 protein [Vicia faba]
  misc_feature (74)..(193): NCBI GI NO: 11602749 NR Description: early nodulin ENOD18 [Vicia faba]
  misc_feature (83)..(167): NCBI GI NO: 18396497 NR Description: expressed protein; protein id: At3g03270
  misc_feature (79)..(130): NCBI GI NO: 21555070 NR Description: unknown [Arabidopsis thaliana]
SAVHTVTPTRSRTCTRRGKNLEERSLRRWRAPRARGGWDWRRTSRRGAERRCSGRRPTCSAPATTCCCCTSSRSPTTSQSEAILWESTGSPLIPLSEFSDPIIAKKYGAKPDMETLDLLNTTATQKEIMVVVKVLWGDPREKLCQVIHDTPLSCLVIGSRGLGKLKRVLLGSVSDYVVNNATCPVTVVKSSSTEG

SEQ ID NO: 33561 - protein, 99 aa, Zea mays subsp. mays
  peptide (1)..(99): Ceres Seq. ID no. 12402753
  misc_feature (29)..(78): NCBI GI NO: 18401345 NR Description: expressed protein; protein id: At3g17020
  misc_feature (34)..(82): NCBI GI NO: 15528707 NR Description: P0583G08.8
  misc_feature (29)..(71): NCBI GI NO: 20160561 NR Description: P0414E03.3
  misc_feature (36)..(71): NCBI GI NO: 30678807 NR Description: expressed protein [Arabidopsis thaliana]
  misc_feature (35)..(72): NCBI GI NO: 30693971 NR Description: expressed protein [Arabidopsis thaliana]
  misc_feature (35)..(71): NCBI GI NO: 11602747 NR Description: early nodulin ENOD18 [Vicia faba]
  misc_feature (35)..(71): NCBI GI NO: 11602751 NR Description: ENOD18 protein [Vicia faba]
  misc_feature (35)..(71): NCBI GI NO: 11602749 NR Description: early nodulin ENOD18 [Vicia faba]
  misc_feature (36)..(71): NCBI GI NO: 18396497 NR Description: expressed protein; protein id: At3g03270
  misc_feature (35)..(72): NCBI GI NO: 21555070 NR Description: unknown [Arabidopsis thaliana]
IRSPYSDPHEVKNLYEERKEPGREELEEMASAEGERWVGLATDFSQGSREALQWAATNLLRAGDHLLLLHVIKEPDYEPERGHPLGIHRLPVDSPLGVL

SEQ ID NO: 33562 - DNA, 1669 bp, Zea mays subsp. mays
  misc_feature (1)..(1669): Ceres Seq. ID no. 12411741
agtagtcactgcctattcttggccatacggcttcccccacaccccaacacaaacaagagaaaaaacaaaaactagacgaaagagggaagaaaccaagaaattggcgaatccctggcgctccccactttcaactcccatccgcttgccgttgccgcgtttgtttatcgagccaatttgatcagggcgccacaccgaaccctagttcttgatttaatcacgggttatgtggtcatgccggccgggtcaccccgttcttcttctcttccacgagttcaggaggtagagtgagagagaaaatggaacgacaggggatggaaggcaacaatcttctgcattttcttgataccccgagcgcccattacagaaggacatgcgacggatttgaggcccaacacggcggcgatgaacactctgagacatcagatactgatccggctaatgcaagggaaatgctggaatatttgttgaaccaaccagcaaacaaaatctgtgcagactgtggctctccagatccaaaatgggtggccctgccttttggcacattcatctgcattaagtgctctggaactcatagaagtcttggtgtgcacatatcaaaggtgatttcagtgaatctggatgagtggacagatgatgaagtcaactgtttagctgaatcaggcggaaattctgttgtgaactcaagatatgaagcctttttacccgaaaacaaaaagctaaaacaagattgctcaacggaggagcgtaatgattttatcaggaaaaaataccagtttcaacagtttgtgtgtgatccacaattttcatgccctttaccacttaacagaaagcatgcaccaccagataaaaatcaccagcagcataatagcagcaagtatggttttggccatacttttaggaatagctggagaaaaaaggattcagatagcaaaagcctaaagaaaatgtcggatgtgggaatgatagaatttgttggattagtaaaggtcaatatcgtaaaaggcacagatttagctgttcgtgatgtgatgtcgagcgatccgtatgtcttgattcatctagggcaccagtccatgaaaacaaaggtgataaagaacacactgaatcctatctggaatgaaagactaatgctttcgatccctgacccaattccgcctcttaagctgcaagtatttgacaaggacacattcagctccgatgaccggatgggggaggccgaggtggacatccggccgctgattgcagcaacgaaggagcacgagaactcgaccatcaccgaatcgacagaactctacagatggtcagccagcgaagacagcaacggtgtgctcgccaaggacagcgtcatctctgttgcgagtggaaaggtcaagcaggagatcacactcaggctccagaatgtcgagcgcggtgaggtcgagatcgagatcgagtgtgtgccgctcagccagtagcagtcccatcgtgagcaggactggaagcagaaagagggaaggaatacatcatgctccattgttgtgacaaggacgctgctttgcaatgcagaaagacctcagcttcacttgtttgattgctccatgcctgtaattcgcgtgcatgtgtgagatgtgtaatgtgttgtacggtagataggcaaagggaaattatctacttatattactttgatgtt

SEQ ID NO: 33563 - protein, 385 aa, Zea mays subsp. mays
  peptide (1)..(385): Ceres Seq. ID no. 12411742
  misc_feature (51)..(171): Pfam Name: Pfam Description:  Putative GTPase activating protein for Arf
  misc_feature (6)..(385): NCBI GI NO: 19386828 NR Description: putative zinc finger and C2 domain protein
  misc_feature (37)..(385): NCBI GI NO: 6648206 NR Description: putative GTPase activating protein
  misc_feature (37)..(385): NCBI GI NO: 30680493 NR Description: zinc finger and C2 domain protein, putative
  misc_feature (46)..(385): NCBI GI NO: 18412932 NR Description: putative protein; protein id: At4g05330
  misc_feature (46)..(385): NCBI GI NO: 21594052 NR Description: putative GTPase activating protein
  misc_feature (46)..(385): NCBI GI NO: 18415638 NR Description: putative protein; protein id: At4g21160
  misc_feature (46)..(385): NCBI GI NO: 25407332 NR Description: hypothetical protein AT4g05330
  misc_feature (81)..(385): NCBI GI NO: 7486586 NR Description: hypothetical protein F7J7
  misc_feature (46)..(78): NCBI GI NO: 7486586 NR Description: hypothetical protein F7J7
  misc_feature (215)..(379): NCBI GI NO: 15223248 NR Description: unknown protein; protein id: At1g70800.1
MERQGMEGNNLLHFLDTPSAHYRRTCDGFEAQHGGDEHSETSDTDPANAREMLEYLLNQPANKICADCGSPDPKWVALPFGTFICIKCSGTHRSLGVHISKVISVNLDEWTDDEVNCLAESGGNSVVNSRYEAFLPENKKLKQDCSTEERNDFIRKKYQFQQFVCDPQFSCPLPLNRKHAPPDKNHQQHNSSKYGFGHTFRNSWRKKDSDSKSLKKMSDVGMIEFVGLVKVNIVKGTDLAVRDVMSSDPYVLIHLGHQSMKTKVIKNTLNPIWNERLMLSIPDPIPPLKLQVFDKDTFSSDDRMGEAEVDIRPLIAATKEHENSTITESTELYRWSASEDSNGVLAKDSVISVASGKVKQEITLRLQNVERGEVEIEIECVPLSQ

SEQ ID NO: 33564 - protein, 380 aa, Zea mays subsp. mays
  peptide (1)..(380): Ceres Seq. ID no. 12411743
  misc_feature (46)..(166): Pfam Name: Pfam Description:  Putative GTPase activating protein for Arf
  misc_feature (1)..(380): NCBI GI NO: 19386828 NR Description: putative zinc finger and C2 domain protein
  misc_feature (32)..(380): NCBI GI NO: 6648206 NR Description: putative GTPase activating protein
  misc_feature (32)..(380): NCBI GI NO: 30680493 NR Description: zinc finger and C2 domain protein, putative
  misc_feature (41)..(380): NCBI GI NO: 18412932 NR Description: putative protein; protein id: At4g05330
  misc_feature (41)..(380): NCBI GI NO: 18415638 NR Description: putative protein; protein id: At4g21160
  misc_feature (41)..(380): NCBI GI NO: 21594052 NR Description: putative GTPase activating protein
  misc_feature (41)..(380): NCBI GI NO: 25407332 NR Description: hypothetical protein AT4g05330
  misc_feature (76)..(380): NCBI GI NO: 7486586 NR Description: hypothetical protein F7J7
  misc_feature (41)..(73): NCBI GI NO: 7486586 NR Description: hypothetical protein F7J7
  misc_feature (210)..(374): NCBI GI NO: 15223248 NR Description: unknown protein; protein id: At1g70800.1
MEGNNLLHFLDTPSAHYRRTCDGFEAQHGGDEHSETSDTDPANAREMLEYLLNQPANKICADCGSPDPKWVALPFGTFICIKCSGTHRSLGVHISKVISVNLDEWTDDEVNCLAESGGNSVVNSRYEAFLPENKKLKQDCSTEERNDFIRKKYQFQQFVCDPQFSCPLPLNRKHAPPDKNHQQHNSSKYGFGHTFRNSWRKKDSDSKSLKKMSDVGMIEFVGLVKVNIVKGTDLAVRDVMSSDPYVLIHLGHQSMKTKVIKNTLNPIWNERLMLSIPDPIPPLKLQVFDKDTFSSDDRMGEAEVDIRPLIAATKEHENSTITESTELYRWSASEDSNGVLAKDSVISVASGKVKQEITLRLQNVERGEVEIEIECVPLSQ

SEQ ID NO: 33565 - protein, 334 aa, Zea mays subsp. mays
  peptide (1)..(334): Ceres Seq. ID no. 12411744
  misc_feature (1)..(120): Pfam Name: Pfam Description:  Putative GTPase activating protein for Arf
  misc_feature (1)..(334): NCBI GI NO: 19386828 NR Description: putative zinc finger and C2 domain protein
  misc_feature (1)..(334): NCBI GI NO: 6648206 NR Description: putative GTPase activating protein
  misc_feature (1)..(334): NCBI GI NO: 30680493 NR Description: zinc finger and C2 domain protein, putative
  misc_feature (1)..(334): NCBI GI NO: 18412932 NR Description: putative protein; protein id: At4g05330
  misc_feature (1)..(334): NCBI GI NO: 18415638 NR Description: putative protein; protein id: At4g21160
  misc_feature (1)..(334): NCBI GI NO: 21594052 NR Description: putative GTPase activating protein
  misc_feature (1)..(334): NCBI GI NO: 25407332 NR Description: hypothetical protein AT4g05330
  misc_feature (30)..(334): NCBI GI NO: 7486586 NR Description: hypothetical protein F7J7
  misc_feature (1)..(27): NCBI GI NO: 7486586 NR Description: hypothetical protein F7J7
  misc_feature (164)..(328): NCBI GI NO: 15223248 NR Description: unknown protein; protein id: At1g70800.1
MLEYLLNQPANKICADCGSPDPKWVALPFGTFICIKCSGTHRSLGVHISKVISVNLDEWTDDEVNCLAESGGNSVVNSRYEAFLPENKKLKQDCSTEERNDFIRKKYQFQQFVCDPQFSCPLPLNRKHAPPDKNHQQHNSSKYGFGHTFRNSWRKKDSDSKSLKKMSDVGMIEFVGLVKVNIVKGTDLAVRDVMSSDPYVLIHLGHQSMKTKVIKNTLNPIWNERLMLSIPDPIPPLKLQVFDKDTFSSDDRMGEAEVDIRPLIAATKEHENSTITESTELYRWSASEDSNGVLAKDSVISVASGKVKQEITLRLQNVERGEVEIEIECVPLSQ

SEQ ID NO: 33566 - DNA, 1509 bp, Zea mays subsp. mays
  misc_feature (1)..(1509): Ceres Seq. ID no. 12435069
agaactctgcaagtccgcatcaattcgcactcccagcttcctttaccttcgcaacaagcaagccggtagcagcaagctagatcgcggggaagcgactcgcctccaccatcggcgctgctccggcgcggagaagcgtcctctcgcggcggctgggaagaccagtctccgccagtcccggcgactgcttccgtgaggtgcccttggctcctgggcgacgggctcgtggcggccggcgagatgaacagccatgcggccggaacaagcaacgggggacccggggatgcggccgctgggggcgcagccaggaggaacaccaggatgcccaagtattccaagttcacacagcaggagttgccagcttgcaagccgattcttactccaaaatgggttgtctctgttttcttcatcgtcggggtcatctttgttcccattggtgttgttttcactgctagctgcgagagatgttgttgagattattgatcggtatgatgaggcatgtgtgccagggcaacatgactgagaacaagcttgcttacatccagaatgacaccttatccaaagagtgcataaggaatcttacggttacaaaggatatgaagcagcctatttttgtgtattatgaacttggtaacttctaccagaaccataggaggtatgtaaagagccgaaacgatgcacagctaagagatgctagtaaagctaaccagacatccgcttgtgaacctgagaagaccacagctaatgggcaaccaattgttccttgcggcctcattgcttggagcttgtttaatgatacatataatttcactcgtggtaatgagaacttgacagtggacaagaaagatatttcctggaagagcgatagggaacataaatttggtaaagatgtctatccgagcaacttccagaatggcgcacttaaaggtggagcaacacttgacccaaagatcccgttgagtgagcaagaggatctcatcgtttggatgcggactgcagcacttcctacattcagaaagttatatgggagaatatacattgacctcaaggagaatgacacaataacagtgacattgaataacaactacaatacatatagcttcggtggcaagaaaaagctggtcctctccactgcaacttggcttggggggaagaacgattttcttggctttgcataccttatagttggcgggctctgcattttcctggcatttgcattcaccttgctgtacttcgtaaaaccaaggaaactgggagaccacaactacttatcctggaacagacgccatgcaggacgctaagatgttttggaaccccaagtgtcctaactacttaagtgcaacttgtatgaaatgaaatgccctgaaccagaaatctcgttgggcagactggatcagactagaacttcatgtacattttttttacaaagggtctaggtggctacgtgattttgtttcttgtgttctatagagctgcatgtagcagtgattatgagaatacatattgatctcg

SEQ ID NO: 33567 - protein, 278 aa, Zea mays subsp. mays
  peptide (1)..(278): Ceres Seq. ID no. 12435070
  misc_feature (21)..(265): Pfam Name: ligand-effect modulator 3 Pfam Description: LEM3
  misc_feature (21)..(278): NCBI GI NO: 18404877 NR Description: membrane protein common family
  misc_feature (21)..(278): NCBI GI NO: 18399730 NR Description: membrane protein common family
  misc_feature (21)..(277): NCBI GI NO: 18412377 NR Description: membrane protein common family
  misc_feature (20)..(277): NCBI GI NO: 25347303 NR Description: protein F3O9.16 [imported] - Arabidopsis thaliana
  misc_feature (21)..(277): NCBI GI NO: 25347301 NR Description: T8K14.13 [imported] - Arabidopsis thaliana
  misc_feature (20)..(277): NCBI GI NO: 15219220 NR Description: membrane protein common family
  misc_feature (21)..(274): NCBI GI NO: 18422638 NR Description: membrane protein common family
  misc_feature (21)..(274): NCBI GI NO: 21554054 NR Description: unknown [Arabidopsis thaliana]
  misc_feature (21)..(261): NCBI GI NO: 9757735 NR Description: gb|AAD25612
  misc_feature (20)..(270): NCBI GI NO: 19570056 NR Description: similar to membrane protein common family
MLLRLLIGMMRHVCQGNMTENKLAYIQNDTLSKECIRNLTVTKDMKQPIFVYYELGNFYQNHRRYVKSRNDAQLRDASKANQTSACEPEKTTANGQPIVPCGLIAWSLFNDTYNFTRGNENLTVDKKDISWKSDREHKFGKDVYPSNFQNGALKGGATLDPKIPLSEQEDLIVWMRTAALPTFRKLYGRIYIDLKENDTITVTLNNNYNTYSFGGKKKLVLSTATWLGGKNDFLGFAYLIVGGLCIFLAFAFTLLYFVKPRKLGDHNYLSWNRRHAGR

SEQ ID NO: 33568 - protein, 270 aa, Zea mays subsp. mays
  peptide (1)..(270): Ceres Seq. ID no. 12435071
  misc_feature (13)..(257): Pfam Name: ligand-effect modulator 3 Pfam Description: LEM3
  misc_feature (13)..(270): NCBI GI NO: 18404877 NR Description: membrane protein common family
  misc_feature (13)..(270): NCBI GI NO: 18399730 NR Description: membrane protein common family
  misc_feature (13)..(269): NCBI GI NO: 18412377 NR Description: membrane protein common family
  misc_feature (12)..(269): NCBI GI NO: 25347303 NR Description: protein F3O9.16 [imported] - Arabidopsis thaliana
  misc_feature (13)..(269): NCBI GI NO: 25347301 NR Description: T8K14.13 [imported] - Arabidopsis thaliana
  misc_feature (12)..(269): NCBI GI NO: 15219220 NR Description: membrane protein common family
  misc_feature (13)..(266): NCBI GI NO: 18422638 NR Description: membrane protein common family
  misc_feature (13)..(266): NCBI GI NO: 21554054 NR Description: unknown [Arabidopsis thaliana]
  misc_feature (13)..(253): NCBI GI NO: 9757735 NR Description: gb|AAD25612
  misc_feature (12)..(262): NCBI GI NO: 19570056 NR Description: similar to membrane protein common family
MMRHVCQGNMTENKLAYIQNDTLSKECIRNLTVTKDMKQPIFVYYELGNFYQNHRRYVKSRNDAQLRDASKANQTSACEPEKTTANGQPIVPCGLIAWSLFNDTYNFTRGNENLTVDKKDISWKSDREHKFGKDVYPSNFQNGALKGGATLDPKIPLSEQEDLIVWMRTAALPTFRKLYGRIYIDLKENDTITVTLNNNYNTYSFGGKKKLVLSTATWLGGKNDFLGFAYLIVGGLCIFLAFAFTLLYFVKPRKLGDHNYLSWNRRHAGR

SEQ ID NO: 33569 - protein, 269 aa, Zea mays subsp. mays
  peptide (1)..(269): Ceres Seq. ID no. 12435072
  misc_feature (12)..(256): Pfam Name: ligand-effect modulator 3 Pfam Description: LEM3
  misc_feature (12)..(269): NCBI GI NO: 18404877 NR Description: membrane protein common family
  misc_feature (12)..(269): NCBI GI NO: 18399730 NR Description: membrane protein common family
  misc_feature (12)..(268): NCBI GI NO: 18412377 NR Description: membrane protein common family
  misc_feature (11)..(268): NCBI GI NO: 25347303 NR Description: protein F3O9.16 [imported] - Arabidopsis thaliana
  misc_feature (12)..(268): NCBI GI NO: 25347301 NR Description: T8K14.13 [imported] - Arabidopsis thaliana
  misc_feature (11)..(268): NCBI GI NO: 15219220 NR Description: membrane protein common family
  misc_feature (12)..(265): NCBI GI NO: 18422638 NR Description: membrane protein common family
  misc_feature (12)..(265): NCBI GI NO: 21554054 NR Description: unknown [Arabidopsis thaliana]
  misc_feature (12)..(252): NCBI GI NO: 9757735 NR Description: gb|AAD25612
  misc_feature (11)..(261): NCBI GI NO: 19570056 NR Description: similar to membrane protein common family
MRHVCQGNMTENKLAYIQNDTLSKECIRNLTVTKDMKQPIFVYYELGNFYQNHRRYVKSRNDAQLRDASKANQTSACEPEKTTANGQPIVPCGLIAWSLFNDTYNFTRGNENLTVDKKDISWKSDREHKFGKDVYPSNFQNGALKGGATLDPKIPLSEQEDLIVWMRTAALPTFRKLYGRIYIDLKENDTITVTLNNNYNTYSFGGKKKLVLSTATWLGGKNDFLGFAYLIVGGLCIFLAFAFTLLYFVKPRKLGDHNYLSWNRRHAGR

SEQ ID NO: 33570 - DNA, 796 bp, Zea mays subsp. mays; identical to SEQ ID NO: 29579
  misc_feature (1)..(796): Ceres Seq. ID no. 12595084

SEQ ID NO: 33571 - protein, 140 aa, Zea mays subsp. mays; identical to SEQ ID NO: 29580
  peptide (1)..(140): Ceres Seq. ID no. 12595085

SEQ ID NO: 33572 - protein, 128 aa, Zea mays subsp. mays; identical to SEQ ID NO: 29581
  peptide (1)..(128): Ceres Seq. ID no. 12595086
  misc_feature (42)..(113): Pfam Name: Pfam Description:  Cyclin-dependent kinase regulatory subunit
  misc_feature (42)..(128): NCBI GI NO: 15451612 NR Description: Putative cyclin-dependent kinase regulatory subunit
  misc_feature (42)..(128): NCBI GI NO: 15226294 NR Description: CDK-subunit 1; protein id: At2g27960
  misc_feature (42)..(128): NCBI GI NO: 40641585 NR Description: putative cyclin-dependent kinase regulatory subunit
  misc_feature (42)..(124): NCBI GI NO: 15226297 NR Description: CDK-subunit 2; protein id: At2g27970.1
  misc_feature (42)..(121): NCBI GI NO: 27435806 NR Description: CKS1 protein
  misc_feature (45)..(112): NCBI GI NO: 2493727 NR Description: PROBABLE CYCLIN-DEPENDENT KINASES REGULATORYSUBUNIT
  misc_feature (44)..(127): NCBI GI NO: 21355377 NR Description: CG9790-PA [Drosophila melanogaster]
  misc_feature (44)..(118): NCBI GI NO: 13384804 NR Description: RIKEN cDNA 1110038L14 [Mus musculus]
  misc_feature (44)..(118): NCBI GI NO: 4502859 NR Description: CDC28 protein kinase 2; CKS1(S
  misc_feature (36)..(111): NCBI GI NO: 2493729 NR Description: CYCLIN-DEPENDENT KINASES REGULATORY SUBUNIT

SEQ ID NO: 33573 - protein, 87 aa, Zea mays subsp. mays; identical to SEQ ID NO: 29582
  peptide (1)..(87): Ceres Seq. ID no. 12595087
  misc_feature (1)..(72): Pfam Name: Pfam Description:  Cyclin-dependent kinase regulatory subunit
  misc_feature (1)..(87): NCBI GI NO: 15451612 NR Description: Putative cyclin-dependent kinase regulatory subunit
  misc_feature (1)..(87): NCBI GI NO: 15226294 NR Description: CDK-subunit 1; protein id: At2g27960
  misc_feature (1)..(87): NCBI GI NO: 40641585 NR Description: putative cyclin-dependent kinase regulatory subunit
  misc_feature (1)..(83): NCBI GI NO: 15226297 NR Description: CDK-subunit 2; protein id: At2g27970.1
  misc_feature (1)..(80): NCBI GI NO: 27435806 NR Description: CKS1 protein
  misc_feature (4)..(71): NCBI GI NO: 2493727 NR Description: PROBABLE CYCLIN-DEPENDENT KINASES REGULATORYSUBUNIT
  misc_feature (3)..(86): NCBI GI NO: 21355377 NR Description: CG9790-PA [Drosophila melanogaster]
  misc_feature (3)..(77): NCBI GI NO: 13384804 NR Description: RIKEN cDNA 1110038L14 [Mus musculus]
  misc_feature (3)..(77): NCBI GI NO: 4502859 NR Description: CDC28 protein kinase 2; CKS1(S
  misc_feature (1)..(70): NCBI GI NO: 2493729 NR Description: CYCLIN-DEPENDENT KINASES REGULATORY SUBUNIT

SEQ ID NO: 33574 - DNA, 1803 bp, Zea mays subsp. mays
  misc_feature (1)..(1803): Ceres Seq. ID no. 12345120
aatctcgataggggtgcgcgaggacgaggagaaaaaacagaggaggaaaaaatatcaccttctcttcctgcattcccctgctcgatccccggcgaggaattcgcccccgaatccatcgatttgctcagtccagtccgccgatccgtggatcgattcgtgcgtgggctctgtcctccccggggttccgatctggtcctcgcctcgccggaggaggagctggaggagatgaacggcaccgggggcagccaccaccagcagcagcacaggctccggcagcagcagcagcagcaggcgctcctgatgcagcaggcgctgcagcagcagcagcagcaacatcagtaccagtccggcgtcctcgccgccgcggcagccgcggccatgacccagatggaacctatttccaatggcaatcttccacctggctttgatccttccacttgtcgcagtgtgtatgttggaaacgtgaaccctaatgtcacggagagccttttgattgaagttttccagagtgctggccttgtggaaagatgcaagctcatacggaaagagaagtcatcctttgggtttgtggactactatgatagaaggtctgctgctctagcaatcatgacccttcatggccgtcacatatatggacaagcaatcaaggtgaactgggcatacgcaagtacacagagggaggatacgtcggggcatttccatatttttgttggtgatttaagttctgaagtgaatgatgcaactctttatgcctgtttctcagcatatccttcttgttctgatgctcgagtcatgtgggacaacaaaactggacgttccaggggttatggttttgtctccttccgtaatcaacaggaagctgaaactgctataactgaaatgactggaaaatggcttggaagcagacaaataaggtgcaattgggcaacaaagaccaattcagaagagaaaccagaaactgacaatcataatgcagttgtactaacaaatggtagctccaccaattcagcaacagatgcaagccaggatgcaggaagtaaagagaacccagagaacaatcctgattgtactactgtatatgttggcaaccttggacatgaggttaatcgggatgagcttcaccgccacttctataacttgggggtcggggcaatcgaggaaatccgtgttcaacaggataaggggtttggatttgtgagatatagcacccatggggaagcagcattagctattcagatggccaatggattggtagtccgtgggaaatcaattaagtgctcatggggaaacaagccaactccacctggcaccacctccaagcccctaccccctccagttgcttcataccagcctgctgtagcaatgtcaggtgtcccacaaggtttcacagcagccgaacttcttgcttaccagaggcagcttgccttaagccaggctgcagcagggcagattgctggccagcatggtctcgcgggtcaggtttctgcaggtcttcttgctgctgctggttctcaggccctctacgatggctacccgaaccagtcatcagcccagcagcttatgtactacaactagagttcaagaggacggcgttggccatcgtcgccctgttttttattttgtggttcatgtactatttgtgtgagagttcttgatctcttgtcgccgcggaattgtgttactatcttattactgtaccattgaccatttttcttgtgagattcatttgagtagtcactttaacagagtaagagatgtattctatgtgacttcgcgattgattaatgtaatgctcccctgtgc

SEQ ID NO: 33575 - protein, 524 aa, Zea mays subsp. mays
  peptide (1)..(524): Ceres Seq. ID no. 12345121
  misc_feature (150)..(210): Pfam Name: a.k.a. RRM, RBD, or RNP domain Pfam Description: RNA recognition motif.
  misc_feature (89)..(523): NCBI GI NO: 18394471 NR Description: oligouridylate binding protein
  misc_feature (86)..(523): NCBI GI NO: 15231783 NR Description: oligouridylate binding protein
  misc_feature (86)..(523): NCBI GI NO: 21593280 NR Description: oligouridylate binding protein, putative
  misc_feature (85)..(523): NCBI GI NO: 23237933 NR Description: putative oligouridylate binding protein
  misc_feature (85)..(523): NCBI GI NO: 15221031 NR Description: oligouridylate binding protein
  misc_feature (85)..(523): NCBI GI NO: 30695647 NR Description: oligouridylate binding protein (UBP1), putative
  misc_feature (83)..(425): NCBI GI NO: 22208507 NR Description: putative oligouridylate binding protein
  misc_feature (426)..(510): NCBI GI NO: 22208507 NR Description: putative oligouridylate binding protein
  misc_feature (86)..(483): NCBI GI NO: 6996560 NR Description: oligouridylate binding protein
  misc_feature (129)..(427): NCBI GI NO: 23928438 NR Description: putative oligouridylate binding protein [Zea mays]
NLDRGARGRGEKTEEEKISPSLPAFPCSIPGEEFAPESIDLLSPVRRSVDRFVRGLCPPRGSDLVLASPEEELEEMNGTGGSHHQQQHRLRQQQQQQALLMQQALQQQQQQHQYQSGVLAAAAAAAMTQMEPISNGNLPPGFDPSTCRSVYVGNVNPNVTESLLIEVFQSAGLVERCKLIRKEKSSFGFVDYYDRRSAALAIMTLHGRHIYGQAIKVNWAYASTQREDTSGHFHIFVGDLSSEVNDATLYACFSAYPSCSDARVMWDNKTGRSRGYGFVSFRNQQEAETAITEMTGKWLGSRQIRCNWATKTNSEEKPETDNHNAVVLTNGSSTNSATDASQDAGSKENPENNPDCTTVYVGNLGHEVNRDELHRHFYNLGVGAIEEIRVQQDKGFGFVRYSTHGEAALAIQMANGLVVRGKSIKCSWGNKPTPPGTTSKPLPPPVASYQPAVAMSGVPQGFTAAELLAYQRQLALSQAAAGQIAGQHGLAGQVSAGLLAAAGSQALYDGYPNQSSAQQLMYYN

SEQ ID NO: 33576 - protein, 449 aa, Zea mays subsp. mays
  peptide (1)..(449): Ceres Seq. ID no. 12345122
  misc_feature (75)..(135): Pfam Name: a.k.a. RRM, RBD, or RNP domain Pfam Description: RNA recognition motif.
  misc_feature (14)..(448): NCBI GI NO: 18394471 NR Description: oligouridylate binding protein
  misc_feature (11)..(448): NCBI GI NO: 15231783 NR Description: oligouridylate binding protein
  misc_feature (11)..(448): NCBI GI NO: 21593280 NR Description: oligouridylate binding protein, putative
  misc_feature (10)..(448): NCBI GI NO: 23237933 NR Description: putative oligouridylate binding protein
  misc_feature (10)..(448): NCBI GI NO: 15221031 NR Description: oligouridylate binding protein
  misc_feature (10)..(448): NCBI GI NO: 30695647 NR Description: oligouridylate binding protein (UBP1), putative
  misc_feature (8)..(350): NCBI GI NO: 22208507 NR Description: putative oligouridylate binding protein
  misc_feature (351)..(435): NCBI GI NO: 22208507 NR Description: putative oligouridylate binding protein
  misc_feature (11)..(408): NCBI GI NO: 6996560 NR Description: oligouridylate binding protein
  misc_feature (54)..(352): NCBI GI NO: 23928438 NR Description: putative oligouridylate binding protein [Zea mays]
MNGTGGSHHQQQHRLRQQQQQQALLMQQALQQQQQQHQYQSGVLAAAAAAAMTQMEPISNGNLPPGFDPSTCRSVYVGNVNPNVTESLLIEVFQSAGLVERCKLIRKEKSSFGFVDYYDRRSAALAIMTLHGRHIYGQAIKVNWAYASTQREDTSGHFHIFVGDLSSEVNDATLYACFSAYPSCSDARVMWDNKTGRSRGYGFVSFRNQQEAETAITEMTGKWLGSRQIRCNWATKTNSEEKPETDNHNAVVLTNGSSTNSATDASQDAGSKENPENNPDCTTVYVGNLGHEVNRDELHRHFYNLGVGAIEEIRVQQDKGFGFVRYSTHGEAALAIQMANGLVVRGKSIKCSWGNKPTPPGTTSKPLPPPVASYQPAVAMSGVPQGFTAAELLAYQRQLALSQAAAGQIAGQHGLAGQVSAGLLAAAGSQALYDGYPNQSSAQQLMYYN

SEQ ID NO: 33577 - protein, 424 aa, Zea mays subsp. mays
  peptide (1)..(424): Ceres Seq. ID no. 12345123
  misc_feature (50)..(110): Pfam Name: a.k.a. RRM, RBD, or RNP domain Pfam Description: RNA recognition motif.
  misc_feature (1)..(423): NCBI GI NO: 18394471 NR Description: oligouridylate binding protein
  misc_feature (1)..(423): NCBI GI NO: 15231783 NR Description: oligouridylate binding protein
  misc_feature (1)..(423): NCBI GI NO: 21593280 NR Description: oligouridylate binding protein, putative
  misc_feature (1)..(423): NCBI GI NO: 23237933 NR Description: putative oligouridylate binding protein
  misc_feature (1)..(423): NCBI GI NO: 15221031 NR Description: oligouridylate binding protein
  misc_feature (1)..(423): NCBI GI NO: 30695647 NR Description: oligouridylate binding protein (UBP1), putative
  misc_feature (1)..(325): NCBI GI NO: 22208507 NR Description: putative oligouridylate binding protein
  misc_feature (326)..(410): NCBI GI NO: 22208507 NR Description: putative oligouridylate binding protein
  misc_feature (1)..(383): NCBI GI NO: 6996560 NR Description: oligouridylate binding protein
  misc_feature (29)..(327): NCBI GI NO: 23928438 NR Description: putative oligouridylate binding protein [Zea mays]
MQQALQQQQQQHQYQSGVLAAAAAAAMTQMEPISNGNLPPGFDPSTCRSVYVGNVNPNVTESLLIEVFQSAGLVERCKLIRKEKSSFGFVDYYDRRSAALAIMTLHGRHIYGQAIKVNWAYASTQREDTSGHFHIFVGDLSSEVNDATLYACFSAYPSCSDARVMWDNKTGRSRGYGFVSFRNQQEAETAITEMTGKWLGSRQIRCNWATKTNSEEKPETDNHNAVVLTNGSSTNSATDASQDAGSKENPENNPDCTTVYVGNLGHEVNRDELHRHFYNLGVGAIEEIRVQQDKGFGFVRYSTHGEAALAIQMANGLVVRGKSIKCSWGNKPTPPGTTSKPLPPPVASYQPAVAMSGVPQGFTAAELLAYQRQLALSQAAAGQIAGQHGLAGQVSAGLLAAAGSQALYDGYPNQSSAQQLMYYN

SEQ ID NO: 33578 - DNA, 1703 bp, Zea mays subsp. mays
  misc_feature (1)..(1703): Ceres Seq. ID no. 12343304
gcgtttagagagagagaagacagggagaaggaggaagagccgccgcggtggaccgggtgatttggcgtttccttgtcctcggcagggttgtcaggggattcgtcaggacacgggcaagctttgtacgctaccaattcagcgaataaccgacgggggtgcgtggaattgctcaccggagcaaaccctccgccgccgaaccaccatccgctgtgagcgaataaccggcatccccagggcgccgtcgatcccggtcggccatctcccggtgcctggtaactgatcgttaatttcatcgatgggtgccatggaggaccgcagctccaagcaggcaggcgcgggcttggtggcccacctccacgacgacctccttgtggagatcctctcccgcgtccccgccaagtccatctgccggttcaagtgcgtgtccaaggcctggctcgacctcattgccggtcccgaccaccgtaagaagctccgccaacccatgcagggactcatctacatgaatccagagaaggaccgccacagcttcagcttcctggacctgccactgacagtaggatccgtgcctcaggacgttgtcgaccctgcaggcttcatctccttcctgacggaacagcctgagatccatcgcctcgtcttactggattcctgcaatggtctgatcctattccagcaccttatggagctgccgcactacaacagtttgggctatgtcgtgtgcaacccgaccacgaagcaatggcgagccgtgcccgagcccgactgcagctcccatgtaccaatgaactacacatatttggcttttgatccgactgtatcctcccacttccacttggtccggttcaaaaagaatcgcgagtacatggagcccatgtcggtgcatgcttactcgtctaaaactgggatatggacctatagccaaactgagaaagaagaagaagaatggcagaatcaggtctacttatctataagtaatcgatgcgcctttgttaatggcttcctgcatttgctagtttggggctcgaacaaaatgcagatactcatcgtagatgtacaaggacgtccaagaaggatgatcagactgccagacgcggctgctggtaattgtgagggatgctactgtgtttactttggccaatcccaggggcatctgcactgcattactaaacaattattcgacttcaacgaagagaaatacgagctgtccatctgggctcttcaggattacgaagcacaagagtgggtgctgaaggacactgtgagctccctccagctctttggaggaaattgccccacaagtgtcgcattggagttgtacagcgaggtggccagcatgcatctggatcgcaatgtggtcttcttcttttcacactgtgaacgtagattcatagcatatgacatggacagcaaggaagtgagtgttttcagcagttccaaagctatacacaggtggaaggttggttgctatgttccttgtttctcaccggcgcctctcaaataagcactacaagcaattagtgcgtggtctaatacaagtatgagctgctagcaacttagttagactgtaataaggtcaagtgaagtatttcgtccatgagtgtttggtctaattagttccgcaagcctgttgaggcatttatatatatatgtagtctatatttatggatgctagttaaattaatggatacgttgtatgattt

SEQ ID NO: 33579 - protein, 402 aa, Zea mays subsp. mays
  peptide (1)..(402): Ceres Seq. ID no. 12343305
  misc_feature (109)..(397): NCBI GI NO: 33146479 NR Description: receptor-like kinase-like
  misc_feature (109)..(397): NCBI GI NO: 34898802 NR Description: OJ1131_E05.28
  misc_feature (18)..(266): NCBI GI NO: 34898810 NR Description: OJ1131_E05.32
  misc_feature (18)..(266): NCBI GI NO: 34898788 NR Description: OJ1131_E05.20
  misc_feature (18)..(266): NCBI GI NO: 34898790 NR Description: OJ1131_E05.21
  misc_feature (103)..(397): NCBI GI NO: 33146481 NR Description: unknown protein
  misc_feature (103)..(397): NCBI GI NO: 34898810 NR Description: OJ1131_E05.32
  misc_feature (23)..(266): NCBI GI NO: 34898796 NR Description: OJ1131_E05.24
  misc_feature (6)..(402): NCBI GI NO: 34914902 NR Description: B1096D03.14
  misc_feature (140)..(401): NCBI GI NO: 37536818 NR Description: hypothetical protein
MGAMEDRSSKQAGAGLVAHLHDDLLVEILSRVPAKSICRFKCVSKAWLDLIAGPDHRKKLRQPMQGLIYMNPEKDRHSFSFLDLPLTVGSVPQDVVDPAGFISFLTEQPEIHRLVLLDSCNGLILFQHLMELPHYNSLGYVVCNPTTKQWRAVPEPDCSSHVPMNYTYLAFDPTVSSHFHLVRFKKNREYMEPMSVHAYSSKTGIWTYSQTEKEEEEWQNQVYLSISNRCAFVNGFLHLLVWGSNKMQILIVDVQGRPRRMIRLPDAAAGNCEGCYCVYFGQSQGHLHCITKQLFDFNEEKYELSIWALQDYEAQEWVLKDTVSSLQLFGGNCPTSVALELYSEVASMHLDRNVVFFFSHCERRFIAYDMDSKEVSVFSSSKAIHRWKVGCYVPCFSPAPLK

SEQ ID NO: 33580 - protein, 399 aa, Zea mays subsp. mays
  peptide (1)..(399): Ceres Seq. ID no. 12343306
  misc_feature (106)..(394): NCBI GI NO: 33146479 NR Description: receptor-like kinase-like
  misc_feature (106)..(394): NCBI GI NO: 34898802 NR Description: OJ1131_E05.28
  misc_feature (15)..(263): NCBI GI NO: 34898810 NR Description: OJ1131_E05.32
  misc_feature (15)..(263): NCBI GI NO: 34898788 NR Description: OJ1131_E05.20
  misc_feature (15)..(263): NCBI GI NO: 34898790 NR Description: OJ1131_E05.21
  misc_feature (100)..(394): NCBI GI NO: 33146481 NR Description: unknown protein
  misc_feature (100)..(394): NCBI GI NO: 34898810 NR Description: OJ1131_E05.32
  misc_feature (20)..(263): NCBI GI NO: 34898796 NR Description: OJ1131_E05.24
  misc_feature (3)..(399): NCBI GI NO: 34914902 NR Description: B1096D03.14
  misc_feature (137)..(398): NCBI GI NO: 37536818 NR Description: hypothetical protein
MEDRSSKQAGAGLVAHLHDDLLVEILSRVPAKSICRFKCVSKAWLDLIAGPDHRKKLRQPMQGLIYMNPEKDRHSFSFLDLPLTVGSVPQDVVDPAGFISFLTEQPEIHRLVLLDSCNGLILFQHLMELPHYNSLGYVVCNPTTKQWRAVPEPDCSSHVPMNYTYLAFDPTVSSHFHLVRFKKNREYMEPMSVHAYSSKTGIWTYSQTEKEEEEWQNQVYLSISNRCAFVNGFLHLLVWGSNKMQILIVDVQGRPRRMIRLPDAAAGNCEGCYCVYFGQSQGHLHCITKQLFDFNEEKYELSIWALQDYEAQEWVLKDTVSSLQLFGGNCPTSVALELYSEVASMHLDRNVVFFFSHCERRFIAYDMDSKEVSVFSSSKAIHRWKVGCYVPCFSPAPLK

SEQ ID NO: 33581 - protein, 339 aa, Zea mays subsp. mays
  peptide (1)..(339): Ceres Seq. ID no. 12343307
  misc_feature (46)..(334): NCBI GI NO: 33146479 NR Description: receptor-like kinase-like
  misc_feature (46)..(334): NCBI GI NO: 34898802 NR Description: OJ1131_E05.28
  misc_feature (1)..(203): NCBI GI NO: 34898810 NR Description: OJ1131_E05.32
  misc_feature (1)..(203): NCBI GI NO: 34898788 NR Description: OJ1131_E05.20
  misc_feature (1)..(203): NCBI GI NO: 34898790 NR Description: OJ1131_E05.21
  misc_feature (40)..(334): NCBI GI NO: 33146481 NR Description: unknown protein
  misc_feature (40)..(334): NCBI GI NO: 34898810 NR Description: OJ1131_E05.32
  misc_feature (1)..(203): NCBI GI NO: 34898796 NR Description: OJ1131_E05.24
  misc_feature (1)..(339): NCBI GI NO: 34914902 NR Description: B1096D03.14
  misc_feature (77)..(338): NCBI GI NO: 37536818 NR Description: hypothetical protein
MQGLIYMNPEKDRHSFSFLDLPLTVGSVPQDVVDPAGFISFLTEQPEIHRLVLLDSCNGLILFQHLMELPHYNSLGYVVCNPTTKQWRAVPEPDCSSHVPMNYTYLAFDPTVSSHFHLVRFKKNREYMEPMSVHAYSSKTGIWTYSQTEKEEEEWQNQVYLSISNRCAFVNGFLHLLVWGSNKMQILIVDVQGRPRRMIRLPDAAAGNCEGCYCVYFGQSQGHLHCITKQLFDFNEEKYELSIWALQDYEAQEWVLKDTVSSLQLFGGNCPTSVALELYSEVASMHLDRNVVFFFSHCERRFIAYDMDSKEVSVFSSSKAIHRWKVGCYVPCFSPAPLK

SEQ ID NO: 33582 - DNA, 1751 bp, Zea mays subsp. mays
  misc_feature (1)..(1751): Ceres Seq. ID no. 12345721
tccccttctggtcgaatcgttattatcagtgggctagaacatactaatgcgagtgctgtgctgctaaatctaatctgcgtgcgattggtcgatgggcaggttcggtggagatcgccgccgttggcgtttcgatcgccatatttaaccaagtctccaaggtctgcatctaccctctcgttagcgtcacaacgtcgttcgtcgcggaggaagacgcgatcatcagtaaggccgtccgaggaaacagcagccaggaggaggacgtggagaaagcctcccacgtgggctttgatccggagaccagcaatctgcatgcatctggccctgcaggtatggcagaatgcgtgaactcgtgtatccctacggagtgcgcagcagatccctctggcaggcaagggcggtgcgagaagaggtacgtgccgtcggtcacgtcggcgctaatagtcggttccattctcggcctgcttcaggccgtcttcctggtcctttcggccagattcgtgctcaacatcatgggtgttaagtccggatccccgatgcaagggcctgcggtgcgctacctaacgataaggtcccttggtgcccccgctgtgctgctgtctctggccatgcaaggggttttccgggggttcaaggacaccaagacaccgttatacgctactgtggttggcgacgcggcgaacatcatactggacccgattttgatgtttgtttgccatatgggcgtcactggtgcggctattgctcatgttgtttctcagtacatgataacgttgatactgctgtgccggctcgtccagcgagttcacgttatcccacccagcattaaatctctgaaatttgggaggtttcttggatgtggattcctgctgctcgcaagggttgtcgcggtgacgttctgcgtcacgctggcggcgtccctggccgctcgccatggacccaccgtcatggcaggcttccagatctgctgccagctctggctggccacgtctcttctcgccgatggattggccgtggcaggacaggcggtgcttgcaagcgcgttcgccaagaacgacagtaagaaggtcgctgccgcgacatcccgtgtgttgcagctgagcattgtcctgggcatgggtctcaccgtcgtgctgggacttgctatgaggttcggggctggcattttcacaagcgacgtgcccgtgatccaagtcattcacagaggcatcccgtttgtcgccgggacgcagaccatcaattccctggccttcgtgtttgatggcatcaactttgcagcgtcagactacagatactctgcttactccatggttgctgttgcgtctgtgtcgataccatgcctgctgtacctttctgcgcataacggattcatcggtatatggatcgcattgacgatctacatgagtctgaggaccatagctagcacctggaggatgggggcagcgaggggaccatggacgtttctccggaactgatgatggattggcttggaactgatgatctgcggcacactgctgacagataaggctgcgccgcgctgcgcatgcgcctctcatgtagcatcagcgaagtatagtacgtgttctgctggtgtttaaagcttcggatatcggaggtagatgtagctatgggactatcccctcctgatcgtctgacttgtggccttgcgtggagagtttacgttgctccgttgatttatgttgtatcatgccaggatgtcagtttaataccatacatcggtaaagtgtctctct

SEQ ID NO: 33583 - protein, 380 aa, Zea mays subsp. mays
  peptide (1)..(380): Ceres Seq. ID no. 12345722
  misc_feature (1)..(326): NCBI GI NO: 19386721 NR Description: P0678F11.10
  misc_feature (1)..(379): NCBI GI NO: 15231918 NR Description: MATE efflux family protein, putative
  misc_feature (1)..(367): NCBI GI NO: 25405456 NR Description: hypothetical protein F11M15.20
  misc_feature (1)..(368): NCBI GI NO: 37532300 NR Description: putative membrane protein
  misc_feature (1)..(302): NCBI GI NO: 20270057 NR Description: Putative membrane protein
  misc_feature (327)..(368): NCBI GI NO: 20270057 NR Description: Putative membrane protein
  misc_feature (26)..(378): NCBI GI NO: 30687474 NR Description: MATE efflux protein family [Arabidopsis thaliana]
  misc_feature (26)..(368): NCBI GI NO: 7487160 NR Description: hypothetical protein At2g38330
  misc_feature (1)..(225): NCBI GI NO: 18403476 NR Description: expressed protein; protein id: At1g51340
  misc_feature (35)..(375): NCBI GI NO: 29830828 NR Description: putative DNA-damage-inducible protein F
MAECVNSCIPTECAADPSGRQGRCEKRYVPSVTSALIVGSILGLLQAVFLVLSARFVLNIMGVKSGSPMQGPAVRYLTIRSLGAPAVLLSLAMQGVFRGFKDTKTPLYATVVGDAANIILDPILMFVCHMGVTGAAIAHVVSQYMITLILLCRLVQRVHVIPPSIKSLKFGRFLGCGFLLLARVVAVTFCVTLAASLAARHGPTVMAGFQICCQLWLATSLLADGLAVAGQAVLASAFAKNDSKKVAAATSRVLQLSIVLGMGLTVVLGLAMRFGAGIFTSDVPVIQVIHRGIPFVAGTQTINSLAFVFDGINFAASDYRYSAYSMVAVASVSIPCLLYLSAHNGFIGIWIALTIYMSLRTIASTWRMGAARGPWTFLRN

SEQ ID NO: 33584 - protein, 320 aa, Zea mays subsp. mays
  peptide (1)..(320): Ceres Seq. ID no. 12345723
  misc_feature (1)..(266): NCBI GI NO: 19386721 NR Description: P0678F11.10
  misc_feature (1)..(319): NCBI GI NO: 15231918 NR Description: MATE efflux family protein, putative
  misc_feature (1)..(307): NCBI GI NO: 25405456 NR Description: hypothetical protein F11M15.20
  misc_feature (1)..(308): NCBI GI NO: 37532300 NR Description: putative membrane protein
  misc_feature (1)..(242): NCBI GI NO: 20270057 NR Description: Putative membrane protein
  misc_feature (267)..(308): NCBI GI NO: 20270057 NR Description: Putative membrane protein
  misc_feature (1)..(318): NCBI GI NO: 30687474 NR Description: MATE efflux protein family [Arabidopsis thaliana]
  misc_feature (1)..(308): NCBI GI NO: 7487160 NR Description: hypothetical protein At2g38330
  misc_feature (1)..(165): NCBI GI NO: 18403476 NR Description: expressed protein; protein id: At1g51340
  misc_feature (1)..(315): NCBI GI NO: 29830828 NR Description: putative DNA-damage-inducible protein F
MGVKSGSPMQGPAVRYLTIRSLGAPAVLLSLAMQGVFRGFKDTKTPLYATVVGDAANIILDPILMFVCHMGVTGAAIAHVVSQYMITLILLCRLVQRVHVIPPSIKSLKFGRFLGCGFLLLARVVAVTFCVTLAASLAARHGPTVMAGFQICCQLWLATSLLADGLAVAGQAVLASAFAKNDSKKVAAATSRVLQLSIVLGMGLTVVLGLAMRFGAGIFTSDVPVIQVIHRGIPFVAGTQTINSLAFVFDGINFAASDYRYSAYSMVAVASVSIPCLLYLSAHNGFIGIWIALTIYMSLRTIASTWRMGAARGPWTFLRN

SEQ ID NO: 33585 - protein, 312 aa, Zea mays subsp. mays
  peptide (1)..(312): Ceres Seq. ID no. 12345724
  misc_feature (1)..(258): NCBI GI NO: 19386721 NR Description: P0678F11.10
  misc_feature (1)..(311): NCBI GI NO: 15231918 NR Description: MATE efflux family protein, putative
  misc_feature (1)..(299): NCBI GI NO: 25405456 NR Description: hypothetical protein F11M15.20
  misc_feature (1)..(300): NCBI GI NO: 37532300 NR Description: putative membrane protein
  misc_feature (1)..(234): NCBI GI NO: 20270057 NR Description: Putative membrane protein
  misc_feature (259)..(300): NCBI GI NO: 20270057 NR Description: Putative membrane protein
  misc_feature (1)..(310): NCBI GI NO: 30687474 NR Description: MATE efflux protein family [Arabidopsis thaliana]
  misc_feature (1)..(300): NCBI GI NO: 7487160 NR Description: hypothetical protein At2g38330
  misc_feature (1)..(157): NCBI GI NO: 18403476 NR Description: expressed protein; protein id: At1g51340
  misc_feature (1)..(307): NCBI GI NO: 29830828 NR Description: putative DNA-damage-inducible protein F
MQGPAVRYLTIRSLGAPAVLLSLAMQGVFRGFKDTKTPLYATVVGDAANIILDPILMFVCHMGVTGAAIAHVVSQYMITLILLCRLVQRVHVIPPSIKSLKFGRFLGCGFLLLARVVAVTFCVTLAASLAARHGPTVMAGFQICCQLWLATSLLADGLAVAGQAVLASAFAKNDSKKVAAATSRVLQLSIVLGMGLTVVLGLAMRFGAGIFTSDVPVIQVIHRGIPFVAGTQTINSLAFVFDGINFAASDYRYSAYSMVAVASVSIPCLLYLSAHNGFIGIWIALTIYMSLRTIASTWRMGAARGPWTFLRN

SEQ ID NO: 33586 - DNA, 1389 bp, Zea mays subsp. mays
  misc_feature (1)..(1389): Ceres Seq. ID no. 12411729
acctcttaattaccctttcggtaccgcgatgccctaactcggtgcttttgcagcagccactcgctccacaagtacgcgccgctggactggtccgcctacttcgacgaggagcgccgcgtacgcatccccgacaccgacaacgttttcaatgcgtacacgaccggatcggaggggcccgtcgtgttctgcctgcacggaggcggttattcggggctttcatttgctctagcagcaagtcaaatgaaggacaaggctcgtgttgttgccatggatctaagggggcatggaaaatcaacaacgaatgatgatctggatttgtccattgaaactcttaccaatgatgtcatagctgttatacgtacaatgtatggagatttgccaccagcaattatacttgttgggcatagcatgggcggttcagtggctatacatgtggctgcaagaaaagaaattagaaatcttcatgggcttgttgtcgttgatgttgtcgagggaacagcaatggcttcattagttcatatgcagaagatcttagcaaaccgggcacagcattttcctagcattgaaaaagcaattgaatggagtgtcaaaggtgggccattaaggaacatcgagtctgctcgtgtgtccattccatctaccctgaaatacgatgaatcacgagaatgctatacatatcgcactcctcttgagcaaacagaaaagtactggaaaggatggtatgaaggtctttcagacaagttcctatcttgcccagtgcaaaagatcctgttgttagctggtaccgacagactggacagttggtttacaatttgcagagctttaacaatcggtcaaatgcaaggaaaatttcaaatggtggtgattcggcacactggacatgctatacaggaagatgtacctgaagaatttgcatcgcacatactgaagttcatatcccgcaacaaaatagggcctaacggtgttgagatacctgggctcattaaaaaatggcagcagtagacataatgtacaagttaccgttctggaaaatgttcaggaaaatgatgagtaggtctgcctatccgagttctcttcatatcgaattaaaaaaaggttcaagatgatcatgcgatcgttaacaatcagtcattggtttcgtcatctgttggcaactctcccatgtcgcttgagttgctttgtttctgacatcactctgcgacctgccggcgtcttttgtacgagggttcttgtatgtttttaggtagagctgagtgcagtgcgttgtaatgctttccgtgaggttattatactgctatcaagcaggatcagctcgttatgacagctctgtttcgaatttctgctggcctcggcaagtttgatgggaataaatcgaagaagccttctttg

SEQ ID NO: 33587 - protein, 253 aa, Zea mays subsp. mays
  peptide (1)..(253): Ceres Seq. ID no. 12411730
  misc_feature (5)..(229): Pfam Name: Pfam Description:  alpha/beta hydrolase fold
  misc_feature (1)..(253): NCBI GI NO: 18413291 NR Description: lipase-like protein; protein id: At4g10050
  misc_feature (1)..(139): NCBI GI NO: 30794138 NR Description: protein phosphatase methylesterase 1
  misc_feature (144)..(241): NCBI GI NO: 30794138 NR Description: protein phosphatase methylesterase 1
  misc_feature (1)..(139): NCBI GI NO: 34858774 NR Description: similar to Protein phosphatase methylesterase 1
  misc_feature (144)..(241): NCBI GI NO: 34858774 NR Description: similar to Protein phosphatase methylesterase 1
  misc_feature (1)..(139): NCBI GI NO: 20809834 NR Description: RIKEN cDNA 2700017M01 gene [Mus musculus]
  misc_feature (144)..(241): NCBI GI NO: 20809834 NR Description: RIKEN cDNA 2700017M01 gene [Mus musculus]
  misc_feature (1)..(139): NCBI GI NO: 7706645 NR Description: protein phosphatase methylesterase-1
  misc_feature (144)..(241): NCBI GI NO: 7706645 NR Description: protein phosphatase methylesterase-1
  misc_feature (1)..(136): NCBI GI NO: 28277941 NR Description: Similar to RIKEN cDNA 2700017M01 gene
MKDKARVVAMDLRGHGKSTTNDDLDLSIETLTNDVIAVIRTMYGDLPPAIILVGHSMGGSVAIHVAARKEIRNLHGLVVVDVVEGTAMASLVHMQKILANRAQHFPSIEKAIEWSVKGGPLRNIESARVSIPSTLKYDESRECYTYRTPLEQTEKYWKGWYEGLSDKFLSCPVQKILLLAGTDRLDSWFTICRALTIGQMQGKFQMVVIRHTGHAIQEDVPEEFASHILKFISRNKIGPNGVEIPGLIKKWQQ

SEQ ID NO: 33588 - protein, 244 aa, Zea mays subsp. mays
  peptide (1)..(244): Ceres Seq. ID no. 12411731
  misc_feature (1)..(220): Pfam Name: Pfam Description:  alpha/beta hydrolase fold
  misc_feature (1)..(244): NCBI GI NO: 18413291 NR Description: lipase-like protein; protein id: At4g10050
  misc_feature (1)..(130): NCBI GI NO: 30794138 NR Description: protein phosphatase methylesterase 1
  misc_feature (135)..(232): NCBI GI NO: 30794138 NR Description: protein phosphatase methylesterase 1
  misc_feature (1)..(130): NCBI GI NO: 34858774 NR Description: similar to Protein phosphatase methylesterase 1
  misc_feature (135)..(232): NCBI GI NO: 34858774 NR Description: similar to Protein phosphatase methylesterase 1
  misc_feature (1)..(130): NCBI GI NO: 20809834 NR Description: RIKEN cDNA 2700017M01 gene [Mus musculus]
  misc_feature (135)..(232): NCBI GI NO: 20809834 NR Description: RIKEN cDNA 2700017M01 gene [Mus musculus]
  misc_feature (1)..(130): NCBI GI NO: 7706645 NR Description: protein phosphatase methylesterase-1
  misc_feature (135)..(232): NCBI GI NO: 7706645 NR Description: protein phosphatase methylesterase-1
  misc_feature (1)..(127): NCBI GI NO: 28277941 NR Description: Similar to RIKEN cDNA 2700017M01 gene
MDLRGHGKSTTNDDLDLSIETLTNDVIAVIRTMYGDLPPAIILVGHSMGGSVAIHVAARKEIRNLHGLVVVDVVEGTAMASLVHMQKILANRAQHFPSIEKAIEWSVKGGPLRNIESARVSIPSTLKYDESRECYTYRTPLEQTEKYWKGWYEGLSDKFLSCPVQKILLLAGTDRLDSWFTICRALTIGQMQGKFQMVVIRHTGHAIQEDVPEEFASHILKFISRNKIGPNGVEIPGLIKKWQQ

SEQ ID NO: 33589 - protein, 212 aa, Zea mays subsp. mays
  peptide (1)..(212): Ceres Seq. ID no. 12411732
  misc_feature (1)..(188): Pfam Name: Pfam Description:  alpha/beta hydrolase fold
  misc_feature (1)..(212): NCBI GI NO: 18413291 NR Description: lipase-like protein; protein id: At4g10050
  misc_feature (1)..(98): NCBI GI NO: 30794138 NR Description: protein phosphatase methylesterase 1
  misc_feature (103)..(200): NCBI GI NO: 30794138 NR Description: protein phosphatase methylesterase 1
  misc_feature (1)..(98): NCBI GI NO: 34858774 NR Description: similar to Protein phosphatase methylesterase 1
  misc_feature (103)..(200): NCBI GI NO: 34858774 NR Description: similar to Protein phosphatase methylesterase 1
  misc_feature (1)..(98): NCBI GI NO: 20809834 NR Description: RIKEN cDNA 2700017M01 gene [Mus musculus]
  misc_feature (103)..(200): NCBI GI NO: 20809834 NR Description: RIKEN cDNA 2700017M01 gene [Mus musculus]
  misc_feature (1)..(98): NCBI GI NO: 7706645 NR Description: protein phosphatase methylesterase-1
  misc_feature (103)..(200): NCBI GI NO: 7706645 NR Description: protein phosphatase methylesterase-1
  misc_feature (1)..(95): NCBI GI NO: 28277941 NR Description: Similar to RIKEN cDNA 2700017M01 gene
MYGDLPPAIILVGHSMGGSVAIHVAARKEIRNLHGLVVVDVVEGTAMASLVHMQKILANRAQHFPSIEKAIEWSVKGGPLRNIESARVSIPSTLKYDESRECYTYRTPLEQTEKYWKGWYEGLSDKFLSCPVQKILLLAGTDRLDSWFTICRALTIGQMQGKFQMVVIRHTGHAIQEDVPEEFASHILKFISRNKIGPNGVEIPGLIKKWQQ

SEQ ID NO: 33590 - DNA, 677 bp, Zea mays subsp. mays
  misc_feature (1)..(677): Ceres Seq. ID no. 12341262
acgaacggtggaagagtacgcctcggaatcagaggagcagcgaggaagctgaaggaggggcgaatctaagcccaattgaagcatgagggcgtcgattaatcgtcccccgacgccgagcgcggaggaggatcgggacaagcagccttctctcggagagatcattaacatcaagttggtagagactggggagaaggagaagctaatggagctactccgcgagcgactcgctgagtgcggctggagggatgagatgaaggcactctgcagggcctatgcaaggaagaaaggaagaaataatgtgacagtagatgacctcattcatgttattactccgaaaggaagagcatccgtgcctgattcagtgaaggcagaactcctgcaacgcatccggtccttccttatgtctaccacacttcggtagtcatttgtcgcgacggttggagcctatatgtaccattgtaggatcattgggaagtcgatcttgttggggaccaaaggtgcaggaaagcagtgcgtaggggaatattgtgagcatgaaaagaaacagtgtgatcttcatgacactgtcgacatgttcctcgtcaggcgcaggcggttggcgtaatttcaggtgtaccaatagagttgtaagttgtaacccctgaatactgtattgttaaagcaaccttccaccttgt

SEQ ID NO: 33591 - protein, 112 aa, Zea mays subsp. mays
  peptide (1)..(112): Ceres Seq. ID no. 12341263
  misc_feature (1)..(111): NCBI GI NO: 30688637 NR Description: expressed protein [Arabidopsis thaliana]
  misc_feature (18)..(106): NCBI GI NO: 9910186 NR Description: DC6 protein [Homo sapiens]
  misc_feature (18)..(106): NCBI GI NO: 34866121 NR Description: similar to DC6 protein [Rattus norvegicus]
  misc_feature (1)..(65): NCBI GI NO: 19386734 NR Description: P0678F11.23
  misc_feature (8)..(106): NCBI GI NO: 38086720 NR Description: similar to DC6 protein; e
  misc_feature (32)..(106): NCBI GI NO: 17864496 NR Description: enhancer of yellow 2 CG15191-PA
  misc_feature (1)..(64): NCBI GI NO: 9279634 NR Description: gene_id:MOJ10.18~unknown protein
  misc_feature (36)..(106): NCBI GI NO: 24644735 NR Description: CG14612-PA [Drosophila melanogaster]
MRASINRPPTPSAEEDRDKQPSLGEIINIKLVETGEKEKLMELLRERLAECGWRDEMKALCRAYARKKGRNNVTVDDLIHVITPKGRASVPDSVKAELLQRIRSFLMSTTLR

SEQ ID NO: 33592 - protein, 72 aa, Zea mays subsp. mays
  peptide (1)..(72): Ceres Seq. ID no. 12341264
  misc_feature (1)..(71): NCBI GI NO: 30688637 NR Description: expressed protein [Arabidopsis thaliana]
  misc_feature (1)..(66): NCBI GI NO: 9910186 NR Description: DC6 protein [Homo sapiens]
  misc_feature (1)..(66): NCBI GI NO: 34866121 NR Description: similar to DC6 protein [Rattus norvegicus]
  misc_feature (1)..(25): NCBI GI NO: 19386734 NR Description: P0678F11.23
  misc_feature (1)..(66): NCBI GI NO: 38086720 NR Description: similar to DC6 protein; e
  misc_feature (1)..(66): NCBI GI NO: 17864496 NR Description: enhancer of yellow 2 CG15191-PA
  misc_feature (1)..(24): NCBI GI NO: 9279634 NR Description: gene_id:MOJ10.18~unknown protein
  misc_feature (1)..(66): NCBI GI NO: 24644735 NR Description: CG14612-PA [Drosophila melanogaster]
MELLRERLAECGWRDEMKALCRAYARKKGRNNVTVDDLIHVITPKGRASVPDSVKAELLQRIRSFLMSTTLR

SEQ ID NO: 33593 - protein, 56 aa, Zea mays subsp. mays
  peptide (1)..(56): Ceres Seq. ID no. 12341265
  misc_feature (1)..(55): NCBI GI NO: 30688637 NR Description: expressed protein [Arabidopsis thaliana]
  misc_feature (1)..(50): NCBI GI NO: 9910186 NR Description: DC6 protein [Homo sapiens]
  misc_feature (1)..(50): NCBI GI NO: 34866121 NR Description: similar to DC6 protein [Rattus norvegicus]
  misc_feature (1)..(50): NCBI GI NO: 38086720 NR Description: similar to DC6 protein; e
  misc_feature (1)..(50): NCBI GI NO: 17864496 NR Description: enhancer of yellow 2 CG15191-PA
  misc_feature (1)..(50): NCBI GI NO: 24644735 NR Description: CG14612-PA [Drosophila melanogaster]
MKALCRAYARKKGRNNVTVDDLIHVITPKGRASVPDSVKAELLQRIRSFLMSTTLR

SEQ ID NO: 33594 - DNA, 1251 bp, Zea mays subsp. mays
  misc_feature (1)..(1251): Ceres Seq. ID no. 12403165
gagatttggattgtcacgtaattcgtttccctgtcctccccctctcgctgagctgagcccacctactccctcccaccacttgcattcacacactcgattccgctgctctctccctcttcctctcccccgcggcggagccataaaccctaggcctcgccgtcgtcggaggcgccgccgcgatgtcgcactttggaaggacgggtccgccggacatccgcgacaccttctcgctgctcgtcctcaacatcagcttccgaaccacggccgacgaccttttcccgctcttcgagcgctgcggcaaggtcgtcgacgtcttcatcccgagggaccgcaggaccggggactcgaggggttttgcgttcgtgcggtacaagtacgccgacgaggcgcagaaggctatagatcggctcgatggccgtaatgtggatgggaggaacatcatggtgcagtttgcaaagtacggccccaatgctgtgccaatccacaaaggaagggtcaaagagggggttgagaaatcaagagacaggtcaaggagccgtagtccaaggccaaggcacagagacagagatgatagaaggcgaagtcgcagcaggagcaggagcaggagcagagaaagacatgtccatgatagagatagggactatcgtcgtcggagcagaagtagaagccgaagtatgagttcaagccctgaccacaaaagtcatcgcagagcaagagatgatgttaagcgcaagagcagaagcaagagtagaagcaagagcaggagcaggagtagaagccgctcataccacagttcttcacctgcccggcgcagtgctagccctcccaagagcccactgccacagaggagccccactcctgaaaagcatgccaatggaaaagattcacctctgtcacgcagtgtatctccatcaccgaagcgtgcaagctcccgcagcctaggcagcgatagcaaggaataaagcttgttgatctggtgatgcttaaagagcagtcttcccatgggattgcagaacgttgagaaggctgtttgaatatgatggcagtaccaatctgcaatcaaccgctatccaaggttgctagttgttcttttaatgacttctagaattgtgttttccagttgtcaaaatatgctgttggtttgtatttcgacctctattgtctttttatacccttgtactgcatcatctactttatgtgcatccgtttcttgactccatattaatttgttaaaacatttgtgcattttct

SEQ ID NO: 33595 - protein, 260 aa, Zea mays subsp. mays
  peptide (1)..(260): Ceres Seq. ID no. 12403166
  misc_feature (18)..(89): Pfam Name: a.k.a. RRM, RBD, or RNP domain Pfam Description: RNA recognition motif.
  misc_feature (1)..(258): NCBI GI NO: 7446336 NR Description: probable arginine/serine-rich splicing factor -alfalfa
  misc_feature (1)..(259): NCBI GI NO: 33146621 NR Description: putative splicing factor, arginine/serine-rich 2
  misc_feature (1)..(260): NCBI GI NO: 15237641 NR Description: arginine/serine-rich splicing factor SC35
  misc_feature (1)..(259): NCBI GI NO: 9843653 NR Description: splicing factor SC35 [Arabidopsis thaliana]
  misc_feature (4)..(219): NCBI GI NO: 28279759 NR Description: Similar to splicing factor, arginine/serine-rich 2
  misc_feature (4)..(219): NCBI GI NO: 266991 NR Description: Splicing factor, arginine/serine-rich 2
  misc_feature (4)..(219): NCBI GI NO: 6755478 NR Description: splicing factor, arginine/serine-rich 2
  misc_feature (4)..(219): NCBI GI NO: 28175397 NR Description: Unknown (protein for MGC:53177) [Xenopus laevis]
  misc_feature (4)..(219): NCBI GI NO: 39794351 NR Description: Unknown (protein for MGC:75633)
  misc_feature (4)..(219): NCBI GI NO: 4506899 NR Description: splicing factor, arginine/serine-rich 2
MSHFGRTGPPDIRDTFSLLVLNISFRTTADDLFPLFERCGKVVDVFIPRDRRTGDSRGFAFVRYKYADEAQKAIDRLDGRNVDGRNIMVQFAKYGPNAVPIHKGRVKEGVEKSRDRSRSRSPRPRHRDRDDRRRSRSRSRSRSRERHVHDRDRDYRRRSRSRSRSMSSSPDHKSHRRARDDVKRKSRSKSRSKSRSRSRSRSYHSSSPARRSASPPKSPLPQRSPTPEKHANGKDSPLSRSVSPSPKRASSRSLGSDSKE

SEQ ID NO: 33596 - protein, 173 aa, Zea mays subsp. mays
  peptide (1)..(173): Ceres Seq. ID no. 12403167
  misc_feature (25)..(73): Pfam Name: Pfam Description:  Protamine P1
  misc_feature (1)..(171): NCBI GI NO: 7446336 NR Description: probable arginine/serine-rich splicing factor -alfalfa
  misc_feature (1)..(172): NCBI GI NO: 33146621 NR Description: putative splicing factor, arginine/serine-rich 2
  misc_feature (1)..(173): NCBI GI NO: 15237641 NR Description: arginine/serine-rich splicing factor SC35
  misc_feature (1)..(172): NCBI GI NO: 9843653 NR Description: splicing factor SC35 [Arabidopsis thaliana]
  misc_feature (1)..(132): NCBI GI NO: 28279759 NR Description: Similar to splicing factor, arginine/serine-rich 2
  misc_feature (1)..(132): NCBI GI NO: 266991 NR Description: Splicing factor, arginine/serine-rich 2
  misc_feature (1)..(132): NCBI GI NO: 6755478 NR Description: splicing factor, arginine/serine-rich 2
  misc_feature (1)..(132): NCBI GI NO: 28175397 NR Description: Unknown (protein for MGC:53177) [Xenopus laevis]
  misc_feature (1)..(132): NCBI GI NO: 39794351 NR Description: Unknown (protein for MGC:75633)
  misc_feature (1)..(132): NCBI GI NO: 4506899 NR Description: splicing factor, arginine/serine-rich 2
MVQFAKYGPNAVPIHKGRVKEGVEKSRDRSRSRSPRPRHRDRDDRRRSRSRSRSRSRERHVHDRDRDYRRRSRSRSRSMSSSPDHKSHRRARDDVKRKSRSKSRSKSRSRSRSRSYHSSSPARRSASPPKSPLPQRSPTPEKHANGKDSPLSRSVSPSPKRASSRSLGSDSKE

SEQ ID NO: 33597 - protein, 139 aa, Zea mays subsp. mays
  peptide (1)..(139): Ceres Seq. ID no. 12403168
RFGLSRNSFPCPPPLAELSPPTPSHHLHSHTRFRCSLPLPLPRGGAINPRPRRRRRRRRDVALWKDGSAGHPRHLLAARPQHQLPNHGRRPFPALRALRQGRRRLHPEGPQDRGLEGFCVRAVQVRRRGAEGYRSARWP

SEQ ID NO: 33598 - DNA, 935 bp, Zea mays subsp. mays
  misc_feature (1)..(935): Ceres Seq. ID no. 12402277
aagctcactcaagaacccgccacgaccaaacagtacgtagtgcgcgtcgagctagcccggcaggtagacatggcgcccagcaaggccgtggtggcacacctcgtggtgctattagtgccctgcttgctctccgtgctgcccttctcctccctcgctctgacccaggacttatgcgtcgcgaacatgctcctcccagatacgccgtccggctacccgtgcaagcccaaaggtctcgtcagctccgacgacttctactccgacgccttggccaggcctggcccggtcatcgcccccttcaacaccagcctggcctccgccgccgttaaacagctccccggcctgaatggcctcggcatcgccgccacgcgtgtcgatgtccaaccaggtggggtcgtgcccatgcacaaccacccggaagcctcggagctcatcttcctcctcgaaggaacccttttcgctggcttcatcagcgccgaaaccaataaggcctatgtcaagagcctaaagaagggcgacctctacgtgttcccgcagggcttgctgcacttccagttcaacaccggcaacacgaccgccaccgccatcgccgcgtacagcaaccagaaccccggcctacagatcgctgtctatgcactcttcggcaacaccctcacagtggaaacggtgaataagaccaccttcgtaacaaaggaggaggtcatgaggctcaaggacctcttcggccagtcttcagtgccatcctgattaacgctcgccaggattaattaatatgcatgctcctagatgtacgtttatatatggggtgtaataataaattgcgtgtgtgtgcacgtacgttcaacctatatcgtcatcgtcatgtagtatatatttctcgactatatatattgtaccctcgggaaggaccgatgtttaaggcatcagtggctctattt

SEQ ID NO: 33599 - protein, 247 aa, Zea mays subsp. mays
  peptide (1)..(247): Ceres Seq. ID no. 12402278
  misc_feature (89)..(233): Pfam Name: Pfam Description:  Cupin
  misc_feature (37)..(243): NCBI GI NO: 13160411 NR Description: adenosine diphosphate glucose pyrophosphatase
  misc_feature (37)..(243): NCBI GI NO: 7447326 NR Description: germin-like protein 1 - barley
  misc_feature (37)..(243): NCBI GI NO: 21322655 NR Description: adenosine diphosphate glucose pyrophosphatase
  misc_feature (36)..(243): NCBI GI NO: 2655293 NR Description: germin-like protein 5 [Oryza sativa]
  misc_feature (36)..(243): NCBI GI NO: 7447327 NR Description: germin-like protein - rice
  misc_feature (36)..(243): NCBI GI NO: 4239821 NR Description: germin-like protein 1 [Oryza sativa]
  misc_feature (42)..(241): NCBI GI NO: 31711507 NR Description: 24K germin like protein [Nicotiana tabacum]
  misc_feature (42)..(241): NCBI GI NO: 1934726 NR Description: germin-like protein [Arabidopsis thaliana]
  misc_feature (42)..(241): NCBI GI NO: 15218535 NR Description: germin-like protein; protein id: At1g72610
  misc_feature (42)..(241): NCBI GI NO: 17473703 NR Description: germin-like protein [Arabidopsis thaliana]
KLTQEPATTKQYVVRVELARQVDMAPSKAVVAHLVVLLVPCLLSVLPFSSLALTQDLCVANMLLPDTPSGYPCKPKGLVSSDDFYSDALARPGPVIAPFNTSLASAAVKQLPGLNGLGIAATRVDVQPGGVVPMHNHPEASELIFLLEGTLFAGFISAETNKAYVKSLKKGDLYVFPQGLLHFQFNTGNTTATAIAAYSNQNPGLQIAVYALFGNTLTVETVNKTTFVTKEEVMRLKDLFGQSSVPS

SEQ ID NO: 33600 - protein, 224 aa, Zea mays subsp. mays
  peptide (1)..(224): Ceres Seq. ID no. 12402279
  misc_feature (66)..(210): Pfam Name: Pfam Description:  Cupin
  misc_feature (14)..(220): NCBI GI NO: 13160411 NR Description: adenosine diphosphate glucose pyrophosphatase
  misc_feature (14)..(220): NCBI GI NO: 7447326 NR Description: germin-like protein 1 - barley
  misc_feature (14)..(220): NCBI GI NO: 21322655 NR Description: adenosine diphosphate glucose pyrophosphatase
  misc_feature (13)..(220): NCBI GI NO: 2655293 NR Description: germin-like protein 5 [Oryza sativa]
  misc_feature (13)..(220): NCBI GI NO: 7447327 NR Description: germin-like protein - rice
  misc_feature (13)..(220): NCBI GI NO: 4239821 NR Description: germin-like protein 1 [Oryza sativa]
  misc_feature (19)..(218): NCBI GI NO: 31711507 NR Description: 24K germin like protein [Nicotiana tabacum]
  misc_feature (19)..(218): NCBI GI NO: 1934726 NR Description: germin-like protein [Arabidopsis thaliana]
  misc_feature (19)..(218): NCBI GI NO: 15218535 NR Description: germin-like protein; protein id: At1g72610
  misc_feature (19)..(218): NCBI GI NO: 17473703 NR Description: germin-like protein [Arabidopsis thaliana]
MAPSKAVVAHLVVLLVPCLLSVLPFSSLALTQDLCVANMLLPDTPSGYPCKPKGLVSSDDFYSDALARPGPVIAPFNTSLASAAVKQLPGLNGLGIAATRVDVQPGGVVPMHNHPEASELIFLLEGTLFAGFISAETNKAYVKSLKKGDLYVFPQGLLHFQFNTGNTTATAIAAYSNQNPGLQIAVYALFGNTLTVETVNKTTFVTKEEVMRLKDLFGQSSVPS

SEQ ID NO: 33601 - protein, 186 aa, Zea mays subsp. mays
  peptide (1)..(186): Ceres Seq. ID no. 12402280
  misc_feature (28)..(172): Pfam Name: Pfam Description:  Cupin
  misc_feature (1)..(182): NCBI GI NO: 13160411 NR Description: adenosine diphosphate glucose pyrophosphatase
  misc_feature (1)..(182): NCBI GI NO: 7447326 NR Description: germin-like protein 1 - barley
  misc_feature (1)..(182): NCBI GI NO: 21322655 NR Description: adenosine diphosphate glucose pyrophosphatase
  misc_feature (1)..(182): NCBI GI NO: 2655293 NR Description: germin-like protein 5 [Oryza sativa]
  misc_feature (1)..(182): NCBI GI NO: 7447327 NR Description: germin-like protein - rice
  misc_feature (1)..(182): NCBI GI NO: 4239821 NR Description: germin-like protein 1 [Oryza sativa]
  misc_feature (1)..(180): NCBI GI NO: 31711507 NR Description: 24K germin like protein [Nicotiana tabacum]
  misc_feature (1)..(180): NCBI GI NO: 1934726 NR Description: germin-like protein [Arabidopsis thaliana]
  misc_feature (1)..(180): NCBI GI NO: 17473703 NR Description: germin-like protein [Arabidopsis thaliana]
  misc_feature (1)..(180): NCBI GI NO: 15218535 NR Description: germin-like protein; protein id: At1g72610
MLLPDTPSGYPCKPKGLVSSDDFYSDALARPGPVIAPFNTSLASAAVKQLPGLNGLGIAATRVDVQPGGVVPMHNHPEASELIFLLEGTLFAGFISAETNKAYVKSLKKGDLYVFPQGLLHFQFNTGNTTATAIAAYSNQNPGLQIAVYALFGNTLTVETVNKTTFVTKEEVMRLKDLFGQSSVPS

SEQ ID NO: 33602 - DNA, 802 bp, Zea mays subsp. mays
  misc_feature (1)..(802): Ceres Seq. ID no. 12404643
acagggactgtgagatcaagtcaatagctccatatggtgcttttgttgaaattgctccagggcgtgagggtttatgtcatatcagtgagttaagttcgggctggttggccaaggctgaggatgcttttaaagttggagatcgcatagacgtcaagcttattgagataaacgataagggtcaacttcggctaagttctcgagctttgcttccagacgtggattccgaatccaacataggttcaacaaaagaaaaggtgccacaaaaagatgatgtcataaaaatgacaacaaagagaccaaggcgcaagaaacagtctgagccgtctggagctgaaaatgccacaacaaaggctcttgcgaaaagcgctgctgctccagctggttcaaagggcagtgaagcgtagtaggatgtggacagcttggtgccttaatcagacgattgactggccaagctagggatacatccttcaaccgactatatgatggtcataggcatgagaaagagttcagacatgagggcacaactgtctaaacaggaatataatggagaagaattggttgatcgacctcgatgttagacaggtagagtgtctggttgatgcgttacacaaggcgtgcgcctatccagcagtaatggtgcccaggactggatcgtcgccctggttagcagaacagatcgcgtaaccaccatggaaacttgattgtaatcgccagaatagtttgtttacctttacctttgtgttgtaccgttctgtactaactacatattcttgccaatccggccaatgcaaactactgcgtg

SEQ ID NO: 33603 - protein, 133 aa, Zea mays subsp. mays
  peptide (1)..(133): Ceres Seq. ID no. 12404644
  misc_feature (1)..(66): Pfam Name: Pfam Description:  S1 RNA binding domain
  misc_feature (1)..(132): NCBI GI NO: 34395006 NR Description: putative polynucleotide phosphorylase
  misc_feature (1)..(117): NCBI GI NO: 7488820 NR Description: polyribonucleotide nucleotidyltransferase (EC2
  misc_feature (1)..(129): NCBI GI NO: 30678905 NR Description: polyribonucleotide nucleotidyltransferase
  misc_feature (1)..(129): NCBI GI NO: 6006870 NR Description: putative polynucleotide phosphorylase
  misc_feature (1)..(129): NCBI GI NO: 7413616 NR Description: putative polynucleotide phosphorylase
  misc_feature (1)..(63): NCBI GI NO: 1924972 NR Description: polyribonucleotide phophorylase
  misc_feature (4)..(108): NCBI GI NO: 22992785 NR Description: hypothetical protein [Enterococcus faecium]
  misc_feature (5)..(71): NCBI GI NO: 15605577 NR Description: Polyribonucleotide Nucleotidyltransferase
  misc_feature (5)..(69): NCBI GI NO: 15618907 NR Description: Polyribonucleotide Nucleotidyltransferase
  misc_feature (5)..(69): NCBI GI NO: 15834850 NR Description: polyribonucleotide nucleotidyltransferase
RDCEIKSIAPYGAFVEIAPGREGLCHISELSSGWLAKAEDAFKVGDRIDVKLIEINDKGQLRLSSRALLPDVDSESNIGSTKEKVPQKDDVIKMTTKRPRRKKQSEPSGAENATTKALAKSAAAPAGSKGSEA

SEQ ID NO: 33604 - DNA, 1314 bp, Zea mays subsp. mays
  misc_feature (1)..(1314): Ceres Seq. ID no. 12341153
atcaagtctcatgtgcacgcctccattagcctcgcattgacgcggtccgcaactcctctaaacccttcctctccctccggcgccggcgccgacatggccgtccactacctcctccgccgcggggtctccggtggctcactgctccaccctatccgcggtctcttcctcgcctccaaggagcttgggaggcgtccgttgggctctgcggcggcgggagacgcagcggccgagctgaggggcgcgcgggaggacgtcaggcagctgctcaaggccacctcctgccatcccatcctggttcgattaggttggcatgatgctggtacatatgacaagaacattaccgagtggcccaagtgtggtggagctaatggtagcttgagattcgaagtcgagttgaagcatggggccaatgctggtcttgtgaatgctctgaagctgatccaacctatcaaggacaagttttcaggtgttacctatgcagatctgtttcagcttgccagcgccacagccattgaggaagcaggtggccccaaaattcctatgatctatggaagggttgatgttattgcccccgaacaatgcccaccagaggggaggcttcctgctgctggcccaccttcacccgcggaacatttgcgtgaagtattctacagaatgggcctgaacgacaaggaaatcgttgcactgtcaggagctcatacacttggacgtgcaagaccagagcgtagtggctggggtaaatcagaaacaaagtacactaaagatgggcctggtgcacctgggggacaatcttggacatctcaatggctcaagtttgacaacagctatttcaaggcatcgaagaaaggcgagatgaagacctcctagttctgcctactgatgctgtgctgtttgaggattcctcattcaagatctatgctacaaaatatgccaaggatcaggacacatttttcgaggactacgctgaagctcatgccaaattgagcaatcttggggcaaagtttgacccgccaaagggtatctcactcgagtagttgtggatggaggtgactgaacaggaaggggtcatgtttctttgcgtgaccattttcgaaggttggcaaggaaaagttattgtagttgaatgatagctccacaaattggattcaccgattaaaggattttttttcttagcgtgccctgtttttttagtagtgtcctacactatgaataaagcaacacctgtcattttaagatttgttacactaactaactgaaagcttccgaatcctaagtggtttcggtgattaatgacgacataagaccgttataact

SEQ ID NO: 33605 - protein, 288 aa, Zea mays subsp. mays
  peptide (1)..(288): Ceres Seq. ID no. 12341154
  misc_feature (81)..(282): Pfam Name: Pfam Description:  Peroxidase
  misc_feature (70)..(282): NCBI GI NO: 4996602 NR Description: thylakoid-bound ascorbate peroxidase
  misc_feature (70)..(282): NCBI GI NO: 4996604 NR Description: stromal ascorbate peroxidase [Nicotiana tabacum]
  misc_feature (70)..(282): NCBI GI NO: 3202026 NR Description: stromal L-ascorbate peroxidase precursor
  misc_feature (70)..(282): NCBI GI NO: 7484621 NR Description: L-ascorbate peroxidase (EC 1
  misc_feature (70)..(282): NCBI GI NO: 34809902 NR Description: Chain A
  misc_feature (68)..(282): NCBI GI NO: 24496465 NR Description: stromal ascorbate peroxidase [Retama raetam]
  misc_feature (68)..(282): NCBI GI NO: 32879781 NR Description: stromal ascorbate peroxidase
  misc_feature (77)..(282): NCBI GI NO: 2392025 NR Description: stromal ascorbate peroxidase
  misc_feature (77)..(282): NCBI GI NO: 7484766 NR Description: L-ascorbate peroxidase (EC 1
  misc_feature (70)..(282): NCBI GI NO: 21039134 NR Description: ascorbate peroxidase [Lycopersicon esculentum]
IKSHVHASISLALTRSATPLNPSSPSGAGADMAVHYLLRRGVSGGSLLHPIRGLFLASKELGRRPLGSAAAGDAAAELRGAREDVRQLLKATSCHPILVRLGWHDAGTYDKNITEWPKCGGANGSLRFEVELKHGANAGLVNALKLIQPIKDKFSGVTYADLFQLASATAIEEAGGPKIPMIYGRVDVIAPEQCPPEGRLPAAGPPSPAEHLREVFYRMGLNDKEIVALSGAHTLGRARPERSGWGKSETKYTKDGPGAPGGQSWTSQWLKFDNSYFKASKKGEMKTS

SEQ ID NO: 33606 - protein, 257 aa, Zea mays subsp. mays
  peptide (1)..(257): Ceres Seq. ID no. 12341155
  misc_feature (50)..(251): Pfam Name: Pfam Description:  Peroxidase
  misc_feature (39)..(251): NCBI GI NO: 4996602 NR Description: thylakoid-bound ascorbate peroxidase
  misc_feature (39)..(251): NCBI GI NO: 4996604 NR Description: stromal ascorbate peroxidase [Nicotiana tabacum]
  misc_feature (39)..(251): NCBI GI NO: 3202026 NR Description: stromal L-ascorbate peroxidase precursor
  misc_feature (39)..(251): NCBI GI NO: 7484621 NR Description: L-ascorbate peroxidase (EC 1
  misc_feature (39)..(251): NCBI GI NO: 34809902 NR Description: Chain A
  misc_feature (37)..(251): NCBI GI NO: 24496465 NR Description: stromal ascorbate peroxidase [Retama raetam]
  misc_feature (37)..(251): NCBI GI NO: 32879781 NR Description: stromal ascorbate peroxidase
  misc_feature (46)..(251): NCBI GI NO: 2392025 NR Description: stromal ascorbate peroxidase
  misc_feature (46)..(251): NCBI GI NO: 7484766 NR Description: L-ascorbate peroxidase (EC 1
  misc_feature (39)..(251): NCBI GI NO: 21039134 NR Description: ascorbate peroxidase [Lycopersicon esculentum]
MAVHYLLRRGVSGGSLLHPIRGLFLASKELGRRPLGSAAAGDAAAELRGAREDVRQLLKATSCHPILVRLGWHDAGTYDKNITEWPKCGGANGSLRFEVELKHGANAGLVNALKLIQPIKDKFSGVTYADLFQLASATAIEEAGGPKIPMIYGRVDVIAPEQCPPEGRLPAAGPPSPAEHLREVFYRMGLNDKEIVALSGAHTLGRARPERSGWGKSETKYTKDGPGAPGGQSWTSQWLKFDNSYFKASKKGEMKTS

SEQ ID NO: 33607 - DNA, 1377 bp, Zea mays subsp. mays
  misc_feature (1)..(1377): Ceres Seq. ID no. 12435077
aacttcaaaggcataggagtaacagtcttcgcacaaatattccctcccccaaggcccgaagccccgaaactttccggatctttcttccgccgcttcatcttctttgcgcaaaactagttttgtttctcgttcttctcttcgatttcggccgaataaagatggcgtcggctgcgcgcctcctcgcgccgttctccaggcgcggcgtcgtctctgtggctctggcgggggtggagaggcggcggccggaggcggcgtcgctcatgggggcgcctgtgctggctacggtggaagcctgcgcttcgatcaaggtcattcctttgtcgaatcagctggctcgatactcgacaactgcatttcagaggtttgggttttcaacttcagccccccaacaagatgataaggagacaaacaagcacacagatgatggggttaatagaagtgttggagcaagtactggagcttcaagtgaagccaataatgtgcctggaaccgagaaggcacaggaagcagattcagaagacctagacctatcaaaggaggaccttgtgaagctgcttcttgagaaagacgaatcattgaagtctaaagatgaagagtttaaagatatgaaggataaggtcctacgcagctatgctgagatggagaatgtccttgccagaacaaagcgtgagtcagagaacaccaagaagtatgccatacagagcttctccaagagcttgttagatgttgcagacaatttgtctcgggcatcatctgttgtcaaggcaagtttctcaaagatagattcatctaacgattctgatgaagctgtaacactactgaaaaccctactagagggtgttgagatgactgagaagcaacttggagaggtcttcaagaagtttggagttgaaaagtttgatcctttgaatgagaagtttgatccaaataggcactatgccattttccaaattcctgatccttcaaaaccatcaggaactgttgctgctgttgtgaaggttggctacatgttacatgatcgtgttcttcgccccgctgaagttggtgtcactgaaggtggtccaactgaagaagagccagaggagtaatctagatcaaacggaggttgctggctgcacgtatatctatgactactgccctttattggttggataagcatacatatcataggttatgtttttaactagatctgtgaggcaaatcactatttttgtagcatgttcaacgaggcaatttgttcaagctagtccagaactctcctttttcttgctcggtaataaaaacgagattgtagaacatgtacatcaccgaaattgcttgccaaagacggattattgcagcctgcattaataggaatactgacaatgagcgtgccgc

SEQ ID NO: 33608 - protein, 361 aa, Zea mays subsp. mays
  peptide (1)..(361): Ceres Seq. ID no. 12435078
  misc_feature (157)..(351): Pfam Name: Pfam Description:  GrpE
  misc_feature (53)..(361): NCBI GI NO: 38636943 NR Description: putative chaperone GrpE
  misc_feature (55)..(358): NCBI GI NO: 3851638 NR Description: chaperone GrpE type 1 [Nicotiana tabacum]
  misc_feature (114)..(361): NCBI GI NO: 7485329 NR Description: hypothetical protein F10M23
  misc_feature (114)..(361): NCBI GI NO: 18416821 NR Description: grpE like protein; protein id: At4g26780
  misc_feature (55)..(350): NCBI GI NO: 3851640 NR Description: chaperone GrpE type 2 [Nicotiana tabacum]
  misc_feature (57)..(361): NCBI GI NO: 21554173 NR Description: chaperone GrpE-like protein [Arabidopsis thaliana]
  misc_feature (57)..(361): NCBI GI NO: 15240475 NR Description: chaperone GrpE-like protein; protein id:At5g55200
  misc_feature (114)..(361): NCBI GI NO: 1669597 NR Description: AR192 [Arabidopsis thaliana]
  misc_feature (105)..(351): NCBI GI NO: 23482781 NR Description: co-chaperone GrpE, putative
  misc_feature (198)..(353): NCBI GI NO: 22962327 NR Description: hypothetical protein [Rhodopseudomonas palustris]
LQRHRSNSLRTNIPSPKARSPETFRIFLPPLHLLCAKLVLFLVLLFDFGRIKMASAARLLAPFSRRGVVSVALAGVERRRPEAASLMGAPVLATVEACASIKVIPLSNQLARYSTTAFQRFGFSTSAPQQDDKETNKHTDDGVNRSVGASTGASSEANNVPGTEKAQEADSEDLDLSKEDLVKLLLEKDESLKSKDEEFKDMKDKVLRSYAEMENVLARTKRESENTKKYAIQSFSKSLLDVADNLSRASSVVKASFSKIDSSNDSDEAVTLLKTLLEGVEMTEKQLGEVFKKFGVEKFDPLNEKFDPNRHYAIFQIPDPSKPSGTVAAVVKVGYMLHDRVLRPAEVGVTEGGPTEEEPEE

SEQ ID NO: 33609 - protein, 309 aa, Zea mays subsp. mays
  peptide (1)..(309): Ceres Seq. ID no. 12435079
  misc_feature (105)..(299): Pfam Name: Pfam Description:  GrpE
  misc_feature (1)..(309): NCBI GI NO: 38636943 NR Description: putative chaperone GrpE
  misc_feature (3)..(306): NCBI GI NO: 3851638 NR Description: chaperone GrpE type 1 [Nicotiana tabacum]
  misc_feature (62)..(309): NCBI GI NO: 7485329 NR Description: hypothetical protein F10M23
  misc_feature (62)..(309): NCBI GI NO: 18416821 NR Description: grpE like protein; protein id: At4g26780
  misc_feature (3)..(298): NCBI GI NO: 3851640 NR Description: chaperone GrpE type 2 [Nicotiana tabacum]
  misc_feature (5)..(309): NCBI GI NO: 21554173 NR Description: chaperone GrpE-like protein [Arabidopsis thaliana]
  misc_feature (5)..(309): NCBI GI NO: 15240475 NR Description: chaperone GrpE-like protein; protein id:At5g55200
  misc_feature (62)..(309): NCBI GI NO: 1669597 NR Description: AR192 [Arabidopsis thaliana]
  misc_feature (53)..(299): NCBI GI NO: 23482781 NR Description: co-chaperone GrpE, putative
  misc_feature (146)..(301): NCBI GI NO: 22962327 NR Description: hypothetical protein [Rhodopseudomonas palustris]
MASAARLLAPFSRRGVVSVALAGVERRRPEAASLMGAPVLATVEACASIKVIPLSNQLARYSTTAFQRFGFSTSAPQQDDKETNKHTDDGVNRSVGASTGASSEANNVPGTEKAQEADSEDLDLSKEDLVKLLLEKDESLKSKDEEFKDMKDKVLRSYAEMENVLARTKRESENTKKYAIQSFSKSLLDVADNLSRASSVVKASFSKIDSSNDSDEAVTLLKTLLEGVEMTEKQLGEVFKKFGVEKFDPLNEKFDPNRHYAIFQIPDPSKPSGTVAAVVKVGYMLHDRVLRPAEVGVTEGGPTEEEPEE

SEQ ID NO: 33610 - protein, 275 aa, Zea mays subsp. mays
  peptide (1)..(275): Ceres Seq. ID no. 12435080
  misc_feature (71)..(265): Pfam Name: Pfam Description:  GrpE
  misc_feature (1)..(275): NCBI GI NO: 38636943 NR Description: putative chaperone GrpE
  misc_feature (1)..(272): NCBI GI NO: 3851638 NR Description: chaperone GrpE type 1 [Nicotiana tabacum]
  misc_feature (28)..(275): NCBI GI NO: 7485329 NR Description: hypothetical protein F10M23
  misc_feature (28)..(275): NCBI GI NO: 18416821 NR Description: grpE like protein; protein id: At4g26780
  misc_feature (1)..(264): NCBI GI NO: 3851640 NR Description: chaperone GrpE type 2 [Nicotiana tabacum]
  misc_feature (1)..(275): NCBI GI NO: 21554173 NR Description: chaperone GrpE-like protein [Arabidopsis thaliana]
  misc_feature (1)..(275): NCBI GI NO: 15240475 NR Description: chaperone GrpE-like protein; protein id:At5g55200
  misc_feature (28)..(275): NCBI GI NO: 1669597 NR Description: AR192 [Arabidopsis thaliana]
  misc_feature (19)..(265): NCBI GI NO: 23482781 NR Description: co-chaperone GrpE, putative
  misc_feature (112)..(267): NCBI GI NO: 22962327 NR Description: hypothetical protein [Rhodopseudomonas palustris]
MGAPVLATVEACASIKVIPLSNQLARYSTTAFQRFGFSTSAPQQDDKETNKHTDDGVNRSVGASTGASSEANNVPGTEKAQEADSEDLDLSKEDLVKLLLEKDESLKSKDEEFKDMKDKVLRSYAEMENVLARTKRESENTKKYAIQSFSKSLLDVADNLSRASSVVKASFSKIDSSNDSDEAVTLLKTLLEGVEMTEKQLGEVFKKFGVEKFDPLNEKFDPNRHYAIFQIPDPSKPSGTVAAVVKVGYMLHDRVLRPAEVGVTEGGPTEEEPEE

SEQ ID NO: 33611 - DNA, 1288 bp, Zea mays subsp. mays
  misc_feature (1)..(1288): Ceres Seq. ID no. 12351736
acacacacccacacaccccgcttcacgttctcaataatggcgccgttcccacgtcgtcttccggccgccgtgccacttctcctcctcctcggcgccgcagtggccagcgccggcgcggaggacaccgatggcggcaactcccgccggcggcactcccgcttgctgttcgcgttcggcaactcgctcaccgacacgggaaacggggccatcttcccggtgactgcaggcgggccattcacccggccgccgtacggggagaccttcttcggtcgtcccagcggccgggcttgcaacggcaggctcgtcctcgacttcctcgtggaggagctgaaggtgccagagccgacgccgtacctggccggcagtacggccgccgactttgcgaagaacggggccaactttgcgctgggtggtgcaacggcgctcgaccaggcgttcttagcaagcaaggggataaagtcgttcgtgcccatctctctcatcaacgagacgagctggttccagaacgtttcgaagctactggacgcgtcacactacgatgagcgtaagatcatggcgaagtcgatcttctacgtcggggagatcggtgtcaacgactacttcgccgccctaagcaacaacgactccgtcgacgtcgcggtcagcctggtgccgcacatcatcgacaccatccgttcggccctgaccgtcatgatcgatgccggggcgaggacagtggtgatcacggggatgctaccgatcggctgcgagccgcagcagctggcccagttcgcaggcggccccggccggcgactacgaccctaccaccggctgcatcacgcggttcaaccagctcgccgagcaccacaaccacatgctgaggatgatgctgagggagctgcggaccaagtaccgcaggcgcaggcccctcaccctccactacgccgacatctaccgccccgtgatcgaggccgtcgcgtcccccgcctcgtacggcttcggcgacacgccgctggcagcgtgctgcgggggcggtggcggccccaacaacttcaacttcatcgccttctgcggcacgccggcgtcgaccacgtgcaccgacccgtccaagttcgtctcctgggacgggatccacttcaccgaggctaccaacaggcttctcgctcgtaaaatgcttcaggaactgctaagccgtggagcttacaatgttgcaatctgatttttctatgcccgcgagtcgtatcaacgtgtttcccatagcggatcggacctagcgtggaacctcttgtgtaataaaataataagtgtc

SEQ ID NO: 33612 - protein, 382 aa, Zea mays subsp. mays
  peptide (1)..(382): Ceres Seq. ID no. 12351737
  misc_feature (55)..(267): Pfam Name: Pfam Description:  GDSL-like Lipase/Acylhydrolase
  misc_feature (14)..(267): NCBI GI NO: 37533976 NR Description: putative lipase
  misc_feature (13)..(260): NCBI GI NO: 37533968 NR Description: putative lipase
  misc_feature (13)..(262): NCBI GI NO: 37533980 NR Description: putative lipase
  misc_feature (26)..(263): NCBI GI NO: 37533984 NR Description: putative lipase
  misc_feature (26)..(263): NCBI GI NO: 15451642 NR Description: Putative lipase [Oryza sativa]
  misc_feature (26)..(257): NCBI GI NO: 15218751 NR Description: lipase, putative; protein id: At1g28640.1
  misc_feature (58)..(257): NCBI GI NO: 25405771 NR Description: hypothetical protein T22H22.20
  misc_feature (18)..(229): NCBI GI NO: 34912612 NR Description: P0046B10.23
  misc_feature (20)..(255): NCBI GI NO: 34894838 NR Description: putative lipase homolog
  misc_feature (55)..(260): NCBI GI NO: 34911826 NR Description: lipase-like protein
THTHTPRFTFSIMAPFPRRLPAAVPLLLLLGAAVASAGAEDTDGGNSRRRHSRLLFAFGNSLTDTGNGAIFPVTAGGPFTRPPYGETFFGRPSGRACNGRLVLDFLVEELKVPEPTPYLAGSTAADFAKNGANFALGGATALDQAFLASKGIKSFVPISLINETSWFQNVSKLLDASHYDERKIMAKSIFYVGEIGVNDYFAALSNNDSVDVAVSLVPHIIDTIRSALTVMIDAGARTVVITGMLPIGCEPQQLAQFAGGPGRRLRPYHRLHHAVQPARRAPQPHAEDDAEGAADQVPQAQAPHPPLRRHLPPRDRGRRVPRLVRLRRHAAGSVLRGRWRPQQLQLHRLLRHAGVDHVHRPVQVRLLGRDPLHRGYQQASRS

SEQ ID NO: 33613 - protein, 370 aa, Zea mays subsp. mays
  peptide (1)..(370): Ceres Seq. ID no. 12351738
  misc_feature (43)..(255): Pfam Name: Pfam Description:  GDSL-like Lipase/Acylhydrolase
  misc_feature (2)..(255): NCBI GI NO: 37533976 NR Description: putative lipase
  misc_feature (1)..(248): NCBI GI NO: 37533968 NR Description: putative lipase
  misc_feature (1)..(250): NCBI GI NO: 37533980 NR Description: putative lipase
  misc_feature (14)..(251): NCBI GI NO: 37533984 NR Description: putative lipase
  misc_feature (14)..(251): NCBI GI NO: 15451642 NR Description: Putative lipase [Oryza sativa]
  misc_feature (14)..(245): NCBI GI NO: 15218751 NR Description: lipase, putative; protein id: At1g28640.1
  misc_feature (46)..(245): NCBI GI NO: 25405771 NR Description: hypothetical protein T22H22.20
  misc_feature (6)..(217): NCBI GI NO: 34912612 NR Description: P0046B10.23
  misc_feature (8)..(243): NCBI GI NO: 34894838 NR Description: putative lipase homolog
  misc_feature (43)..(248): NCBI GI NO: 34911826 NR Description: lipase-like protein
MAPFPRRLPAAVPLLLLLGAAVASAGAEDTDGGNSRRRHSRLLFAFGNSLTDTGNGAIFPVTAGGPFTRPPYGETFFGRPSGRACNGRLVLDFLVEELKVPEPTPYLAGSTAADFAKNGANFALGGATALDQAFLASKGIKSFVPISLINETSWFQNVSKLLDASHYDERKIMAKSIFYVGEIGVNDYFAALSNNDSVDVAVSLVPHIIDTIRSALTVMIDAGARTVVITGMLPIGCEPQQLAQFAGGPGRRLRPYHRLHHAVQPARRAPQPHAEDDAEGAADQVPQAQAPHPPLRRHLPPRDRGRRVPRLVRLRRHAAGSVLRGRWRPQQLQLHRLLRHAGVDHVHRPVQVRLLGRDPLHRGYQQASRS

SEQ ID NO: 33614 - protein, 198 aa, Zea mays subsp. mays
  peptide (1)..(198): Ceres Seq. ID no. 12351739
  misc_feature (1)..(83): Pfam Name: Pfam Description:  GDSL-like Lipase/Acylhydrolase
  misc_feature (1)..(83): NCBI GI NO: 37533976 NR Description: putative lipase
  misc_feature (1)..(76): NCBI GI NO: 37533968 NR Description: putative lipase
  misc_feature (1)..(78): NCBI GI NO: 37533980 NR Description: putative lipase
  misc_feature (1)..(79): NCBI GI NO: 37533984 NR Description: putative lipase
  misc_feature (1)..(79): NCBI GI NO: 15451642 NR Description: Putative lipase [Oryza sativa]
  misc_feature (1)..(73): NCBI GI NO: 15218751 NR Description: lipase, putative; protein id: At1g28640.1
  misc_feature (1)..(73): NCBI GI NO: 25405771 NR Description: hypothetical protein T22H22.20
  misc_feature (1)..(45): NCBI GI NO: 34912612 NR Description: P0046B10.23
  misc_feature (1)..(71): NCBI GI NO: 34894838 NR Description: putative lipase homolog
  misc_feature (1)..(76): NCBI GI NO: 34911826 NR Description: lipase-like protein
MAKSIFYVGEIGVNDYFAALSNNDSVDVAVSLVPHIIDTIRSALTVMIDAGARTVVITGMLPIGCEPQQLAQFAGGPGRRLRPYHRLHHAVQPARRAPQPHAEDDAEGAADQVPQAQAPHPPLRRHLPPRDRGRRVPRLVRLRRHAAGSVLRGRWRPQQLQLHRLLRHAGVDHVHRPVQVRLLGRDPLHRGYQQASRS

SEQ ID NO: 33615 - DNA, 1942 bp, Zea mays subsp. mays
  misc_feature (1)..(1942): Ceres Seq. ID no. 12348812
gcggatgatttcctctcgtctcgtctctcccatactccagtcccgtccgtcttcacctgcgttccccgggtcccgacaagccgctgtaccagtcccgcccgcctgcgcacttctcccacccccgcgccgccttcggcgccggcgagccctcccgacgctcctcgagcgatccgtccctctcgcggcccttctctcagccgcttccagcccaaggggaggagagggagaggatgtggtcgtcgagccaggcgagcacgaggggcgtcgtggagatggggagggtggaggccgggccgtcgcatttccctaagagacccgcgcctcagaactccgccagggtcaatctgtcaaggacacacacagttaaacctacctctgctggcaaccgttcaggaatttctgttaaatgcaacttggggtggtcttctcaaccatcgcctgacttgaggcatcactttagaggatactcatcagcatcagaggcagttcttacttcccaatctgatgtgagaaaactgtttgttggcaatgaaaaaatcggtgttctcttgctgaatcttgggggcccagagactcttgacgatgtgcagcctttcttgtttaatctttttgcagatccggacattatccgtcttcctaggctctttcgctttctgcagaagccacttgcaaaattcatatcggtagtgagagcaccaaaaagtaaggaaggttatgcatccataggtggcggttctcctctacgacaaattactgatgcacaggctgaagcactgagggaggcattacatgggaaagatgttcctgccaacgtgtatgttggaatgcggtattggcatcccttcactgaagaagccatagaacaaataaaacgggatggaatcacgaaacttgttgtgttgcctctataccctcagttctccatatcaactagtggttcaagtctccgtttattggagagcatattcagagaggatgagtatctcgtgaatatgcaacatacagttataccttcctggtaccaacgtgaaggatatatcaaggctatggcaactttgattgaaaacgaattgacaaaatttcaagaaccccaaaaggttatgatatttttcagtgctcatggagttcctctggcatatgttgaagaagctggtgatccatataaagcagaaatggaagagtgtatcgatcttatcatggaagaactggaaaaaagaggaataacaaatccgtgcatacttgcttatcagagccgagttggaccagtggaatggctgaaaccgtacactgatgagacaattattgagcttgggcagaaaggggtaaagagcctgcttgctgttcctattagttttgttagcgaacacattgaaactttggaagaaatcgatgtggagtacaaagagttggctttagaatctggcatcaagcactggggacgggttccagcactaggttgtgaacccacattcatttcggatcttgctgatgctgttattgaaagcctaccttatgttggggcaatggcagtttccaatcttgaggctcggcagtctctcgtacccctcgggagcgtggaggagctgctagcagcatacgactcgaagcgcgatgagctccctccacccgtaatcgtgtgggagtggggctggacaaagagcgcggagacctggaatggccgtgcggcgatgctggccgtgctggctctcctggtgctggaagtgaccaccggcgaagggttcctgcatcaatggggaatcctgcctctgttccgctgagccgacaattctgttcatgatggggtcataattttgctgcagccgaaggaagttttgaacttctgatgctgtatatgaatcaatttgccttaaatcgtcgagggggaaagaggagaaaatggtaaaatatggacagaattcgacggtatatcatgttatattgt

SEQ ID NO: 33616 - protein, 515 aa, Zea mays subsp. mays
  peptide (1)..(515): Ceres Seq. ID no. 12348813
  misc_feature (102)..(426): Pfam Name: Pfam Description:  Ferrochelatase
  misc_feature (33)..(514): NCBI GI NO: 3913808 NR Description: Ferrochelatase II, chloroplast precursor
  misc_feature (98)..(514): NCBI GI NO: 12082085 NR Description: ferrochelatase [Cucumis sativus]
  misc_feature (52)..(515): NCBI GI NO: 15147828 NR Description: ferrochelatase [Nicotiana tabacum]
  misc_feature (82)..(512): NCBI GI NO: 15227742 NR Description: putative ferrochelatase precusor
  misc_feature (82)..(512): NCBI GI NO: 2623990 NR Description: ferrochelatase [Arabidopsis thaliana]
  misc_feature (59)..(486): NCBI GI NO: 7437212 NR Description: probable ferrochelatase (EC 4.99.1.1) - potato
  misc_feature (101)..(505): NCBI GI NO: 13249285 NR Description: ferrochelatase [Chlamydomonas reinhardtii]
  misc_feature (69)..(442): NCBI GI NO: 7437214 NR Description: probable ferrochelatase (EC 4.99.1.1) - barley
  misc_feature (69)..(442): NCBI GI NO: 1170242 NR Description: Ferrochelatase II, chloroplast precursor
  misc_feature (78)..(433): NCBI GI NO: 1170239 NR Description: Ferrochelatase II, chloroplast precursor
MWSSSQASTRGVVEMGRVEAGPSHFPKRPAPQNSARVNLSRTHTVKPTSAGNRSGISVKCNLGWSSQPSPDLRHHFRGYSSASEAVLTSQSDVRKLFVGNEKIGVLLLNLGGPETLDDVQPFLFNLFADPDIIRLPRLFRFLQKPLAKFISVVRAPKSKEGYASIGGGSPLRQITDAQAEALREALHGKDVPANVYVGMRYWHPFTEEAIEQIKRDGITKLVVLPLYPQFSISTSGSSLRLLESIFREDEYLVNMQHTVIPSWYQREGYIKAMATLIENELTKFQEPQKVMIFFSAHGVPLAYVEEAGDPYKAEMEECIDLIMEELEKRGITNPCILAYQSRVGPVEWLKPYTDETIIELGQKGVKSLLAVPISFVSEHIETLEEIDVEYKELALESGIKHWGRVPALGCEPTFISDLADAVIESLPYVGAMAVSNLEARQSLVPLGSVEELLAAYDSKRDELPPPVIVWEWGWTKSAETWNGRAAMLAVLALLVLEVTTGEGFLHQWGILPLFR

SEQ ID NO: 33617 - protein, 501 aa, Zea mays subsp. mays
  peptide (1)..(501): Ceres Seq. ID no. 12348814
  misc_feature (88)..(412): Pfam Name: Pfam Description:  Ferrochelatase
  misc_feature (19)..(500): NCBI GI NO: 3913808 NR Description: Ferrochelatase II, chloroplast precursor
  misc_feature (84)..(500): NCBI GI NO: 12082085 NR Description: ferrochelatase [Cucumis sativus]
  misc_feature (38)..(501): NCBI GI NO: 15147828 NR Description: ferrochelatase [Nicotiana tabacum]
  misc_feature (68)..(498): NCBI GI NO: 15227742 NR Description: putative ferrochelatase precusor
  misc_feature (68)..(498): NCBI GI NO: 2623990 NR Description: ferrochelatase [Arabidopsis thaliana]
  misc_feature (45)..(472): NCBI GI NO: 7437212 NR Description: probable ferrochelatase (EC 4.99.1.1) - potato
  misc_feature (87)..(491): NCBI GI NO: 13249285 NR Description: ferrochelatase [Chlamydomonas reinhardtii]
  misc_feature (55)..(428): NCBI GI NO: 7437214 NR Description: probable ferrochelatase (EC 4.99.1.1) - barley
  misc_feature (55)..(428): NCBI GI NO: 1170242 NR Description: Ferrochelatase II, chloroplast precursor
  misc_feature (64)..(419): NCBI GI NO: 1170239 NR Description: Ferrochelatase II, chloroplast precursor
MGRVEAGPSHFPKRPAPQNSARVNLSRTHTVKPTSAGNRSGISVKCNLGWSSQPSPDLRHHFRGYSSASEAVLTSQSDVRKLFVGNEKIGVLLLNLGGPETLDDVQPFLFNLFADPDIIRLPRLFRFLQKPLAKFISVVRAPKSKEGYASIGGGSPLRQITDAQAEALREALHGKDVPANVYVGMRYWHPFTEEAIEQIKRDGITKLVVLPLYPQFSISTSGSSLRLLESIFREDEYLVNMQHTVIPSWYQREGYIKAMATLIENELTKFQEPQKVMIFFSAHGVPLAYVEEAGDPYKAEMEECIDLIMEELEKRGITNPCILAYQSRVGPVEWLKPYTDETIIELGQKGVKSLLAVPISFVSEHIETLEEIDVEYKELALESGIKHWGRVPALGCEPTFISDLADAVIESLPYVGAMAVSNLEARQSLVPLGSVEELLAAYDSKRDELPPPVIVWEWGWTKSAETWNGRAAMLAVLALLVLEVTTGEGFLHQWGILPLFR

SEQ ID NO: 33618 - protein, 317 aa, Zea mays subsp. mays
  peptide (1)..(317): Ceres Seq. ID no. 12348815
  misc_feature (1)..(228): Pfam Name: Pfam Description:  Ferrochelatase
  misc_feature (1)..(316): NCBI GI NO: 3913808 NR Description: Ferrochelatase II, chloroplast precursor
  misc_feature (1)..(316): NCBI GI NO: 12082085 NR Description: ferrochelatase [Cucumis sativus]
  misc_feature (1)..(317): NCBI GI NO: 15147828 NR Description: ferrochelatase [Nicotiana tabacum]
  misc_feature (1)..(314): NCBI GI NO: 15227742 NR Description: putative ferrochelatase precusor
  misc_feature (1)..(314): NCBI GI NO: 2623990 NR Description: ferrochelatase [Arabidopsis thaliana]
  misc_feature (1)..(288): NCBI GI NO: 7437212 NR Description: probable ferrochelatase (EC 4.99.1.1) - potato
  misc_feature (1)..(307): NCBI GI NO: 13249285 NR Description: ferrochelatase [Chlamydomonas reinhardtii]
  misc_feature (1)..(244): NCBI GI NO: 7437214 NR Description: probable ferrochelatase (EC 4.99.1.1) - barley
  misc_feature (1)..(244): NCBI GI NO: 1170242 NR Description: Ferrochelatase II, chloroplast precursor
  misc_feature (1)..(235): NCBI GI NO: 1170239 NR Description: Ferrochelatase II, chloroplast precursor
MRYWHPFTEEAIEQIKRDGITKLVVLPLYPQFSISTSGSSLRLLESIFREDEYLVNMQHTVIPSWYQREGYIKAMATLIENELTKFQEPQKVMIFFSAHGVPLAYVEEAGDPYKAEMEECIDLIMEELEKRGITNPCILAYQSRVGPVEWLKPYTDETIIELGQKGVKSLLAVPISFVSEHIETLEEIDVEYKELALESGIKHWGRVPALGCEPTFISDLADAVIESLPYVGAMAVSNLEARQSLVPLGSVEELLAAYDSKRDELPPPVIVWEWGWTKSAETWNGRAAMLAVLALLVLEVTTGEGFLHQWGILPLFR

SEQ ID NO: 33619 - DNA, 818 bp, Zea mays subsp. mays
  misc_feature (1)..(818): Ceres Seq. ID no. 12403859
ggaggattggtcctataaataacctgccacgcacaggttgctgcaacctacgccaaggagaaattgcaaacctgtcactagcgaagcatacttcgtcgagcacactcttgcaattaatccaccgagttcggtttagtagcatagcatcgacaataaatgtcgctcgtgagtcggcgcagcagcaacgtgttcgaccccttctccctcgacctctgggaccccttcgacatgttccgctccatcgtcccgtcggcggcctcctccggcggcggttccgagaccgccgccttcgccaacgcccgcgtggactggaaggagacgcccgaggcgcacgtgttcaaggccgacctccccggcatcaagaaggaggaggtcaaggtcgaggtggaggacggcaacgtgctcgtcatcagcggcaagcgcagcagggaggaggaggacaagaacgacaagtggcaccgcgtcgagcgcagcagcggccagttcatgaggcgcttccgcctgcctgagaacgccaaggtcgacgaggtgaaggctggcctcgagaacggcgtgctcacggtcaccgtgcccaagacggaggtgaagaagcccgaggtgaaggctatcgagatctctggttgaccgtccgttggacgtcgattggagctccgttgtactgctactggtccgtggatgtcctgcatgttgcactgcagcggaggatgttcgctgcgtcttctacgcatttgctctgtttgtgctgtggtcgtcttccccgtatatggtttgtgtattgtcccttatcgataataataaataaaatcaggctttacgtc

SEQ ID NO: 33620 - protein, 168 aa, Zea mays subsp. mays
  peptide (1)..(168): Ceres Seq. ID no. 12403860
RIGPINNLPRTGCCNLRQGEIANLSLAKHTSSSTLLQLIHRVRFSSIASTINVARESAQQQRVRPLLPRPLGPLRHVPLHRPVGGLLRRRFRDRRLRQRPRGLEGDARGARVQGRPPRHQEGGGQGRGGGRQRARHQRQAQQGGGGQERQVAPRRAQQRPVHEALPPA

SEQ ID NO: 33621 - protein, 155 aa, Zea mays subsp. mays
  peptide (1)..(155): Ceres Seq. ID no. 12403861
  misc_feature (1)..(155): NCBI GI NO: 100883 NR Description: heat shock protein 17.2 - maize
  misc_feature (1)..(155): NCBI GI NO: 123543 NR Description: 16.9 KD CLASS I HEAT SHOCK PROTEIN
  misc_feature (1)..(155): NCBI GI NO: 123545 NR Description: 16
  misc_feature (1)..(155): NCBI GI NO: 169799 NR Description: 16.9 kDa heat shock protein
  misc_feature (1)..(155): NCBI GI NO: 7441298 NR Description: heat shock protein 17.0 - pearl millet
  misc_feature (1)..(155): NCBI GI NO: 17942916 NR Description: Chain A
  misc_feature (1)..(154): NCBI GI NO: 445136 NR Description: heat shock protein 16.9
  misc_feature (1)..(155): NCBI GI NO: 7441297 NR Description: heat shock protein 16.9 - pearl millet
  misc_feature (1)..(155): NCBI GI NO: 100789 NR Description: heat shock protein 16.9B - wheat
  misc_feature (1)..(155): NCBI GI NO: 1536911 NR Description: 17 kDa class I small heat shock protein
MSLVSRRSSNVFDPFSLDLWDPFDMFRSIVPSAASSGGGSETAAFANARVDWKETPEAHVFKADLPGIKKEEVKVEVEDGNVLVISGKRSREEEDKNDKWHRVERSSGQFMRRFRLPENAKVDEVKAGLENGVLTVTVPKTEVKKPEVKAIEISG

SEQ ID NO: 33622 - protein, 131 aa, Zea mays subsp. mays
  peptide (1)..(131): Ceres Seq. ID no. 12403862
  misc_feature (1)..(131): NCBI GI NO: 100883 NR Description: heat shock protein 17.2 - maize
  misc_feature (1)..(131): NCBI GI NO: 123543 NR Description: 16.9 KD CLASS I HEAT SHOCK PROTEIN
  misc_feature (1)..(131): NCBI GI NO: 123545 NR Description: 16
  misc_feature (1)..(131): NCBI GI NO: 169799 NR Description: 16.9 kDa heat shock protein
  misc_feature (1)..(131): NCBI GI NO: 7441298 NR Description: heat shock protein 17.0 - pearl millet
  misc_feature (1)..(131): NCBI GI NO: 17942916 NR Description: Chain A
  misc_feature (1)..(130): NCBI GI NO: 445136 NR Description: heat shock protein 16.9
  misc_feature (1)..(131): NCBI GI NO: 7441297 NR Description: heat shock protein 16.9 - pearl millet
  misc_feature (1)..(131): NCBI GI NO: 100789 NR Description: heat shock protein 16.9B - wheat
  misc_feature (1)..(131): NCBI GI NO: 1536911 NR Description: 17 kDa class I small heat shock protein
MFRSIVPSAASSGGGSETAAFANARVDWKETPEAHVFKADLPGIKKEEVKVEVEDGNVLVISGKRSREEEDKNDKWHRVERSSGQFMRRFRLPENAKVDEVKAGLENGVLTVTVPKTEVKKPEVKAIEISG

SEQ ID NO: 33623 - DNA, 770 bp, Zea mays subsp. mays
  misc_feature (1)..(770): Ceres Seq. ID no. 12348776
agtcgcctccttcctgcgccgccgccgccgccgccgccgccgctaccaccgcctcgcggccgcctgcggctccgcgtttccgcacggaagttggtgaaggtttcttgaggctgagaacatggtgctgaagacggaactttgccgcttcagcggccagaagatttatcctgggaaaggcattagatttatccgtgctgattctcaggtcttcctttttgccaactcgaaatgcaagcgctacttccacaaccgcctgaagcctgcaaagcttacctggacagcaatgtacaggaagcagcacaagaaggatatccatgctgaagcggtaaagaagaggcgccgcgccaccaagaagccatactccaggtcaattgtgggtgcttccttggaagtaatccagaagaagagagctgagaagccagaggtccgcgatgctgctagagaagctgctcttcgtgagatcaaggagcgcatcaagaagaccaaggatgagaagaaagcgaagaaggcggaggtgagcaagtcccagaagacgcagacaaagggtgcggtccagaagggttccaagggccccaagttgggcggcggtggtgggaagcgctgaaagaacttagtgtcgtttctcgacattgcagtcgttccttagccaaagccactttcgtagaacctgtgttgaatttgcaagacttattcaagcgttgcttttgcgtgctaaataccatggcaagagaacggatttatatttatgcctgaaaaaaatgaccgttcat

SEQ ID NO: 33624 - protein, 161 aa, Zea mays subsp. mays; identical to SEQ ID NO: 23397
  peptide (1)..(161): Ceres Seq. ID no. 12348777
  misc_feature (3)..(73): Pfam Name: Pfam Description:  Ribosomal protein L24e
  misc_feature (1)..(161): NCBI GI NO: 1710521 NR Description: 60S RIBOSOMAL PROTEIN L24
  misc_feature (4)..(161): NCBI GI NO: 34900364 NR Description: putative 60S ribosomal protein L24
  misc_feature (1)..(160): NCBI GI NO: 6094040 NR Description: 60S ribosomal protein L24
  misc_feature (1)..(156): NCBI GI NO: 10180025 NR Description: 60S ribosomal protein L24 [Prunus avium]
  misc_feature (1)..(161): NCBI GI NO: 18404176 NR Description: 60S ribosomal protein L24; protein id: At2g36620
  misc_feature (1)..(161): NCBI GI NO: 15231730 NR Description: 60S ribosomal protein - like; protein id:At3g53020
  misc_feature (5)..(161): NCBI GI NO: 25295112 NR Description: 60S ribosomal protein L24
  misc_feature (3)..(150): NCBI GI NO: 19075214 NR Description: 60s ribosomal protein L24
  misc_feature (3)..(150): NCBI GI NO: 19115030 NR Description: 60S ribosomal protein L24
  misc_feature (10)..(154): NCBI GI NO: 40741063 NR Description: conserved hypothetical protein

SEQ ID NO: 33625 - protein, 106 aa, Zea mays subsp. mays; identical to SEQ ID NO: 23398
  peptide (1)..(106): Ceres Seq. ID no. 12348778
  misc_feature (1)..(106): NCBI GI NO: 1710521 NR Description: 60S RIBOSOMAL PROTEIN L24
  misc_feature (1)..(106): NCBI GI NO: 34900364 NR Description: putative 60S ribosomal protein L24
  misc_feature (1)..(105): NCBI GI NO: 6094040 NR Description: 60S ribosomal protein L24
  misc_feature (1)..(101): NCBI GI NO: 10180025 NR Description: 60S ribosomal protein L24 [Prunus avium]
  misc_feature (1)..(106): NCBI GI NO: 18404176 NR Description: 60S ribosomal protein L24; protein id: At2g36620
  misc_feature (1)..(106): NCBI GI NO: 15231730 NR Description: 60S ribosomal protein - like; protein id:At3g53020
  misc_feature (1)..(106): NCBI GI NO: 25295112 NR Description: 60S ribosomal protein L24
  misc_feature (1)..(95): NCBI GI NO: 19075214 NR Description: 60s ribosomal protein L24
  misc_feature (1)..(95): NCBI GI NO: 19115030 NR Description: 60S ribosomal protein L24
  misc_feature (1)..(99): NCBI GI NO: 40741063 NR Description: conserved hypothetical protein

SEQ ID NO: 33626 - DNA, 1605 bp, Zea mays subsp. mays
  misc_feature (1)..(1605): Ceres Seq. ID no. 12350452
agggcgacgaacgatggctggctggccgtccgtgattgttttggaacgggcagcgtgtttggttggtgcctgtgctgtgccgccgttcgtctctgggtagcgtagcgacggcgccacggcggcttccggctcgtgcgcgcgcgcgcgtgtccgggcgagaagagctgccaagggatggaggcgctgaggaagcaggcgagcaagttcaaggagcaggtcgccaagcagcagcaggctgttataaagcaattcagtactactggctatgagcggtcagattccattgtaattgatgaggttgaactacagagacatcaacagcttgagaaattgtatacttctactcgttctgtaagggatttccagaaggacatagttagagcagctgaaggtttggtgtctattggaaacaaacatattgaagtgggaacaaaattttctgaggactgctatagatatggaagcgaaaataatgcaagcgacgaagcccttagaaaagcagcatcactatacggaggtgctttgagaaatattgagaaagagtatgaagatttcaacagaattttatcttctcagactatagacccattgagagcaatggctatgggtggacccctggaagatgctcgtggtcttgcacagcgctatagcaggatgagacatgaagctgagatcctctctactgaaattgctagaagaaaggcacgggtaagagaagctccaattgctgagcacactacaaagcttcagcaatcagaagctagaatgatagagcacaaagcaagcatggccgtgttagggaaggaagcagcagctgcacttgcagctgtcgagtctcaacagcaacgagtgacccttcagaggctggttggcacggcggaagcagaaaagttattccatctgagattagctgctatacttgatgacgttgaggcagagatgtcctctgagaagcaaaggagagaatctgcaccacctatcatatcttcacataagcgtgctgagaaagctcagtacttccttgctgaggtaatgcataatttcaatggaaccacggagaaggaactgagcttaattgttggcgattatgttgttgttcgtcagattgctcccaacggctgggcggaaggagaatgccgagggaaggctggctggtttccggctgcctatgttgagaggcgcgagaatatccccccgaataaagttttccctcaagtataagatcataagaggggtcatctgtttccactgataagcagtttggtttggcattgaggagctgcaaggctgtatctaacttctgattggtttgatgctccgtatggcgtatcttgtgcatcctatgttcttgtggtggtctagacttggaataagatatgtcggcacgtgctctgcgcctgtgcctgcgcgcacattgatgaagatgtcgctttgcatgtgtccgcagtgtgctactgcttgcggcagcgtaggtcatgttgaatgagctttcctttactgacagatttcgagtgtaaattggttcttgcacttttttttcgttagggtgtatcagtagttctgtacaatatgtttttaatgagaccattcggccatcagagcttt

SEQ ID NO: 33627 - protein, 348 aa, Zea mays subsp. mays
  peptide (1)..(348): Ceres Seq. ID no. 12350453
  misc_feature (282)..(336): Pfam Name: Pfam Description:  SH3 domain
  misc_feature (1)..(347): NCBI GI NO: 22093679 NR Description: putative SH3
  misc_feature (1)..(348): NCBI GI NO: 21928139 NR Description: AT4g18060/F15J5_30 [Arabidopsis thaliana]
  misc_feature (1)..(348): NCBI GI NO: 22328762 NR Description: putative protein; protein id: At4g18060
  misc_feature (1)..(348): NCBI GI NO: 16974680 NR Description: SH3 domain-containing protein 3
  misc_feature (1)..(272): NCBI GI NO: 38344978 NR Description: OSJNBa0011L07.8
  misc_feature (281)..(348): NCBI GI NO: 38344978 NR Description: OSJNBa0011L07.8
  misc_feature (1)..(260): NCBI GI NO: 7485521 NR Description: hypothetical protein F15J5
  misc_feature (1)..(273): NCBI GI NO: 15221714 NR Description: unknown protein; protein id: At1g31440
  misc_feature (276)..(344): NCBI GI NO: 15221714 NR Description: unknown protein; protein id: At1g31440
  misc_feature (1)..(272): NCBI GI NO: 18418491 NR Description: putative protein; protein id: At4g34660
MEALRKQASKFKEQVAKQQQAVIKQFSTTGYERSDSIVIDEVELQRHQQLEKLYTSTRSVRDFQKDIVRAAEGLVSIGNKHIEVGTKFSEDCYRYGSENNASDEALRKAASLYGGALRNIEKEYEDFNRILSSQTIDPLRAMAMGGPLEDARGLAQRYSRMRHEAEILSTEIARRKARVREAPIAEHTTKLQQSEARMIEHKASMAVLGKEAAAALAAVESQQQRVTLQRLVGTAEAEKLFHLRLAAILDDVEAEMSSEKQRRESAPPIISSHKRAEKAQYFLAEVMHNFNGTTEKELSLIVGDYVVVRQIAPNGWAEGECRGKAGWFPAAYVERRENIPPNKVFPQV

SEQ ID NO: 33628 - protein, 207 aa, Zea mays subsp. mays; identical to SEQ ID NO: 27871
  peptide (1)..(207): Ceres Seq. ID no. 12350454
  misc_feature (141)..(195): Pfam Name: Pfam Description:  SH3 domain
  misc_feature (1)..(206): NCBI GI NO: 22093679 NR Description: putative SH3
  misc_feature (1)..(207): NCBI GI NO: 21928139 NR Description: AT4g18060/F15J5_30 [Arabidopsis thaliana]
  misc_feature (1)..(207): NCBI GI NO: 22328762 NR Description: putative protein; protein id: At4g18060
  misc_feature (1)..(207): NCBI GI NO: 16974680 NR Description: SH3 domain-containing protein 3
  misc_feature (1)..(131): NCBI GI NO: 38344978 NR Description: OSJNBa0011L07.8
  misc_feature (140)..(207): NCBI GI NO: 38344978 NR Description: OSJNBa0011L07.8
  misc_feature (1)..(119): NCBI GI NO: 7485521 NR Description: hypothetical protein F15J5
  misc_feature (1)..(132): NCBI GI NO: 15221714 NR Description: unknown protein; protein id: At1g31440
  misc_feature (135)..(203): NCBI GI NO: 15221714 NR Description: unknown protein; protein id: At1g31440
  misc_feature (1)..(131): NCBI GI NO: 18418491 NR Description: putative protein; protein id: At4g34660

SEQ ID NO: 33629 - protein, 205 aa, Zea mays subsp. mays; identical to SEQ ID NO: 27872
  peptide (1)..(205): Ceres Seq. ID no. 12350455
  misc_feature (139)..(193): Pfam Name: Pfam Description:  SH3 domain
  misc_feature (1)..(204): NCBI GI NO: 22093679 NR Description: putative SH3
  misc_feature (1)..(205): NCBI GI NO: 21928139 NR Description: AT4g18060/F15J5_30 [Arabidopsis thaliana]
  misc_feature (1)..(205): NCBI GI NO: 22328762 NR Description: putative protein; protein id: At4g18060
  misc_feature (1)..(205): NCBI GI NO: 16974680 NR Description: SH3 domain-containing protein 3
  misc_feature (1)..(129): NCBI GI NO: 38344978 NR Description: OSJNBa0011L07.8
  misc_feature (138)..(205): NCBI GI NO: 38344978 NR Description: OSJNBa0011L07.8
  misc_feature (1)..(117): NCBI GI NO: 7485521 NR Description: hypothetical protein F15J5
  misc_feature (1)..(130): NCBI GI NO: 15221714 NR Description: unknown protein; protein id: At1g31440
  misc_feature (133)..(201): NCBI GI NO: 15221714 NR Description: unknown protein; protein id: At1g31440
  misc_feature (1)..(129): NCBI GI NO: 18418491 NR Description: putative protein; protein id: At4g34660

SEQ ID NO: 33630 - DNA, 1402 bp, Zea mays subsp. mays
  misc_feature (1)..(1402): Ceres Seq. ID no. 13492514
atgtgacagttcgggcaccgacgtccgtctccgtacttccggctgtgtgcgaaactgcgaacgcgtgatatctccgcgtacgcaaacgcgacgcgaaggtcagcacggacaactctacccctccgcctcgaccctgaccccccacctcgtcggcgatgagttcctcttccaacggcgggaagaagccggctcccggcggcggccgcaggggtcccgccatccgcacgctcgctgacataagccgtgggcccaccggcttcccaggtgccggaggcggcgacagcggcagcgacgacgacgagccacaggaatactacaccggtggcgagaagagtggaatgcttgttcaagatccaacaagaagaaatgatgtggatgcgatatttgaacaagccagacaagcgggtatcaaaggaatgcctcctcttcttgatggcgagtcttccagctctaggagctttacagggactgggccgacttcttacaggggagacaatatcatctgctgcacctcaggaaccagtaccaattcgagtacgccacaatatacatttgtggaacaatggctttagtgtggatgatggtccactgagatactacgacgatcctgaaaatgcagagttccttgagagccttaagatgtcaaagtgccccaaggagctggtgcctactgatggagaacatgttgatgcgtctgttattagaaggatggaagattacagggaacctgtaaggcctcgatcagctttccagggtgttggaagaacccttggtggtggaccttccccagatgagagcgcaacagctgctcctgcatcagcggcccctgctgcttcgaggtccgctggcgttgtcgtggatgactcccagccatttacgtccatacagctgaggctggctgacggcactcgcatggtcgcccggttcaacatgcaccacaccgtgggagacatcaggtcctttatagacgcagctcggcctggagctgcaaggccttatcagctgcagacgggtttccctcccaagcagctggctgacccaacgcagaccgtggagcaagctgggcttgcaaactctgttatcatgcagaagatgtaaatgcttcggctggcaacctggggagctcggatgcatcgtactgcatcttctgaaaaccgtaatattatggttgatcatgttatcagatactgctctggtgcatcattctcagtcatggttacttacagtagcatctggtgcctcgttgggagcacaggagtttataattcatctaggaactgaagtatgctttcttgcatcactattgcatcacttttttcatttttaatattggtgttatgatatttcgtgtttccatggccgcttccttgcaagttgaagcgcgactcgcaagtcgcagcat

SEQ ID NO: 33631 - protein, 243 aa, Zea mays subsp. mays
  peptide (1)..(243): Ceres Seq. ID no. 13492515
  misc_feature (165)..(242): Pfam Name: Pfam Description:  UBX domain
  misc_feature (34)..(242): NCBI GI NO: 13123657 NR Description: phosphatase-like protein Mtc923
  misc_feature (34)..(243): NCBI GI NO: 13123659 NR Description: phosphatase-like protein Psc923 [Pisum sativum]
  misc_feature (27)..(242): NCBI GI NO: 18412499 NR Description: membrane trafficking factor -related
  misc_feature (27)..(242): NCBI GI NO: 7487458 NR Description: hypothetical protein T27D20
  misc_feature (34)..(242): NCBI GI NO: 15234731 NR Description: expressed protein [Arabidopsis thaliana]
  misc_feature (25)..(242): NCBI GI NO: 18414442 NR Description: phosphatase like protein [Arabidopsis thaliana]
  misc_feature (25)..(242): NCBI GI NO: 15292665 NR Description: putative phosphatase [Arabidopsis thaliana]
  misc_feature (25)..(239): NCBI GI NO: 7485149 NR Description: hypothetical protein - Arabidopsis thaliana
  misc_feature (48)..(243): NCBI GI NO: 29568099 NR Description: p47 protein [Homo sapiens]
  misc_feature (61)..(243): NCBI GI NO: 20149635 NR Description: p47 protein [Homo sapiens]
MMWMRYLNKPDKRVSKECLLFLMASLPALGALQGLGRLLTGETISSAAPQEPVPIRVRHNIHLWNNGFSVDDGPLRYYDDPENAEFLESLKMSKCPKELVPTDGEHVDASVIRRMEDYREPVRPRSAFQGVGRTLGGGPSPDESATAAPASAAPAASRSAGVVVDDSQPFTSIQLRLADGTRMVARFNMHHTVGDIRSFIDAARPGAARPYQLQTGFPPKQLADPTQTVEQAGLANSVIMQKM

SEQ ID NO: 33632 - protein, 242 aa, Zea mays subsp. mays
  peptide (1)..(242): Ceres Seq. ID no. 13492516
  misc_feature (164)..(241): Pfam Name: Pfam Description:  UBX domain
  misc_feature (33)..(241): NCBI GI NO: 13123657 NR Description: phosphatase-like protein Mtc923
  misc_feature (33)..(242): NCBI GI NO: 13123659 NR Description: phosphatase-like protein Psc923 [Pisum sativum]
  misc_feature (26)..(241): NCBI GI NO: 18412499 NR Description: membrane trafficking factor -related
  misc_feature (26)..(241): NCBI GI NO: 7487458 NR Description: hypothetical protein T27D20
  misc_feature (33)..(241): NCBI GI NO: 15234731 NR Description: expressed protein [Arabidopsis thaliana]
  misc_feature (24)..(241): NCBI GI NO: 18414442 NR Description: phosphatase like protein [Arabidopsis thaliana]
  misc_feature (24)..(241): NCBI GI NO: 15292665 NR Description: putative phosphatase [Arabidopsis thaliana]
  misc_feature (24)..(238): NCBI GI NO: 7485149 NR Description: hypothetical protein - Arabidopsis thaliana
  misc_feature (47)..(242): NCBI GI NO: 29568099 NR Description: p47 protein [Homo sapiens]
  misc_feature (60)..(242): NCBI GI NO: 20149635 NR Description: p47 protein [Homo sapiens]
MWMRYLNKPDKRVSKECLLFLMASLPALGALQGLGRLLTGETISSAAPQEPVPIRVRHNIHLWNNGFSVDDGPLRYYDDPENAEFLESLKMSKCPKELVPTDGEHVDASVIRRMEDYREPVRPRSAFQGVGRTLGGGPSPDESATAAPASAAPAASRSAGVVVDDSQPFTSIQLRLADGTRMVARFNMHHTVGDIRSFIDAARPGAARPYQLQTGFPPKQLADPTQTVEQAGLANSVIMQKM

SEQ ID NO: 33633 - protein, 240 aa, Zea mays subsp. mays
  peptide (1)..(240): Ceres Seq. ID no. 13492517
  misc_feature (162)..(239): Pfam Name: Pfam Description:  UBX domain
  misc_feature (31)..(239): NCBI GI NO: 13123657 NR Description: phosphatase-like protein Mtc923
  misc_feature (31)..(240): NCBI GI NO: 13123659 NR Description: phosphatase-like protein Psc923 [Pisum sativum]
  misc_feature (24)..(239): NCBI GI NO: 18412499 NR Description: membrane trafficking factor -related
  misc_feature (24)..(239): NCBI GI NO: 7487458 NR Description: hypothetical protein T27D20
  misc_feature (31)..(239): NCBI GI NO: 15234731 NR Description: expressed protein [Arabidopsis thaliana]
  misc_feature (22)..(239): NCBI GI NO: 18414442 NR Description: phosphatase like protein [Arabidopsis thaliana]
  misc_feature (22)..(239): NCBI GI NO: 15292665 NR Description: putative phosphatase [Arabidopsis thaliana]
  misc_feature (22)..(236): NCBI GI NO: 7485149 NR Description: hypothetical protein - Arabidopsis thaliana
  misc_feature (45)..(240): NCBI GI NO: 29568099 NR Description: p47 protein [Homo sapiens]
  misc_feature (58)..(240): NCBI GI NO: 20149635 NR Description: p47 protein [Homo sapiens]
MRYLNKPDKRVSKECLLFLMASLPALGALQGLGRLLTGETISSAAPQEPVPIRVRHNIHLWNNGFSVDDGPLRYYDDPENAEFLESLKMSKCPKELVPTDGEHVDASVIRRMEDYREPVRPRSAFQGVGRTLGGGPSPDESATAAPASAAPAASRSAGVVVDDSQPFTSIQLRLADGTRMVARFNMHHTVGDIRSFIDAARPGAARPYQLQTGFPPKQLADPTQTVEQAGLANSVIMQKM

SEQ ID NO: 33634 - DNA, 1276 bp, Zea mays subsp. mays
  misc_feature (1)..(1276): Ceres Seq. ID no. 12341164
attaagattagcaaaattgtgggccagcagcaggagcgccccccgtctccctccaccctcctctgtcagggtcctccgagtcggacttcctcacggccgccgcgccaaatcccgtctcgttgctccggtccgctgcgcatcctcaggaatggaacttggcgccaccactgccctctaccctctgcaccgctgcaaaaccatttacctggtcaggcatgcccagggcattcacaatgtcgcgggggagaaggactttggtgcatacatgtcacatgatctgttcgatgctcagctcactcctttgggttggaaccaagtcgatggtctgcgggagcatgtgaagaaaagtgggcttgcagaaaagattgaattagttatttcttcccctttactgaggactatgcaaactgcagttggtgtctttggtggtgaaaagtatattgatggtgtaaatgcacctccactaatggtcgaaaatgccggacacagtggtcgtccggcagtttcaagtttgaactgccccccatttattgcagtcgaaacctgcagagagcacttgggtgtccatccctgtgacaagaggaggagcataacagaataccggcctctctttcctgcgattgatttttcattgatagagaatgatgaagatgttctttgggaaccagatgtgagagaaccaaatgaggctgtcgctttgaggggtatgaagttcatggactggttgtggacaagagaagagaaagagatagctattgtcagtcacagtggtttcttgtttcacaccttaagcatgtacagtaaggagtgtcatccaaccataagagacgaagttggcaagcactttgcaaactgcgagctacggtcgatggtgttggttgacagaagcatgcttggatcatattcttcaagattcaactatgctggcaagaatccaaccggactagatgtgcctagtgatattgcagataagaagcaggttgacgaagctcagaagaactgaggcaacctcgaaagcataccatatatgacttggattatcaagaaattctgacctttgcgaagcttgtttgctttgaagaggacaagctaagagggcatctacagatagagtttacgcataccattttgttagtcaagttgaactacgcagcaatgtattagcatgtctgctcttttgtctcagcctacattgagattcagggccttggactacgattatctatttatgataataataaccggatcacctacattcaccaggtgatgcatggcc

SEQ ID NO: 33635 - protein, 333 aa, Zea mays subsp. mays
  peptide (1)..(333): Ceres Seq. ID no. 12341165
  misc_feature (65)..(303): Pfam Name: Pfam Description:  Phosphoglycerate mutase family
  misc_feature (55)..(322): NCBI GI NO: 38344765 NR Description: OSJNBa0068L06.8
  misc_feature (50)..(333): NCBI GI NO: 21700765 NR Description: unknown [Glycine max]
  misc_feature (50)..(333): NCBI GI NO: 21700767 NR Description: unknown [Glycine max]
  misc_feature (50)..(327): NCBI GI NO: 15237708 NR Description: ZW10-like protein; protein id: At5g64460
  misc_feature (20)..(325): NCBI GI NO: 25372931 NR Description: hypothetical protein F19C14.10
  misc_feature (37)..(325): NCBI GI NO: 25372930 NR Description: hypothetical protein ZW10
  misc_feature (50)..(325): NCBI GI NO: 15217922 NR Description: unknown protein; protein id: At1g58280.1
  misc_feature (58)..(319): NCBI GI NO: 15227803 NR Description: unknown protein; protein id: At2g17280.1
  misc_feature (50)..(319): NCBI GI NO: 21700769 NR Description: unknown [Glycine max]
  misc_feature (20)..(186): NCBI GI NO: 30696245 NR Description: expressed protein [Arabidopsis thaliana]
LRLAKLWASSRSAPRLPPPSSVRVLRVGLPHGRRAKSRLVAPVRCASSGMELGATTALYPLHRCKTIYLVRHAQGIHNVAGEKDFGAYMSHDLFDAQLTPLGWNQVDGLREHVKKSGLAEKIELVISSPLLRTMQTAVGVFGGEKYIDGVNAPPLMVENAGHSGRPAVSSLNCPPFIAVETCREHLGVHPCDKRRSITEYRPLFPAIDFSLIENDEDVLWEPDVREPNEAVALRGMKFMDWLWTREEKEIAIVSHSGFLFHTLSMYSKECHPTIRDEVGKHFANCELRSMVLVDRSMLGSYSSRFNYAGKNPTGLDVPSDIADKKQVDEAQKN

SEQ ID NO: 33636 - protein, 284 aa, Zea mays subsp. mays
  peptide (1)..(284): Ceres Seq. ID no. 12341166
  misc_feature (16)..(254): Pfam Name: Pfam Description:  Phosphoglycerate mutase family
  misc_feature (6)..(273): NCBI GI NO: 38344765 NR Description: OSJNBa0068L06.8
  misc_feature (1)..(284): NCBI GI NO: 21700765 NR Description: unknown [Glycine max]
  misc_feature (1)..(284): NCBI GI NO: 21700767 NR Description: unknown [Glycine max]
  misc_feature (1)..(278): NCBI GI NO: 15237708 NR Description: ZW10-like protein; protein id: At5g64460
  misc_feature (1)..(276): NCBI GI NO: 25372931 NR Description: hypothetical protein F19C14.10
  misc_feature (1)..(276): NCBI GI NO: 25372930 NR Description: hypothetical protein ZW10
  misc_feature (1)..(276): NCBI GI NO: 15217922 NR Description: unknown protein; protein id: At1g58280.1
  misc_feature (9)..(270): NCBI GI NO: 15227803 NR Description: unknown protein; protein id: At2g17280.1
  misc_feature (1)..(270): NCBI GI NO: 21700769 NR Description: unknown [Glycine max]
  misc_feature (1)..(137): NCBI GI NO: 30696245 NR Description: expressed protein [Arabidopsis thaliana]
MELGATTALYPLHRCKTIYLVRHAQGIHNVAGEKDFGAYMSHDLFDAQLTPLGWNQVDGLREHVKKSGLAEKIELVISSPLLRTMQTAVGVFGGEKYIDGVNAPPLMVENAGHSGRPAVSSLNCPPFIAVETCREHLGVHPCDKRRSITEYRPLFPAIDFSLIENDEDVLWEPDVREPNEAVALRGMKFMDWLWTREEKEIAIVSHSGFLFHTLSMYSKECHPTIRDEVGKHFANCELRSMVLVDRSMLGSYSSRFNYAGKNPTGLDVPSDIADKKQVDEAQKN

SEQ ID NO: 33637 - protein, 245 aa, Zea mays subsp. mays
  peptide (1)..(245): Ceres Seq. ID no. 12341167
  misc_feature (1)..(215): Pfam Name: Pfam Description:  Phosphoglycerate mutase family
  misc_feature (1)..(234): NCBI GI NO: 38344765 NR Description: OSJNBa0068L06.8
  misc_feature (1)..(245): NCBI GI NO: 21700765 NR Description: unknown [Glycine max]
  misc_feature (1)..(245): NCBI GI NO: 21700767 NR Description: unknown [Glycine max]
  misc_feature (1)..(239): NCBI GI NO: 15237708 NR Description: ZW10-like protein; protein id: At5g64460
  misc_feature (1)..(237): NCBI GI NO: 25372931 NR Description: hypothetical protein F19C14.10
  misc_feature (1)..(237): NCBI GI NO: 25372930 NR Description: hypothetical protein ZW10
  misc_feature (1)..(237): NCBI GI NO: 15217922 NR Description: unknown protein; protein id: At1g58280.1
  misc_feature (1)..(231): NCBI GI NO: 15227803 NR Description: unknown protein; protein id: At2g17280.1
  misc_feature (1)..(231): NCBI GI NO: 21700769 NR Description: unknown [Glycine max]
  misc_feature (1)..(98): NCBI GI NO: 30696245 NR Description: expressed protein [Arabidopsis thaliana]
MSHDLFDAQLTPLGWNQVDGLREHVKKSGLAEKIELVISSPLLRTMQTAVGVFGGEKYIDGVNAPPLMVENAGHSGRPAVSSLNCPPFIAVETCREHLGVHPCDKRRSITEYRPLFPAIDFSLIENDEDVLWEPDVREPNEAVALRGMKFMDWLWTREEKEIAIVSHSGFLFHTLSMYSKECHPTIRDEVGKHFANCELRSMVLVDRSMLGSYSSRFNYAGKNPTGLDVPSDIADKKQVDEAQKN

SEQ ID NO: 33638 - DNA, 1304 bp, Zea mays subsp. mays; identical to SEQ ID NO: 23970
  misc_feature (1)..(1304): Ceres Seq. ID no. 12347730

SEQ ID NO: 33639 - protein, 254 aa, Zea mays subsp. mays; identical to SEQ ID NO: 23971
  peptide (1)..(254): Ceres Seq. ID no. 12347731
  misc_feature (198)..(248): Pfam Name: Pfam Description:  PHD-finger
  misc_feature (3)..(254): NCBI GI NO: 34907474 NR Description: nucleic acid binding protein
  misc_feature (3)..(254): NCBI GI NO: 4091080 NR Description: nucleic acid binding protein [Oryza sativa]
  misc_feature (3)..(254): NCBI GI NO: 11281498 NR Description: nucleic acid binding protein [imported] - rice
  misc_feature (8)..(250): NCBI GI NO: 15223786 NR Description: nucleic acid binding protein
  misc_feature (4)..(253): NCBI GI NO: 15226967 NR Description: putative PHD-type zinc finger protein
  misc_feature (4)..(253): NCBI GI NO: 21593407 NR Description: putative PHD-type zinc finger protein
  misc_feature (32)..(250): NCBI GI NO: 25346630 NR Description: F14L17.29 protein - Arabidopsis thaliana
  misc_feature (8)..(30): NCBI GI NO: 25346630 NR Description: F14L17.29 protein - Arabidopsis thaliana
  misc_feature (1)..(254): NCBI GI NO: 15239624 NR Description: nucleic acid binding protein - like
  misc_feature (1)..(253): NCBI GI NO: 30687843 NR Description: zinc finger protein - like [Arabidopsis thaliana]

SEQ ID NO: 33640 - protein, 231 aa, Zea mays subsp. mays; identical to SEQ ID NO: 23972
  peptide (1)..(231): Ceres Seq. ID no. 12347732
  misc_feature (175)..(225): Pfam Name: Pfam Description:  PHD-finger
  misc_feature (1)..(231): NCBI GI NO: 34907474 NR Description: nucleic acid binding protein
  misc_feature (1)..(231): NCBI GI NO: 4091080 NR Description: nucleic acid binding protein [Oryza sativa]
  misc_feature (1)..(231): NCBI GI NO: 11281498 NR Description: nucleic acid binding protein [imported] - rice
  misc_feature (1)..(227): NCBI GI NO: 15223786 NR Description: nucleic acid binding protein
  misc_feature (1)..(230): NCBI GI NO: 15226967 NR Description: putative PHD-type zinc finger protein
  misc_feature (1)..(230): NCBI GI NO: 21593407 NR Description: putative PHD-type zinc finger protein
  misc_feature (9)..(227): NCBI GI NO: 25346630 NR Description: F14L17.29 protein - Arabidopsis thaliana
  misc_feature (1)..(231): NCBI GI NO: 15239624 NR Description: nucleic acid binding protein - like
  misc_feature (1)..(230): NCBI GI NO: 30687843 NR Description: zinc finger protein - like [Arabidopsis thaliana]
  misc_feature (1)..(223): NCBI GI NO: 7488751 NR Description: probable zinc finger protein - alfalfa (fragment)

SEQ ID NO: 33641 - protein, 172 aa, Zea mays subsp. mays; identical to SEQ ID NO: 23973
  peptide (1)..(172): Ceres Seq. ID no. 12347733
  misc_feature (116)..(166): Pfam Name: Pfam Description:  PHD-finger
  misc_feature (1)..(172): NCBI GI NO: 34907474 NR Description: nucleic acid binding protein
  misc_feature (1)..(172): NCBI GI NO: 4091080 NR Description: nucleic acid binding protein [Oryza sativa]
  misc_feature (1)..(172): NCBI GI NO: 11281498 NR Description: nucleic acid binding protein [imported] - rice
  misc_feature (1)..(168): NCBI GI NO: 15223786 NR Description: nucleic acid binding protein
  misc_feature (1)..(171): NCBI GI NO: 15226967 NR Description: putative PHD-type zinc finger protein
  misc_feature (1)..(171): NCBI GI NO: 21593407 NR Description: putative PHD-type zinc finger protein
  misc_feature (1)..(168): NCBI GI NO: 25346630 NR Description: F14L17.29 protein - Arabidopsis thaliana
  misc_feature (1)..(172): NCBI GI NO: 15239624 NR Description: nucleic acid binding protein - like
  misc_feature (1)..(171): NCBI GI NO: 30687843 NR Description: zinc finger protein - like [Arabidopsis thaliana]
  misc_feature (1)..(164): NCBI GI NO: 7488751 NR Description: probable zinc finger protein - alfalfa (fragment)

SEQ ID NO: 33642 - DNA, 1499 bp, Zea mays subsp. mays
  misc_feature (1)..(1499): Ceres Seq. ID no. 12350250
atggaacaggttctctgtcctcataactccaaccaaacaacggcagctagcgagctcccgcggtcccgccgccgccccctggtcctccaaaaaacggctgaaccctaaaccctccctagctcccgccgcctcgcttaaccgcgcccatggccgccgccgctcgcgccgccctcccgcggccccacctctctcttttttcgtcctcccaccgcagcccccatctgtccctcacgccctcctccgcccctcgcctgcgcagcggcgctgccacctcccctgcgctgcagcagcaccaccaggtcaccacgcgcctgggcgacgtgatcgaggcgcagcagttcgaccgggacgcgctgaacgagatcttcgaggtggcgcgggagatggaggccgtggagaggggttcccacggcgcccccagccgcgtcctcgaggggtacctcatggccacgcttttctacgagccctccacgcgcacgcgcctctccttcgaggctgctatgcggaggctcggcggggaggtcctcaccaccgagaatgcgcgcgagttctcttccgccgccaagggggagacactcgaagataccataagaaccgttgagggttattccgatattattgtactgagacattttgaaagtggagctgcaagaaaagcagcagatactgcaaatattcctgttattaatgcaggtgatggaccagggcaacatccaacccaggctttgttggatgtgtacacaataaagagagaaattggcacactagatggaattaaacttggtttggttggtgaccttgctaatgggaggacagttcgttctctggcttacttgattgctaagtaccagaacattaagatatactttgtatctcctgatgttgttaaaatgaaggatgatatcaagaactacttaaattccaaaggtgttgaatgggaagaaagttcagatttgttggaggtggcatccaagtgtgatgttatttatcaaacacgtattcaaaaagaaagatttggtgagaggattgacctttatgaagctgctcgtggcaagtacatcatggataaaaaggtcttagatgtgctgccaaaacatgctgtcatcatgcatccccttccaaggcttgatgagatcacagtagaagttgatagtgatccaagagctgcatattttaggcaggctaagaatggcctctacataaggatggcattgctcaaacttctgcttgttggtcactgacatttcggctagtgctttagcttgtgctgcgtcaagggattagaaggtattattcttaatataatgatcgaggctgtcttactcacgcaggtcgagtttttagaaacatgtactaataatcagcagcttgtgtcaaaattcaatgttcgctgttgcaggtaataaaagtctgcatccatgcgaatgtgcagcgatgtttggcagagtttggtgttctcatgtgctgtgagaacatggaacataattaattttgcctgc

SEQ ID NO: 33643 - protein, 364 aa, Zea mays subsp. mays; identical to SEQ ID NO: 27771
  peptide (1)..(364): Ceres Seq. ID no. 12350251
  misc_feature (207)..(361): Pfam Name: Pfam Description:  Aspartate/ornithine carbamoyltransferase
  misc_feature (3)..(363): NCBI GI NO: 9453916 NR Description: aspartate carbamoyl transferase
  misc_feature (55)..(363): NCBI GI NO: 3914501 NR Description: Aspartate carbamoyltransferase 3
  misc_feature (55)..(363): NCBI GI NO: 3914503 NR Description: Aspartate carbamoyltransferase 2
  misc_feature (45)..(363): NCBI GI NO: 21535795 NR Description: aspartate carbamoyltransferase [Solanum tuberosum]
  misc_feature (56)..(363): NCBI GI NO: 15231112 NR Description: aspartate carbamoyltransferase precursor
  misc_feature (55)..(363): NCBI GI NO: 3914502 NR Description: Aspartate carbamoyltransferase 1
  misc_feature (56)..(363): NCBI GI NO: 1076293 NR Description: aspartate carbamoyltransferase (EC 2
  misc_feature (56)..(363): NCBI GI NO: 15215706 NR Description: AT3g20330/MQC12_8 [Arabidopsis thaliana]
  misc_feature (97)..(363): NCBI GI NO: 479713 NR Description: aspartate carbamoyltransferase (EC 2
  misc_feature (97)..(363): NCBI GI NO: 397385 NR Description: aspartate carbamoyltransferase

SEQ ID NO: 33644 - protein, 285 aa, Zea mays subsp. mays; identical to SEQ ID NO: 27772
  peptide (1)..(285): Ceres Seq. ID no. 12350252
  misc_feature (128)..(282): Pfam Name: Pfam Description:  Aspartate/ornithine carbamoyltransferase
  misc_feature (1)..(284): NCBI GI NO: 9453916 NR Description: aspartate carbamoyl transferase
  misc_feature (1)..(284): NCBI GI NO: 3914501 NR Description: Aspartate carbamoyltransferase 3
  misc_feature (1)..(284): NCBI GI NO: 3914503 NR Description: Aspartate carbamoyltransferase 2
  misc_feature (1)..(284): NCBI GI NO: 21535795 NR Description: aspartate carbamoyltransferase [Solanum tuberosum]
  misc_feature (1)..(284): NCBI GI NO: 15231112 NR Description: aspartate carbamoyltransferase precursor
  misc_feature (1)..(284): NCBI GI NO: 3914502 NR Description: Aspartate carbamoyltransferase 1
  misc_feature (1)..(284): NCBI GI NO: 1076293 NR Description: aspartate carbamoyltransferase (EC 2
  misc_feature (1)..(284): NCBI GI NO: 15215706 NR Description: AT3g20330/MQC12_8 [Arabidopsis thaliana]
  misc_feature (18)..(284): NCBI GI NO: 479713 NR Description: aspartate carbamoyltransferase (EC 2
  misc_feature (18)..(284): NCBI GI NO: 397385 NR Description: aspartate carbamoyltransferase

SEQ ID NO: 33645 - protein, 265 aa, Zea mays subsp. mays; identical to SEQ ID NO: 27773
  peptide (1)..(265): Ceres Seq. ID no. 12350253
  misc_feature (108)..(262): Pfam Name: Pfam Description:  Aspartate/ornithine carbamoyltransferase
  misc_feature (1)..(264): NCBI GI NO: 9453916 NR Description: aspartate carbamoyl transferase
  misc_feature (1)..(264): NCBI GI NO: 3914501 NR Description: Aspartate carbamoyltransferase 3
  misc_feature (1)..(264): NCBI GI NO: 3914503 NR Description: Aspartate carbamoyltransferase 2
  misc_feature (1)..(264): NCBI GI NO: 21535795 NR Description: aspartate carbamoyltransferase [Solanum tuberosum]
  misc_feature (1)..(264): NCBI GI NO: 15231112 NR Description: aspartate carbamoyltransferase precursor
  misc_feature (1)..(264): NCBI GI NO: 3914502 NR Description: Aspartate carbamoyltransferase 1
  misc_feature (1)..(264): NCBI GI NO: 1076293 NR Description: aspartate carbamoyltransferase (EC 2
  misc_feature (1)..(264): NCBI GI NO: 15215706 NR Description: AT3g20330/MQC12_8 [Arabidopsis thaliana]
  misc_feature (1)..(264): NCBI GI NO: 479713 NR Description: aspartate carbamoyltransferase (EC 2
  misc_feature (1)..(264): NCBI GI NO: 397385 NR Description: aspartate carbamoyltransferase

SEQ ID NO: 33646 - DNA, 836 bp, Zea mays subsp. mays
  misc_feature (1)..(836): Ceres Seq. ID no. 13498286
agaaaaagaaaaagaaaagccaaaggcaaaggcaaaggaatcccaatcaggcaagcaaaaggaagaaccagctgctgcggccggagatgtcgtcgcagctgatcgaggagcaccggtcgggcgcggaggtgcacgtcgggcacgagctgtgcgagcgcaagtcgcgcgagttcatggtggagctgggcctccccgacgggctcctcccgctgcccagcctggacgaggtgggctacaaccggtcgacggggttcgtgtggctgcggcaggccgccggcctgacccacaccttcggctccatcggcaagcaggtgtggtacgacagggaggtgacggcgttcgtggagcccgggcggatgcacggcctcgccggggtgaagagcaaggagctcctcatctgggtcaccatctccgagatcgtcctcagcccctccggcaccaagatcgtgttccgcacccccgcggggctcggccgcgccttccctgtcaccgccttccagctcgagcccgcggcggcggagggggaccacaaggaggaggccgaggacgccgccgccgcggccgccaactgatctgctctagcttccggcggcggcggccgtgcgtgggctgctcgatccggtagtggcagtggctttgtgagacagtcgagtcgattgtggtttcccctcctccgccatgtgcgtgtagtggatgatgatgcaggaataaacggtgtccctggatccagaactcacggttcgatccatccagtttatctcatgcttgtgtatctctatgtatgcattgcctgtttgttcgctggaatctactacttgcagcggcctcgtctcttc

SEQ ID NO: 33647 - protein, 207 aa, Zea mays subsp. mays
  peptide (1)..(207): Ceres Seq. ID no. 13498287
EKEKEKPKAKAKESQSGKQKEEPAAAAGDVVAADRGAPVGRGGARRARAVRAQVARVHGGAGPPRRAPPAAQPGRGGLQPVDGVRVAAAGRRPDPHLRLHRQAGVVRQGGDGVRGARADARPRRGEEQGAPHLGHHLRDRPQPLRHQDRVPHPRGARPRLPCHRLPARARGGGGGPQGGGRGRRRRGRQLICSSFRRRRPCVGCSIR

SEQ ID NO: 33648 - protein, 189 aa, Zea mays subsp. mays
  peptide (1)..(189): Ceres Seq. ID no. 13498288
  misc_feature (74)..(177): Pfam Name: Pfam Description:  Protein of unknown function, DUF538
  misc_feature (74)..(189): NCBI GI NO: 18644694 NR Description: susceptibility homeodomain transciption factor
  misc_feature (29)..(189): NCBI GI NO: 34903866 NR Description: unnamed protein product
  misc_feature (35)..(187): NCBI GI NO: 18391006 NR Description: expressed protein [Arabidopsis thaliana]
  misc_feature (35)..(185): NCBI GI NO: 18405887 NR Description: expressed protein [Arabidopsis thaliana]
  misc_feature (29)..(167): NCBI GI NO: 34915410 NR Description: hypothetical protein~similar to Arabidopsisthaliana chromosome1
  misc_feature (29)..(166): NCBI GI NO: 18422648 NR Description: expressed protein [Arabidopsis thaliana]
  misc_feature (29)..(167): NCBI GI NO: 34915376 NR Description: hypothetical protein~similar to Oryza sativachromosome 7
  misc_feature (29)..(167): NCBI GI NO: 34915422 NR Description: hypothetical protein~similar to Arabidopsisthaliana chromosome1
  misc_feature (29)..(167): NCBI GI NO: 33146557 NR Description: unknown protein
  misc_feature (29)..(167): NCBI GI NO: 34915418 NR Description: hypothetical protein~similar to Arabidopsisthaliana chromosome1
KKKKKSQRQRQRNPNQASKRKNQLLRPEMSSQLIEEHRSGAEVHVGHELCERKSREFMVELGLPDGLLPLPSLDEVGYNRSTGFVWLRQAAGLTHTFGSIGKQVWYDREVTAFVEPGRMHGLAGVKSKELLIWVTISEIVLSPSGTKIVFRTPAGLGRAFPVTAFQLEPAAAEGDHKEEAEDAAAAAAN

SEQ ID NO: 33649 - protein, 161 aa, Zea mays subsp. mays
  peptide (1)..(161): Ceres Seq. ID no. 13498289
  misc_feature (46)..(149): Pfam Name: Pfam Description:  Protein of unknown function, DUF538
  misc_feature (46)..(161): NCBI GI NO: 18644694 NR Description: susceptibility homeodomain transciption factor
  misc_feature (1)..(161): NCBI GI NO: 34903866 NR Description: unnamed protein product
  misc_feature (7)..(159): NCBI GI NO: 18391006 NR Description: expressed protein [Arabidopsis thaliana]
  misc_feature (7)..(157): NCBI GI NO: 18405887 NR Description: expressed protein [Arabidopsis thaliana]
  misc_feature (1)..(139): NCBI GI NO: 34915410 NR Description: hypothetical protein~similar to Arabidopsisthaliana chromosome1
  misc_feature (1)..(138): NCBI GI NO: 18422648 NR Description: expressed protein [Arabidopsis thaliana]
  misc_feature (1)..(139): NCBI GI NO: 34915376 NR Description: hypothetical protein~similar to Oryza sativachromosome 7
  misc_feature (1)..(139): NCBI GI NO: 34915422 NR Description: hypothetical protein~similar to Arabidopsisthaliana chromosome1
  misc_feature (1)..(139): NCBI GI NO: 33146557 NR Description: unknown protein
  misc_feature (1)..(139): NCBI GI NO: 34915418 NR Description: hypothetical protein~similar to Arabidopsisthaliana chromosome1
MSSQLIEEHRSGAEVHVGHELCERKSREFMVELGLPDGLLPLPSLDEVGYNRSTGFVWLRQAAGLTHTFGSIGKQVWYDREVTAFVEPGRMHGLAGVKSKELLIWVTISEIVLSPSGTKIVFRTPAGLGRAFPVTAFQLEPAAAEGDHKEEAEDAAAAAAN

SEQ ID NO: 33650 - DNA, 1233 bp, Zea mays subsp. mays
  misc_feature (1)..(1233): Ceres Seq. ID no. 13498172
gattcgattcaaaatccacgtatccaaatcgcaaggccacacccacacctccctcctcccctccacccagagcgagcccgcccgcccgcatcggatcacatcgcgccggagcctgacgccgtgccgtcaacgaatccatgggacccacgccgccgcacacggacgacactagggttgcgcagctcccgctccccggcggcgccgaagattacgtgcgcgactccatccacgcctccctgggcctccccgtctccgatcgctccctccgcctcaagctcctcgcctccgaggagcagcgccaccgcctccaggaccacgtcttctcgctcgaggaagacctccgcgcagcccagcgccgcatcgacctcctcaaggccgaggccgccatgaacgccgccggcctccgccgctgcgtcgaggaaaaggaggccgtggccgccgcatacgccgacctctccgacaagagcagcaaggagtgtcggctctacgagcgggacctcgagcgcgccatggagtcctgtgacgacctcgccagggagaacgacgacctccgcgcacgcctaaaccagaacacagatttggcagcattgatggtgcaagtgcaagaactacataaggaaaaggagattctgaagatgaatcttgatacggcggaggcagaggtcgtgacactgagtgaggacaacagggctcttgatgaagagatcaaaaggctgctgagtttgttggagaaggagcgacagcgccggtctgaaagaaagaaatctgccagtacatccaccaagaacaagcgcaagtcgtctagcttgagggatggcaacacagctggcagggctcttgatttcggctgtgcagattcttcaaggcatccattgtccccattgccccacaactccccagactacagggcgcacaagaagtgaaggcaagaaccaacaaaccaaccattcagagcatttccagattaccttgtgcgcaacgcgagtgttgcatcatgccgctaatgatctgattcaaatatggtccctgctaattttctttctttcctgtttcggttgctgcgatgtttttagaccaggagcaaatttatcagcaaatgtatgcttgcttcgcttgcattctattacattggtagaggttgctgttgtttttgtgatggttcttaaagaaatgagaaggcacatggtttgtttatggcttgatgtatcatgtatgatatgaaagcagcttctc

SEQ ID NO: 33651 - protein, 261 aa, Zea mays subsp. mays
  peptide (1)..(261): Ceres Seq. ID no. 13498173
  misc_feature (23)..(195): NCBI GI NO: 15233676 NR Description: expressed protein [Arabidopsis thaliana]
  misc_feature (23)..(219): NCBI GI NO: 15223854 NR Description: hypothetical protein [Arabidopsis thaliana]
  misc_feature (50)..(255): NCBI GI NO: 15233676 NR Description: expressed protein [Arabidopsis thaliana]
MGPTPPHTDDTRVAQLPLPGGAEDYVRDSIHASLGLPVSDRSLRLKLLASEEQRHRLQDHVFSLEEDLRAAQRRIDLLKAEAAMNAAGLRRCVEEKEAVAAAYADLSDKSSKECRLYERDLERAMESCDDLARENDDLRARLNQNTDLAALMVQVQELHKEKEILKMNLDTAEAEVVTLSEDNRALDEEIKRLLSLLEKERQRRSERKKSASTSTKNKRKSSSLRDGNTAGRALDFGCADSSRHPLSPLPHNSPDYRAHKK

SEQ ID NO: 33652 - protein, 178 aa, Zea mays subsp. mays
  peptide (1)..(178): Ceres Seq. ID no. 13498174
  misc_feature (1)..(112): NCBI GI NO: 15233676 NR Description: expressed protein [Arabidopsis thaliana]
  misc_feature (1)..(136): NCBI GI NO: 15223854 NR Description: hypothetical protein [Arabidopsis thaliana]
  misc_feature (1)..(172): NCBI GI NO: 15233676 NR Description: expressed protein [Arabidopsis thaliana]
MNAAGLRRCVEEKEAVAAAYADLSDKSSKECRLYERDLERAMESCDDLARENDDLRARLNQNTDLAALMVQVQELHKEKEILKMNLDTAEAEVVTLSEDNRALDEEIKRLLSLLEKERQRRSERKKSASTSTKNKRKSSSLRDGNTAGRALDFGCADSSRHPLSPLPHNSPDYRAHKK

SEQ ID NO: 33653 - protein, 137 aa, Zea mays subsp. mays
  peptide (1)..(137): Ceres Seq. ID no. 13498175
  misc_feature (1)..(71): NCBI GI NO: 15233676 NR Description: expressed protein [Arabidopsis thaliana]
  misc_feature (1)..(95): NCBI GI NO: 15223854 NR Description: hypothetical protein [Arabidopsis thaliana]
  misc_feature (1)..(131): NCBI GI NO: 15233676 NR Description: expressed protein [Arabidopsis thaliana]
MESCDDLARENDDLRARLNQNTDLAALMVQVQELHKEKEILKMNLDTAEAEVVTLSEDNRALDEEIKRLLSLLEKERQRRSERKKSASTSTKNKRKSSSLRDGNTAGRALDFGCADSSRHPLSPLPHNSPDYRAHKK

SEQ ID NO: 33654 - DNA, 1246 bp, Zea mays subsp. mays
  misc_feature (1)..(1246): Ceres Seq. ID no. 12365011
aacaagccgactccgacggcgccgtccacgacgacgggcggcggactgcgcgccatggatctgtacgagaagctggagaaggtgggggagggcacgtacgggaaggtgtacaaggcccgggagaaggcgacgggccggatcgtggcgctcaagaagacgcggctccccgaggacgacgagggcgtgccgcccaccgcgctgcgggaggtctcgctgctgcggatgctgtcgcaggacccgcacgtggtccgcctgctcgacctcaagcagggcgtcaacaaggaggggcagaccatcctgtacctcgtcttcgagtacatggacaccgacctgaagaagttcatccggggctatcgcgccaaccacgagaagatccccgcacaaaccgtcaagatcctgatgtaccagcttgcaagggcgtgggttttgttcacggccgcggggtgctccaccgtgatctgaaaccgcacaacctgctcatggaccgcaagaccatggcgctcaagatcgctgacctcggactcagccgtgccatcaccgtccctgtaaagaagtacacgcacgagattctgacgctgtggtacagggcgcccgaggttcttcttggcgccacacactactccacgccggttgacatttggtccgtggggtgcatatttactgagttggttactaatcagccacttttccctggcgactccgagttgcagcagctcctccacatcttcaagttgctgggcaccccaaatgaggagatgtggccaggagtaggcaagctgccgaactggcacgtgtacccccagtggaagcccactaagctgtccactcttgtccctggtcttgactccgatggctatgatttacttgagaaaatgcttgcatatgagccagggaagcgggtctcggcgaagaaggccctggagcacccgtacttcaatgatgttaacaaggaggtgtactgaagcgacccgagtagtagggttcatcgagagaggatcattgtcaccttattcttcgcttagtgtgttaatatggctaccctgaagcagtacttgaagtatctctgtgttcaagctgctacttttctatttgttgtgccattcactttggttgtgatggataaggcagggagagttttcagcatgagtgagcttatgttgacactgtttcttgcaaattgtagccggaaagcttgcgatcatcttccatttgatttataaagcttcactatatggctctgaagctc

SEQ ID NO: 33655 - protein, 319 aa, Zea mays subsp. mays
  peptide (1)..(319): Ceres Seq. ID no. 12365012
  misc_feature (137)..(311): Pfam Name: Pfam Description:  Protein kinase domain
  misc_feature (137)..(319): NCBI GI NO: 7489567 NR Description: protein kinase cdc2 homolog - rice
  misc_feature (137)..(316): NCBI GI NO: 11125685 NR Description: B2-type cyclin dependent kinase
  misc_feature (137)..(316): NCBI GI NO: 7434327 NR Description: probable cdc2-like protein kinase cdc2MsF - alfalfa
  misc_feature (137)..(314): NCBI GI NO: 14488071 NR Description: At1g76540/F14G6_14 [Arabidopsis thaliana]
  misc_feature (137)..(314): NCBI GI NO: 15223081 NR Description: Cyclin-dependent kinase B2;1; protein id:At1g76540
  misc_feature (137)..(314): NCBI GI NO: 15218072 NR Description: Cyclin-dependent kinase B2;2; protein id:At1g20930
  misc_feature (137)..(314): NCBI GI NO: 21536682 NR Description: putative cell division control protein cdc2 kinase
  misc_feature (137)..(314): NCBI GI NO: 21537217 NR Description: putative cell division control protein cdc2
  misc_feature (137)..(316): NCBI GI NO: 5921447 NR Description: CELL DIVISION CONTROL PROTEIN 2 HOMOLOG D
  misc_feature (138)..(319): NCBI GI NO: 2190494 NR Description: cyclin dependent kinase [Petunia x hybrida]
QADSDGAVHDDGRRTARHGSVREAGEGGGGHVREGVQGPGEGDGPDRGAQEDAAPRGRRGRAAHRAAGGLAAADAVAGPARGPPARPQAGRQQGGADHPVPRLRVHGHRPEEVHPGLSRQPREDPRTNRQDPDVPACKGVGFVHGRGVLHRDLKPHNLLMDRKTMALKIADLGLSRAITVPVKKYTHEILTLWYRAPEVLLGATHYSTPVDIWSVGCIFTELVTNQPLFPGDSELQQLLHIFKLLGTPNEEMWPGVGKLPNWHVYPQWKPTKLSTLVPGLDSDGYDLLEKMLAYEPGKRVSAKKALEHPYFNDVNKEVY

SEQ ID NO: 33656 - protein, 160 aa, Zea mays subsp. mays
  peptide (1)..(160): Ceres Seq. ID no. 12365013
  misc_feature (1)..(152): Pfam Name: Pfam Description:  Protein kinase domain
  misc_feature (1)..(160): NCBI GI NO: 7489567 NR Description: protein kinase cdc2 homolog - rice
  misc_feature (1)..(157): NCBI GI NO: 11125685 NR Description: B2-type cyclin dependent kinase
  misc_feature (1)..(157): NCBI GI NO: 7434327 NR Description: probable cdc2-like protein kinase cdc2MsF - alfalfa
  misc_feature (1)..(155): NCBI GI NO: 14488071 NR Description: At1g76540/F14G6_14 [Arabidopsis thaliana]
  misc_feature (1)..(155): NCBI GI NO: 15218072 NR Description: Cyclin-dependent kinase B2;2; protein id:At1g20930
  misc_feature (1)..(155): NCBI GI NO: 15223081 NR Description: Cyclin-dependent kinase B2;1; protein id:At1g76540
  misc_feature (1)..(155): NCBI GI NO: 21536682 NR Description: putative cell division control protein cdc2 kinase
  misc_feature (1)..(155): NCBI GI NO: 21537217 NR Description: putative cell division control protein cdc2
  misc_feature (1)..(157): NCBI GI NO: 5921447 NR Description: CELL DIVISION CONTROL PROTEIN 2 HOMOLOG D
  misc_feature (1)..(160): NCBI GI NO: 2190494 NR Description: cyclin dependent kinase [Petunia x hybrida]
MDRKTMALKIADLGLSRAITVPVKKYTHEILTLWYRAPEVLLGATHYSTPVDIWSVGCIFTELVTNQPLFPGDSELQQLLHIFKLLGTPNEEMWPGVGKLPNWHVYPQWKPTKLSTLVPGLDSDGYDLLEKMLAYEPGKRVSAKKALEHPYFNDVNKEVY

SEQ ID NO: 33657 - DNA, 1361 bp, Zea mays subsp. mays
  misc_feature (1)..(1361): Ceres Seq. ID no. 12355661
aaaaaaatacgggcccgtgtctcagcgcacacctcttcgtgctcgctcccatggaggccaccccgatctccatgaagccaccggcgccacccccggtcactctggagcccatagaattgtcaacgcatgccgtcggactgaccgagctggagcgatccagcatgaaccagctcgcaatagcgccggaccccaagcggcagagggtggaggaggctgcggatggcaacgggtgcaagcattgcgcctgcaagaagtccagatgcttgaagctctattgcccatgttttgctggaggtggttattgttccgataagtgtggctgccaaccatgtttcaacaaagaagccttttcagaaacagttcagactactcgcaaggtgttactttcaagacagaagcgcatgtcgatgaaaattaataggagacctgaggcaaatgctgaaccaatggaagatgctcaccattcttcttcttcaactccaccaaggagaggttgcaactgcaagaaatcaagttgcctgaagaaatactgcgattgctaccaggatgggaccggatgttccttgttttgccgttgcgacgattgccagaaccctttcgggaaaaatgacggcataattgctgatgacagtaagcgctatctgtacactggtgctgatttggatcacagcgagggcgaacatgacttcgttgtggagcgctcgcctcgtctgcagtcacccatgtcgaaggagtcttctttccaccagaccccaccccatctcagggcctcgagcagagacgcgcacgtgttcccgcaggcggtatcccagtggcaggcgctgccccgctcgtggcactgttccaacaagaggaacggcaacgacagggcgatggacgactcctccgccaacggcaactacaagagctcgagccatgactggcagatgtccaagctcgaggacggctacagcatatcgagatgcgtccagatcctgaacggcatggtggagctgtcgcaggtggagaagtcagttgcccccgacgtcttcctgctgccgggcaaccgggaaattttcgtctccctcggcggcgatgtgcgcgccatgtggctgaagcgcaagattcagcacctggcttaggggagggtgtgtttcattgcgccatgtgccgtcctctcgagtgaggagattggaggggaaattgagttttcttttagatcctgcatgttctgctgctggtcgtgggcgtgcacaggattctaggctcttttttcctgtttactgaggtgtatttatggattgacattacgtattgtctttgtagagatagcggtttcgagcctggtatcggatataataaaaaaatgagattatacaccc

SEQ ID NO: 33658 - protein, 372 aa, Zea mays subsp. mays
  peptide (1)..(372): Ceres Seq. ID no. 12355662
  misc_feature (162)..(201): Pfam Name: Pfam Description:  Tesmin/TSO1-like CXC domain
  misc_feature (35)..(211): NCBI GI NO: 15028139 NR Description: putative DNA binding protein
  misc_feature (35)..(211): NCBI GI NO: 23297130 NR Description: putative DNA binding protein
  misc_feature (52)..(267): NCBI GI NO: 7767427 NR Description: CXC domain containing TSO1-like protein 1
  misc_feature (52)..(267): NCBI GI NO: 18403510 NR Description: expressed protein; protein id: At3g22760
  misc_feature (60)..(228): NCBI GI NO: 34393829 NR Description: putative CXC domain protein TSO1
  misc_feature (35)..(211): NCBI GI NO: 6739821 NR Description: putative DNA binding protein
  misc_feature (35)..(211): NCBI GI NO: 30686784 NR Description: DNA binding protein -related
  misc_feature (61)..(265): NCBI GI NO: 40241245 NR Description: cysteine-rich polycomb-like protein
  misc_feature (60)..(207): NCBI GI NO: 4218187 NR Description: cysteine-rich polycomb-like protein [Glycine max]
  misc_feature (52)..(181): NCBI GI NO: 9279694 NR Description: DNA binding protein-like [Arabidopsis thaliana]
KNTGPCLSAHLFVLAPMEATPISMKPPAPPPVTLEPIELSTHAVGLTELERSSMNQLAIAPDPKRQRVEEAADGNGCKHCACKKSRCLKLYCPCFAGGGYCSDKCGCQPCFNKEAFSETVQTTRKVLLSRQKRMSMKINRRPEANAEPMEDAHHSSSSTPPRRGCNCKKSSCLKKYCDCYQDGTGCSLFCRCDDCQNPFGKNDGIIADDSKRYLYTGADLDHSEGEHDFVVERSPRLQSPMSKESSFHQTPPHLRASSRDAHVFPQAVSQWQALPRSWHCSNKRNGNDRAMDDSSANGNYKSSSHDWQMSKLEDGYSISRCVQILNGMVELSQVEKSVAPDVFLLPGNREIFVSLGGDVRAMWLKRKIQHLA

SEQ ID NO: 33659 - protein, 356 aa, Zea mays subsp. mays
  peptide (1)..(356): Ceres Seq. ID no. 12355663
  misc_feature (146)..(185): Pfam Name: Pfam Description:  Tesmin/TSO1-like CXC domain
  misc_feature (19)..(195): NCBI GI NO: 15028139 NR Description: putative DNA binding protein
  misc_feature (19)..(195): NCBI GI NO: 23297130 NR Description: putative DNA binding protein
  misc_feature (36)..(251): NCBI GI NO: 7767427 NR Description: CXC domain containing TSO1-like protein 1
  misc_feature (36)..(251): NCBI GI NO: 18403510 NR Description: expressed protein; protein id: At3g22760
  misc_feature (44)..(212): NCBI GI NO: 34393829 NR Description: putative CXC domain protein TSO1
  misc_feature (19)..(195): NCBI GI NO: 6739821 NR Description: putative DNA binding protein
  misc_feature (19)..(195): NCBI GI NO: 30686784 NR Description: DNA binding protein -related
  misc_feature (45)..(249): NCBI GI NO: 40241245 NR Description: cysteine-rich polycomb-like protein
  misc_feature (44)..(191): NCBI GI NO: 4218187 NR Description: cysteine-rich polycomb-like protein [Glycine max]
  misc_feature (36)..(165): NCBI GI NO: 9279694 NR Description: DNA binding protein-like [Arabidopsis thaliana]
MEATPISMKPPAPPPVTLEPIELSTHAVGLTELERSSMNQLAIAPDPKRQRVEEAADGNGCKHCACKKSRCLKLYCPCFAGGGYCSDKCGCQPCFNKEAFSETVQTTRKVLLSRQKRMSMKINRRPEANAEPMEDAHHSSSSTPPRRGCNCKKSSCLKKYCDCYQDGTGCSLFCRCDDCQNPFGKNDGIIADDSKRYLYTGADLDHSEGEHDFVVERSPRLQSPMSKESSFHQTPPHLRASSRDAHVFPQAVSQWQALPRSWHCSNKRNGNDRAMDDSSANGNYKSSSHDWQMSKLEDGYSISRCVQILNGMVELSQVEKSVAPDVFLLPGNREIFVSLGGDVRAMWLKRKIQHLA

SEQ ID NO: 33660 - protein, 349 aa, Zea mays subsp. mays
  peptide (1)..(349): Ceres Seq. ID no. 12355664
  misc_feature (139)..(178): Pfam Name: Pfam Description:  Tesmin/TSO1-like CXC domain
  misc_feature (12)..(188): NCBI GI NO: 15028139 NR Description: putative DNA binding protein
  misc_feature (12)..(188): NCBI GI NO: 23297130 NR Description: putative DNA binding protein
  misc_feature (29)..(244): NCBI GI NO: 7767427 NR Description: CXC domain containing TSO1-like protein 1
  misc_feature (29)..(244): NCBI GI NO: 18403510 NR Description: expressed protein; protein id: At3g22760
  misc_feature (37)..(205): NCBI GI NO: 34393829 NR Description: putative CXC domain protein TSO1
  misc_feature (12)..(188): NCBI GI NO: 6739821 NR Description: putative DNA binding protein
  misc_feature (12)..(188): NCBI GI NO: 30686784 NR Description: DNA binding protein -related
  misc_feature (38)..(242): NCBI GI NO: 40241245 NR Description: cysteine-rich polycomb-like protein
  misc_feature (37)..(184): NCBI GI NO: 4218187 NR Description: cysteine-rich polycomb-like protein [Glycine max]
  misc_feature (29)..(158): NCBI GI NO: 9279694 NR Description: DNA binding protein-like [Arabidopsis thaliana]
MKPPAPPPVTLEPIELSTHAVGLTELERSSMNQLAIAPDPKRQRVEEAADGNGCKHCACKKSRCLKLYCPCFAGGGYCSDKCGCQPCFNKEAFSETVQTTRKVLLSRQKRMSMKINRRPEANAEPMEDAHHSSSSTPPRRGCNCKKSSCLKKYCDCYQDGTGCSLFCRCDDCQNPFGKNDGIIADDSKRYLYTGADLDHSEGEHDFVVERSPRLQSPMSKESSFHQTPPHLRASSRDAHVFPQAVSQWQALPRSWHCSNKRNGNDRAMDDSSANGNYKSSSHDWQMSKLEDGYSISRCVQILNGMVELSQVEKSVAPDVFLLPGNREIFVSLGGDVRAMWLKRKIQHLA

SEQ ID NO: 33661 - DNA, 1224 bp, Zea mays subsp. mays
  misc_feature (1)..(1224): Ceres Seq. ID no. 12411717
gccgtgccgtctcctctcctctcctctctcctctctcatccccaggtctcagcccacctagcaatgttctcctcctccccttccacatgaccagcgccgcgccgcgcagcgcagccatccttgttctgtcccgggtacgccgccacacacatcgcttcaagcgcttccctccgtccctcctctttgtggattggaatcgacgcctgaaagtggatgacgatggcgggttcttgcgccgcgccgcccgttgcctgtcttccctcgttgaggacgctgccgccaactcacgtcagacttagcggcttcttgccctgttcctcggccgcgcggagtcgcggcgccgccgtgctgggatgcgctctggggaccaagaggcagacgccgggtgttctgaaccggttgttctgtggatacatgcaaagagatgggcatgaaggagatgtaagctgtcaaggaagggatgacactgttatgtttggaccagatgatgatggtgtaaagattcctactcaggtagagactcttgtaaagggcactgcaatggttgctgaaccagaatacaaggctagcccagatctagattacctacaggagctgctggctattcagcagcaaggacctcgtgcaataggtttctttggaacccgcaacatgggatttatgcatcaacaacttattgagatcctgagctatgctatggtcataacaaaaaatcatatattcacatctggtgcttctggaacaaatgcagctgttatcaggggtgctttaagagctgaaaagccagagctgcttactgtaattttacctcaaagcctaaagaagcagcctcctgaaagccaagaactgttgtctaaagtacaaaacttgatcgagaaaccacagtatgatcatttgccactaattgaggctagcaggttatgcaatatggacatcatctccaaggtccaacaggtgatctgcttcgcgttccatgacagcaagctgctgatggaaacatgccaggaggccaagaaccttcggaagatcgtgacactcttctacttggattagctcctccgacatggatctattctccttttttttttgttcgtggcgtaggctaatgttggggggataaaaagcaagttggacggtttagttagtttcgaaatatactggataggtggtgggatgaccttccattggatgagaaagtcattttgtttcgcccattattactgg

SEQ ID NO: 33662 - protein, 279 aa, Zea mays subsp. mays
  peptide (1)..(279): Ceres Seq. ID no. 12411718
  misc_feature (84)..(279): NCBI GI NO: 30689549 NR Description: predicted protein [Arabidopsis thaliana]
  misc_feature (70)..(279): NCBI GI NO: 21537298 NR Description: unknown [Arabidopsis thaliana]
  misc_feature (70)..(279): NCBI GI NO: 15232185 NR Description: putative protein; protein id: At3g59870
  misc_feature (84)..(255): NCBI GI NO: 7486491 NR Description: hypothetical protein At2g43940
  misc_feature (62)..(220): NCBI GI NO: 34894968 NR Description: B1088D01.6
  misc_feature (125)..(279): NCBI GI NO: 13812204 NR Description: hypothetical protein [Guillardia theta]
  misc_feature (120)..(279): NCBI GI NO: 16331173 NR Description: unknown protein [Synechocystis sp. PCC 6803]
  misc_feature (129)..(279): NCBI GI NO: 37522470 NR Description: hypothetical protein gll2901
  misc_feature (143)..(279): NCBI GI NO: 23043068 NR Description: hypothetical protein
  misc_feature (147)..(279): NCBI GI NO: 17232156 NR Description: hypothetical protein [Nostoc sp. PCC 7120]
MTMAGSCAAPPVACLPSLRTLPPTHVRLSGFLPCSSAARSRGAAVLGCALGTKRQTPGVLNRLFCGYMQRDGHEGDVSCQGRDDTVMFGPDDDGVKIPTQVETLVKGTAMVAEPEYKASPDLDYLQELLAIQQQGPRAIGFFGTRNMGFMHQQLIEILSYAMVITKNHIFTSGASGTNAAVIRGALRAEKPELLTVILPQSLKKQPPESQELLSKVQNLIEKPQYDHLPLIEASRLCNMDIISKVQQVICFAFHDSKLLMETCQEAKNLRKIVTLFYLD

SEQ ID NO: 33663 - protein, 277 aa, Zea mays subsp. mays
  peptide (1)..(277): Ceres Seq. ID no. 12411719
  misc_feature (82)..(277): NCBI GI NO: 30689549 NR Description: predicted protein [Arabidopsis thaliana]
  misc_feature (68)..(277): NCBI GI NO: 21537298 NR Description: unknown [Arabidopsis thaliana]
  misc_feature (68)..(277): NCBI GI NO: 15232185 NR Description: putative protein; protein id: At3g59870
  misc_feature (82)..(253): NCBI GI NO: 7486491 NR Description: hypothetical protein At2g43940
  misc_feature (60)..(218): NCBI GI NO: 34894968 NR Description: B1088D01.6
  misc_feature (123)..(277): NCBI GI NO: 13812204 NR Description: hypothetical protein [Guillardia theta]
  misc_feature (118)..(277): NCBI GI NO: 16331173 NR Description: unknown protein [Synechocystis sp. PCC 6803]
  misc_feature (127)..(277): NCBI GI NO: 37522470 NR Description: hypothetical protein gll2901
  misc_feature (141)..(277): NCBI GI NO: 23043068 NR Description: hypothetical protein
  misc_feature (145)..(277): NCBI GI NO: 17232156 NR Description: hypothetical protein [Nostoc sp. PCC 7120]
MAGSCAAPPVACLPSLRTLPPTHVRLSGFLPCSSAARSRGAAVLGCALGTKRQTPGVLNRLFCGYMQRDGHEGDVSCQGRDDTVMFGPDDDGVKIPTQVETLVKGTAMVAEPEYKASPDLDYLQELLAIQQQGPRAIGFFGTRNMGFMHQQLIEILSYAMVITKNHIFTSGASGTNAAVIRGALRAEKPELLTVILPQSLKKQPPESQELLSKVQNLIEKPQYDHLPLIEASRLCNMDIISKVQQVICFAFHDSKLLMETCQEAKNLRKIVTLFYLD

SEQ ID NO: 33664 - protein, 212 aa, Zea mays subsp. mays
  peptide (1)..(212): Ceres Seq. ID no. 12411720
  misc_feature (17)..(212): NCBI GI NO: 30689549 NR Description: predicted protein [Arabidopsis thaliana]
  misc_feature (3)..(212): NCBI GI NO: 21537298 NR Description: unknown [Arabidopsis thaliana]
  misc_feature (3)..(212): NCBI GI NO: 15232185 NR Description: putative protein; protein id: At3g59870
  misc_feature (17)..(188): NCBI GI NO: 7486491 NR Description: hypothetical protein At2g43940
  misc_feature (1)..(153): NCBI GI NO: 34894968 NR Description: B1088D01.6
  misc_feature (58)..(212): NCBI GI NO: 13812204 NR Description: hypothetical protein [Guillardia theta]
  misc_feature (53)..(212): NCBI GI NO: 16331173 NR Description: unknown protein [Synechocystis sp. PCC 6803]
  misc_feature (62)..(212): NCBI GI NO: 37522470 NR Description: hypothetical protein gll2901
  misc_feature (76)..(212): NCBI GI NO: 23043068 NR Description: hypothetical protein
  misc_feature (80)..(212): NCBI GI NO: 17232156 NR Description: hypothetical protein [Nostoc sp. PCC 7120]
MQRDGHEGDVSCQGRDDTVMFGPDDDGVKIPTQVETLVKGTAMVAEPEYKASPDLDYLQELLAIQQQGPRAIGFFGTRNMGFMHQQLIEILSYAMVITKNHIFTSGASGTNAAVIRGALRAEKPELLTVILPQSLKKQPPESQELLSKVQNLIEKPQYDHLPLIEASRLCNMDIISKVQQVICFAFHDSKLLMETCQEAKNLRKIVTLFYLD

SEQ ID NO: 33665 - DNA, 1351 bp, Zea mays subsp. mays
  misc_feature (1)..(1351): Ceres Seq. ID no. 12411713
gattgtaattctgtaattacgattagttggagagctgcaccgtgcagcactggctgaacaacagctccttgtcgccgtcctcggcgtcctcgggactcatcttgggtcggaagctgctccacgccggcgccagccctggtgcagcgctggtgtcgaagctgtgcactagcgagactgttcggaagctgtcgtcgcccgacggcacctggtagccggcgaggaagtagagctgcgtgccgacgacggccatggtgaggtagagccgctgagctgaagacgggagactggcgagcagcgacaggtcgggcagggcggagtggtccatgatgctctagatgttgagctcgccgtcgtagacctcgacgtgtcccttccagctggtgaggcagtcgccggagctgaacagcctgttggccaccgccacgatctggttcgggggcacgtcgagctgccacatccccggtagattttgtatctaaccatatctcgtgaggatgattgttgtgttggtttgttcaggcgtggctgaccccgtgaacttgccgtcgggaagtccagctgctgcggtttttgtggcgagcctttgcagttcgttctccagtgtaaccggcaacatcagctctgcaagaaccccagaataaaccctgacatcaagacactccactgatcactcttgtgctgctcctaccaatggagcaagagcatctccacctgacaatggtccactcgttgtattcatcactaagtccgctcgattccaccaataggtgttcatgcttacagttgaattggcaaactgagggaggtgccgggggagcaaaattttctcagtttggcgctgatttatcaacgatcatggataagcatttgaagacccttgccccagtctacgtgggaacaaaattcgtcaagcttgatgctgaatatgctccattctttgtggccaaactggcaatcaagacactgccatgtgtaatattgttcaagaaggatattgctgttgaccgattagttgggtttcaagatctcagaagtaaagacgattttctgacaagagcattggaacacattcttattctcaagacgaaagggataatcgatgagaagaagaaagatgacgacgatgacgatgaagaaagcgaggctaagaataggagggttaggtcctcaactgctcaagactctgactcagactgaacttgagatgaggattgaggactcaccgtttttgcactttggattttgtttgtttgtttgtttgttctgtgctgtgttgtactgtaattgatttgtgtaaccatgtatcggtaccagacaccacaacaagaacatgtacaagagattctttagc

SEQ ID NO: 33666 - protein, 168 aa, Zea mays subsp. mays
  peptide (1)..(168): Ceres Seq. ID no. 12411714
  misc_feature (55)..(168): NCBI GI NO: 30693386 NR Description: expressed protein [Arabidopsis thaliana]
  misc_feature (55)..(168): NCBI GI NO: 18425069 NR Description: putative protein; protein id: At5g66410
  misc_feature (55)..(168): NCBI GI NO: 10177522 NR Description: contains similarity to ATP binding proteinassociated with cell differentiation~gene_id:K1F13
  misc_feature (55)..(168): NCBI GI NO: 7485705 NR Description: hypothetical protein F18B3
  misc_feature (55)..(168): NCBI GI NO: 15224267 NR Description: putative ATP binding protein; protein id:At2g18990
  misc_feature (55)..(168): NCBI GI NO: 40253924 NR Description: putative ATP binding protein associated with celldifferentiation
  misc_feature (55)..(168): NCBI GI NO: 18404574 NR Description: expressed protein; protein id: At3g25580
  misc_feature (55)..(168): NCBI GI NO: 21594045 NR Description: putative ATP binding protein
  misc_feature (55)..(168): NCBI GI NO: 26452365 NR Description: unknown protein [Arabidopsis thaliana]
  misc_feature (55)..(168): NCBI GI NO: 39581010 NR Description: Hypothetical protein CBG19670
MEQEHLHLTMVHSLYSSLSPLDSTNRCSCLQLNWQTEGGAGGAKFSQFGADLSTIMDKHLKTLAPVYVGTKFVKLDAEYAPFFVAKLAIKTLPCVILFKKDIAVDRLVGFQDLRSKDDFLTRALEHILILKTKGIIDEKKKDDDDDDEESEAKNRRVRSSTAQDSDSD

SEQ ID NO: 33667 - protein, 159 aa, Zea mays subsp. mays
  peptide (1)..(159): Ceres Seq. ID no. 12411715
  misc_feature (46)..(159): NCBI GI NO: 30693386 NR Description: expressed protein [Arabidopsis thaliana]
  misc_feature (46)..(159): NCBI GI NO: 18425069 NR Description: putative protein; protein id: At5g66410
  misc_feature (46)..(159): NCBI GI NO: 10177522 NR Description: contains similarity to ATP binding proteinassociated with cell differentiation~gene_id:K1F13
  misc_feature (46)..(159): NCBI GI NO: 7485705 NR Description: hypothetical protein F18B3
  misc_feature (46)..(159): NCBI GI NO: 15224267 NR Description: putative ATP binding protein; protein id:At2g18990
  misc_feature (46)..(159): NCBI GI NO: 40253924 NR Description: putative ATP binding protein associated with celldifferentiation
  misc_feature (46)..(159): NCBI GI NO: 18404574 NR Description: expressed protein; protein id: At3g25580
  misc_feature (46)..(159): NCBI GI NO: 21594045 NR Description: putative ATP binding protein
  misc_feature (46)..(159): NCBI GI NO: 26452365 NR Description: unknown protein [Arabidopsis thaliana]
  misc_feature (46)..(159): NCBI GI NO: 39581010 NR Description: Hypothetical protein CBG19670
MVHSLYSSLSPLDSTNRCSCLQLNWQTEGGAGGAKFSQFGADLSTIMDKHLKTLAPVYVGTKFVKLDAEYAPFFVAKLAIKTLPCVILFKKDIAVDRLVGFQDLRSKDDFLTRALEHILILKTKGIIDEKKKDDDDDDEESEAKNRRVRSSTAQDSDSD

SEQ ID NO: 33668 - protein, 113 aa, Zea mays subsp. mays
  peptide (1)..(113): Ceres Seq. ID no. 12411716
  misc_feature (1)..(113): NCBI GI NO: 30693386 NR Description: expressed protein [Arabidopsis thaliana]
  misc_feature (1)..(113): NCBI GI NO: 18425069 NR Description: putative protein; protein id: At5g66410
  misc_feature (1)..(113): NCBI GI NO: 10177522 NR Description: contains similarity to ATP binding proteinassociated with cell differentiation~gene_id:K1F13
  misc_feature (1)..(113): NCBI GI NO: 7485705 NR Description: hypothetical protein F18B3
  misc_feature (1)..(113): NCBI GI NO: 15224267 NR Description: putative ATP binding protein; protein id:At2g18990
  misc_feature (1)..(113): NCBI GI NO: 40253924 NR Description: putative ATP binding protein associated with celldifferentiation
  misc_feature (1)..(113): NCBI GI NO: 18404574 NR Description: expressed protein; protein id: At3g25580
  misc_feature (1)..(113): NCBI GI NO: 21594045 NR Description: putative ATP binding protein
  misc_feature (1)..(113): NCBI GI NO: 26452365 NR Description: unknown protein [Arabidopsis thaliana]
  misc_feature (1)..(113): NCBI GI NO: 39581010 NR Description: Hypothetical protein CBG19670
MDKHLKTLAPVYVGTKFVKLDAEYAPFFVAKLAIKTLPCVILFKKDIAVDRLVGFQDLRSKDDFLTRALEHILILKTKGIIDEKKKDDDDDDEESEAKNRRVRSSTAQDSDSD

SEQ ID NO: 33669 - DNA, 1674 bp, Zea mays subsp. mays
  misc_feature (1)..(1674): Ceres Seq. ID no. 12355665
cacttgcagaggttcgcgactcgcgacgcctccgcagccccagccccacgccccgcgacccaaaccctagccccctccaccgtaccgccaccgtcatggccgaaccatccgccgccgccgtcaccgcagctgaggtcggggaggagtccgatgccgccgcgatggaggaggtcgcggcggccgcgaagaggtggcccgggtggcccggggacagcgtgttccggctggtggtgccagtgctcaaggtcggaagcataatcgggcggaagggcgagctcatcaagcgccttgtcgaggggaccaaggccagagtccgcatcctcgagggccccgtcggcgccaccgagcgtatcgttttggtttctggaaaagaagatccaggcttggagctatctccagccatggatgctctcatgagagtttttaagcgtgtcattgggataacagatggagctgcggagggcactcaggctgctgctactcctggtgtatgtgctgcccgattgttggttcctggagctcaggcaattaacctaattgggaagcaaggtgccactatcaaagcaatccaggagagcacgggtgctacaatacgggtaatatcagtagatgaacatgagagaccattttatgtaactgacgatgaaaggatagttgagatacagggcgatacagagaaagttctaaaagcactgcaagcagtttctaaccatcttcggaagtttttggttgaccatagtgtacttccattatttgaaaaaactaatactgcagtgagccaagatcacaatgttggttggagtgatatgtcacatccttcaattggttctgcacaagtgaatcaaccaccttcagtggtagatgaatatattcttccagtgaagagggatactttgtatcttgaacgagaacctttgttagatcataacattcatcgctcaggcgtatcactttatgggcgggatccagccttgtcaacactacgaccacctggaatacatggtgctgggcccgctacttacacagataacccaaaccatgcaaatcccacttacctatgctgaagacattataggagttaaaggagcaaatattgcgtacatacgagctaatagtggagctgttgttacaattcaggagagtttgggtagtccagatgatattactgttgaaataaaggggacatcttcacaggtacaagctgcacagcagctcatccaggactcgttggctgcacaccgagaacctgtcagaagcagttatgtgggagcaggattagattcactgtataggtccagctactcacaatatggcagctccacctatccttcgtcatcactgccatcttattctagcatcgatgatgttagtaggtacccatcttcaggtcttggtggctatgggtcgagttacaggtactagtactagttcgtccttaggcttgaatgcttgatggcaccttgtatccattcctgggtgattattgtacaagtcagcaagttttctgctctgcgtgcttacgggcaggggatcattttacaagtcagcaagttctctgctttgtatgcttccgggcagggatctggtagattatactgcatcccaattcccagtacccagacttcggggtccaatttgctttgacaaacaatggaatcggaaatcgtgcttgtc

SEQ ID NO: 33670 - protein, 353 aa, Zea mays subsp. mays
  peptide (1)..(353): Ceres Seq. ID no. 12355666
  misc_feature (167)..(222): Pfam Name: Pfam Description:  KH domain
  misc_feature (35)..(337): NCBI GI NO: 37536904 NR Description: putative nucleic acid binding protein
  misc_feature (1)..(341): NCBI GI NO: 15236094 NR Description: KH domain protein; protein id: At4g26000
  misc_feature (47)..(325): NCBI GI NO: 15229321 NR Description: KH domain protein; protein id: At3g04610
  misc_feature (47)..(340): NCBI GI NO: 16924113 NR Description: putative RNA binding protein [Oryza sativa]
  misc_feature (58)..(200): NCBI GI NO: 37534332 NR Description: unknown protein
  misc_feature (193)..(252): NCBI GI NO: 37534332 NR Description: unknown protein
  misc_feature (68)..(289): NCBI GI NO: 37535668 NR Description: putative RNA-binding protein
  misc_feature (26)..(282): NCBI GI NO: 22328051 NR Description: KH domain protein; protein id: At5g64390.1
  misc_feature (26)..(282): NCBI GI NO: 28261403 NR Description: HEN4 [Arabidopsis thaliana]
  misc_feature (65)..(238): NCBI GI NO: 18921324 NR Description: putative nucleic acid binding protein
LAEVRDSRRLRSPSPTPRDPNPSPLHRTATVMAEPSAAAVTAAEVGEESDAAAMEEVAAAAKRWPGWPGDSVFRLVVPVLKVGSIIGRKGELIKRLVEGTKARVRILEGPVGATERIVLVSGKEDPGLELSPAMDALMRVFKRVIGITDGAAEGTQAAATPGVCAARLLVPGAQAINLIGKQGATIKAIQESTGATIRVISVDEHERPFYVTDDERIVEIQGDTEKVLKALQAVSNHLRKFLVDHSVLPLFEKTNTAVSQDHNVGWSDMSHPSIGSAQVNQPPSVVDEYILPVKRDTLYLEREPLLDHNIHRSGVSLYGRDPALSTLRPPGIHGAGPATYTDNPNHANPTYLC

SEQ ID NO: 33671 - protein, 322 aa, Zea mays subsp. mays
  peptide (1)..(322): Ceres Seq. ID no. 12355667
  misc_feature (136)..(191): Pfam Name: Pfam Description:  KH domain
  misc_feature (4)..(306): NCBI GI NO: 37536904 NR Description: putative nucleic acid binding protein
  misc_feature (1)..(310): NCBI GI NO: 15236094 NR Description: KH domain protein; protein id: At4g26000
  misc_feature (16)..(294): NCBI GI NO: 15229321 NR Description: KH domain protein; protein id: At3g04610
  misc_feature (16)..(309): NCBI GI NO: 16924113 NR Description: putative RNA binding protein [Oryza sativa]
  misc_feature (27)..(169): NCBI GI NO: 37534332 NR Description: unknown protein
  misc_feature (162)..(221): NCBI GI NO: 37534332 NR Description: unknown protein
  misc_feature (37)..(258): NCBI GI NO: 37535668 NR Description: putative RNA-binding protein
  misc_feature (1)..(251): NCBI GI NO: 22328051 NR Description: KH domain protein; protein id: At5g64390.1
  misc_feature (1)..(251): NCBI GI NO: 28261403 NR Description: HEN4 [Arabidopsis thaliana]
  misc_feature (34)..(207): NCBI GI NO: 18921324 NR Description: putative nucleic acid binding protein
MAEPSAAAVTAAEVGEESDAAAMEEVAAAAKRWPGWPGDSVFRLVVPVLKVGSIIGRKGELIKRLVEGTKARVRILEGPVGATERIVLVSGKEDPGLELSPAMDALMRVFKRVIGITDGAAEGTQAAATPGVCAARLLVPGAQAINLIGKQGATIKAIQESTGATIRVISVDEHERPFYVTDDERIVEIQGDTEKVLKALQAVSNHLRKFLVDHSVLPLFEKTNTAVSQDHNVGWSDMSHPSIGSAQVNQPPSVVDEYILPVKRDTLYLEREPLLDHNIHRSGVSLYGRDPALSTLRPPGIHGAGPATYTDNPNHANPTYLC

SEQ ID NO: 33672 - protein, 300 aa, Zea mays subsp. mays
  peptide (1)..(300): Ceres Seq. ID no. 12355668
  misc_feature (114)..(169): Pfam Name: Pfam Description:  KH domain
  misc_feature (1)..(284): NCBI GI NO: 37536904 NR Description: putative nucleic acid binding protein
  misc_feature (1)..(288): NCBI GI NO: 15236094 NR Description: KH domain protein; protein id: At4g26000
  misc_feature (1)..(272): NCBI GI NO: 15229321 NR Description: KH domain protein; protein id: At3g04610
  misc_feature (1)..(287): NCBI GI NO: 16924113 NR Description: putative RNA binding protein [Oryza sativa]
  misc_feature (5)..(147): NCBI GI NO: 37534332 NR Description: unknown protein
  misc_feature (140)..(199): NCBI GI NO: 37534332 NR Description: unknown protein
  misc_feature (15)..(236): NCBI GI NO: 37535668 NR Description: putative RNA-binding protein
  misc_feature (1)..(229): NCBI GI NO: 22328051 NR Description: KH domain protein; protein id: At5g64390.1
  misc_feature (1)..(229): NCBI GI NO: 28261403 NR Description: HEN4 [Arabidopsis thaliana]
  misc_feature (12)..(185): NCBI GI NO: 18921324 NR Description: putative nucleic acid binding protein
MEEVAAAAKRWPGWPGDSVFRLVVPVLKVGSIIGRKGELIKRLVEGTKARVRILEGPVGATERIVLVSGKEDPGLELSPAMDALMRVFKRVIGITDGAAEGTQAAATPGVCAARLLVPGAQAINLIGKQGATIKAIQESTGATIRVISVDEHERPFYVTDDERIVEIQGDTEKVLKALQAVSNHLRKFLVDHSVLPLFEKTNTAVSQDHNVGWSDMSHPSIGSAQVNQPPSVVDEYILPVKRDTLYLEREPLLDHNIHRSGVSLYGRDPALSTLRPPGIHGAGPATYTDNPNHANPTYLC

SEQ ID NO: 33673 - DNA, 1383 bp, Zea mays subsp. mays
  misc_feature (1)..(1383): Ceres Seq. ID no. 12411698
tctccccgggcacatgcccgtgggcacgcgtgcaggccactggccacccccacgcagaaaaaccagcggccgcgcgcaccgacccggccgacgactccggcgaccgcgcgcacacgacaaaaccccggcggcgacgacagacccacaggatcagacgactcagcgagcggaacaccccctggcgccggccgttaaagtcaagtcaagcaccggagccggtgtataaagctccggcgactggtgcccaccacggctagctgccgtcgtcgcagaagtaggagctcgcgtttctccatccgtacgtcctgcagtagtgattgggcagcatcgtcatcgatcgatcgccatgaggctccgcggcgtgctgcgcctcgtcctcgcgctcctcctcgccgccaccgccatcgtgccggtgctgctccttagcgagaacggcggcggcggcgtcgcacctgcgccgccgttcaactcctcgcgtgtcaaggccgtctcgtggcatccaaggatcttcgtgtacaaggggttcctctccgacgccgagtgtgaccacctcgtgactctggcgaagaaaaagatccagcggtccatggtggcggacaacgagtccggcaagagcgtcaagagcgaggtgcgcaccagctccggcatgttcctcgacaagcgccaggacccggtggtgagtcggatcgaggagaggatcgcggcatggacgtttcttcctcaagagaacgccgagaacatgcaggtgctgcgctacgagccggggcagaagtacgagccgcacttcgactacttccacgacagggtcaaccaggcccgcggcggccaccgctacgccaccgtgctcatgtacctgtccaccgtccgcgagggaggcgagaccgtgttccccaacgccaagggttgggagtcccagcccaaggacgccactttctccgagtgtgcacacaaaggattggcagtgaaaccggtgaaaggcgacgccgtgctcttcttcagcctgcacgccgacggcacgccggacccgctcagcctccacgggagctgcccggtgatccggggcgagaagtggtcggcgcccaagtggatccacgtcaggtcgtacgaggacgaaccccaggcagtactcgtgctccccgaggaaaccgacggcgcgcgggtgcgccgataggagcgagcgctgcgcgaagtgggccgcggcgggtgagtgcgcctggaacccggcgtacatgctcggcgccggcgatgagggggcgcctgggcagtgccgcaggagctgcggagtctgcgattcgtaggcgcgtccttgccttttctttctttcttcctttctttgtttgttttgggatgcagtattcagataactagtggctgtttttctgc

SEQ ID NO: 33674 - protein, 274 aa, Zea mays subsp. mays
  peptide (1)..(274): Ceres Seq. ID no. 12411699
  misc_feature (128)..(250): Pfam Name: II Pfam Description: 2OG-Fe
  misc_feature (2)..(257): NCBI GI NO: 34393269 NR Description: prolyl 4-hydroxylase alpha-1 subunit precursor-likeprotein
  misc_feature (9)..(255): NCBI GI NO: 29150368 NR Description: putative oxidoreductase
  misc_feature (7)..(274): NCBI GI NO: 29150365 NR Description: putative oxidoreductase
  misc_feature (108)..(254): NCBI GI NO: 37534316 NR Description: unknown protein
  misc_feature (2)..(107): NCBI GI NO: 37534316 NR Description: unknown protein
  misc_feature (40)..(254): NCBI GI NO: 9294583 NR Description: prolyl 4-hydroxylase alpha subunit-like protein
  misc_feature (40)..(254): NCBI GI NO: 18405808 NR Description: prolyl 4-hydroxylase, putative
  misc_feature (40)..(254): NCBI GI NO: 18086437 NR Description: AT3g28480/MFJ20_16 [Arabidopsis thaliana]
  misc_feature (14)..(254): NCBI GI NO: 18397528 NR Description: expressed protein; protein id: At3g06300
  misc_feature (14)..(254): NCBI GI NO: 21618073 NR Description: prolyl 4-hydroxylase alpha subunit-like protein
MRLRGVLRLVLALLLAATAIVPVLLLSENGGGGVAPAPPFNSSRVKAVSWHPRIFVYKGFLSDAECDHLVTLAKKKIQRSMVADNESGKSVKSEVRTSSGMFLDKRQDPVVSRIEERIAAWTFLPQENAENMQVLRYEPGQKYEPHFDYFHDRVNQARGGHRYATVLMYLSTVREGGETVFPNAKGWESQPKDATFSECAHKGLAVKPVKGDAVLFFSLHADGTPDPLSLHGSCPVIRGEKWSAPKWIHVRSYEDEPQAVLVLPEETDGARVRR

SEQ ID NO: 33675 - protein, 220 aa, Zea mays subsp. mays
  peptide (1)..(220): Ceres Seq. ID no. 12411700
  misc_feature (1)..(177): NCBI GI NO: 5821145 NR Description: RNA binding protein [Homo sapiens]
MDVSSSRERREHAGAALRAGAEVRAALRLLPRQGQPGPRRPPLRHRAHVPVHRPRGRRDRVPQRQGLGVPAQGRHFLRVCTQRIGSETGERRRRALLQPARRRHAGPAQPPRELPGDPGREVVGAQVDPRQVVRGRTPGSTRAPRGNRRRAGAPIGASAARSGPRRVSAPGTRRTCSAPAMRGRLGSAAGAAESAIRRRVLAFSFFLPFFVCFGMQYSDN

SEQ ID NO: 33676 - protein, 194 aa, Zea mays subsp. mays
  peptide (1)..(194): Ceres Seq. ID no. 12411701
  misc_feature (48)..(170): Pfam Name: II Pfam Description: 2OG-Fe
  misc_feature (1)..(177): NCBI GI NO: 34393269 NR Description: prolyl 4-hydroxylase alpha-1 subunit precursor-likeprotein
  misc_feature (1)..(175): NCBI GI NO: 29150368 NR Description: putative oxidoreductase
  misc_feature (1)..(194): NCBI GI NO: 29150365 NR Description: putative oxidoreductase
  misc_feature (28)..(174): NCBI GI NO: 37534316 NR Description: unknown protein
  misc_feature (1)..(27): NCBI GI NO: 37534316 NR Description: unknown protein
  misc_feature (1)..(174): NCBI GI NO: 9294583 NR Description: prolyl 4-hydroxylase alpha subunit-like protein
  misc_feature (1)..(174): NCBI GI NO: 18405808 NR Description: prolyl 4-hydroxylase, putative
  misc_feature (1)..(174): NCBI GI NO: 18086437 NR Description: AT3g28480/MFJ20_16 [Arabidopsis thaliana]
  misc_feature (1)..(174): NCBI GI NO: 18397528 NR Description: expressed protein; protein id: At3g06300
  misc_feature (1)..(174): NCBI GI NO: 21618073 NR Description: prolyl 4-hydroxylase alpha subunit-like protein
MVADNESGKSVKSEVRTSSGMFLDKRQDPVVSRIEERIAAWTFLPQENAENMQVLRYEPGQKYEPHFDYFHDRVNQARGGHRYATVLMYLSTVREGGETVFPNAKGWESQPKDATFSECAHKGLAVKPVKGDAVLFFSLHADGTPDPLSLHGSCPVIRGEKWSAPKWIHVRSYEDEPQAVLVLPEETDGARVRR

SEQ ID NO: 33677 - DNA, 1048 bp, Zea mays subsp. mays
  misc_feature (1)..(1048): Ceres Seq. ID no. 13577875
cagacttccagcatctccgctccggctgcgctctgccttgctttcctgctacctgctctagcgcgagcgagagaggtacggcggccgatctggcggcgcaggcggagggctcggccggggccggcaagtcggcgccgaacatggggaggggccgggtcgagctcaagcggatcgagaacaagatcaaccgccaggtcaccttcgccaagcgccgcaacggcctgctcaagaaggcgtacgagctctcggtgctctgcgacgccgaggtcgcgctcatcatcttctccaaccgcggcaagctctacgagttctccagcacgcagagcatgccaaaaacacttgaaaagtaccaaaaatgcagttttgcagggcctgaaacagcactccagaatagagagaatgagcaactgaaaagtagccgcaatgagtacctcaaactgaaggcacgtgttgataatttacagcggactcaaaggaacttgcttggtgaagatcttgagtcattaggcataaaagagctggagcacctggagaagcagctcgattcgtccttgaagcacataagatctacaaggacacaacacatggttgatcaactgacagaacttcagaaaaaagaacaaatgttttgtgaagcaaataagtgtcttcgaagaagactggaggagagcaaccaggttatatggcagcatgcgtgggagcaaagcgagcggcattctgaagtgcagccgcagcagctcaatggcaataacttcttccatcccctcgatggtgctggtgaacccacccttcagatagggtatccttcagaggcactgactagctcatgcatgaccaccttcctgcccccgtggttgccatgagatcgaactactgcgcaattccgaattaataagcatggccgcatgcagctgcctgtgctatacgttgtgcttggagtgtactttaaggttcttgcatggcaagtatgtgtgtaacatttgtgatgaacatggaaactatccacttaattctcgaataatcaatgaactgggtaagattgtaacat

SEQ ID NO: 33678 - protein, 286 aa, Zea mays subsp. mays
  peptide (1)..(286): Ceres Seq. ID no. 13577876
  misc_feature (121)..(222): Pfam Name: Pfam Description:  K-box region
  misc_feature (47)..(286): NCBI GI NO: 29372768 NR Description: putative MADS-domain transcription factor
  misc_feature (47)..(286): NCBI GI NO: 9367315 NR Description: MADS-box protein 9
  misc_feature (47)..(286): NCBI GI NO: 28630961 NR Description: MADS5 [Lolium perenne]
  misc_feature (47)..(286): NCBI GI NO: 7446519 NR Description: MADS box protein - rice
  misc_feature (47)..(286): NCBI GI NO: 33304376 NR Description: MADS box protein [Oryza sativa]
  misc_feature (39)..(286): NCBI GI NO: 7446543 NR Description: MADS box protein - rice
  misc_feature (47)..(286): NCBI GI NO: 7446518 NR Description: M79 protein - rice
  misc_feature (47)..(286): NCBI GI NO: 33242919 NR Description: MADS box protein
  misc_feature (58)..(286): NCBI GI NO: 5051935 NR Description: MADS-box protein FDRMADS1 [Oryza sativa]
  misc_feature (47)..(286): NCBI GI NO: 7446544 NR Description: MADS box protein - rice
DFQHLRSGCALPCFPATCSSASERGTAADLAAQAEGSAGAGKSAPNMGRGRVELKRIENKINRQVTFAKRRNGLLKKAYELSVLCDAEVALIIFSNRGKLYEFSSTQSMPKTLEKYQKCSFAGPETALQNRENEQLKSSRNEYLKLKARVDNLQRTQRNLLGEDLESLGIKELEHLEKQLDSSLKHIRSTRTQHMVDQLTELQKKEQMFCEANKCLRRRLEESNQVIWQHAWEQSERHSEVQPQQLNGNNFFHPLDGAGEPTLQIGYPSEALTSSCMTTFLPPWLP

SEQ ID NO: 33679 - protein, 240 aa, Zea mays subsp. mays
  peptide (1)..(240): Ceres Seq. ID no. 13577877
  misc_feature (75)..(176): Pfam Name: Pfam Description:  K-box region
  misc_feature (1)..(240): NCBI GI NO: 29372768 NR Description: putative MADS-domain transcription factor
  misc_feature (1)..(240): NCBI GI NO: 9367315 NR Description: MADS-box protein 9
  misc_feature (1)..(240): NCBI GI NO: 28630961 NR Description: MADS5 [Lolium perenne]
  misc_feature (1)..(240): NCBI GI NO: 7446519 NR Description: MADS box protein - rice
  misc_feature (1)..(240): NCBI GI NO: 33304376 NR Description: MADS box protein [Oryza sativa]
  misc_feature (1)..(240): NCBI GI NO: 7446543 NR Description: MADS box protein - rice
  misc_feature (1)..(240): NCBI GI NO: 7446518 NR Description: M79 protein - rice
  misc_feature (1)..(240): NCBI GI NO: 33242919 NR Description: MADS box protein
  misc_feature (12)..(240): NCBI GI NO: 5051935 NR Description: MADS-box protein FDRMADS1 [Oryza sativa]
  misc_feature (1)..(240): NCBI GI NO: 7446544 NR Description: MADS box protein - rice
MGRGRVELKRIENKINRQVTFAKRRNGLLKKAYELSVLCDAEVALIIFSNRGKLYEFSSTQSMPKTLEKYQKCSFAGPETALQNRENEQLKSSRNEYLKLKARVDNLQRTQRNLLGEDLESLGIKELEHLEKQLDSSLKHIRSTRTQHMVDQLTELQKKEQMFCEANKCLRRRLEESNQVIWQHAWEQSERHSEVQPQQLNGNNFFHPLDGAGEPTLQIGYPSEALTSSCMTTFLPPWLP

SEQ ID NO: 33680 - protein, 178 aa, Zea mays subsp. mays
  peptide (1)..(178): Ceres Seq. ID no. 13577878
  misc_feature (13)..(114): Pfam Name: Pfam Description:  K-box region
  misc_feature (1)..(178): NCBI GI NO: 29372768 NR Description: putative MADS-domain transcription factor
  misc_feature (1)..(178): NCBI GI NO: 9367315 NR Description: MADS-box protein 9
  misc_feature (1)..(178): NCBI GI NO: 28630961 NR Description: MADS5 [Lolium perenne]
  misc_feature (1)..(178): NCBI GI NO: 7446519 NR Description: MADS box protein - rice
  misc_feature (1)..(178): NCBI GI NO: 33304376 NR Description: MADS box protein [Oryza sativa]
  misc_feature (1)..(178): NCBI GI NO: 7446543 NR Description: MADS box protein - rice
  misc_feature (1)..(178): NCBI GI NO: 7446518 NR Description: M79 protein - rice
  misc_feature (1)..(178): NCBI GI NO: 33242919 NR Description: MADS box protein
  misc_feature (1)..(178): NCBI GI NO: 5051935 NR Description: MADS-box protein FDRMADS1 [Oryza sativa]
  misc_feature (1)..(178): NCBI GI NO: 7446544 NR Description: MADS box protein - rice
MPKTLEKYQKCSFAGPETALQNRENEQLKSSRNEYLKLKARVDNLQRTQRNLLGEDLESLGIKELEHLEKQLDSSLKHIRSTRTQHMVDQLTELQKKEQMFCEANKCLRRRLEESNQVIWQHAWEQSERHSEVQPQQLNGNNFFHPLDGAGEPTLQIGYPSEALTSSCMTTFLPPWLP

SEQ ID NO: 33681 - DNA, 1504 bp, Zea mays subsp. mays
  misc_feature (1)..(1504): Ceres Seq. ID no. 13492786
gtcttgtttcgctgtcttgttccgcgctccccaacccccctcccaaccccaaccccgtcccaacccccactacggccttccccccatggctcccctggcctcccttcctctcccgcccagtactgccgtcaccgctcgcttcctcgccgcccccgccatccgcgtgatcagcccatcgcggcccgcgctgccgctcctctcatccgcctccgcaggcggcttccctcacgcctctcgcgctccctgcagtgccgcccgcgagcaccgccgcggcaccgtgcgggaatgctctcgagctgatgctgctggagcagctccattatcaaagacactgttagacctcaaggattcctgctggagatttttaaggccacatacaatccgaggaactgctttaggatccatagcattggttgcgagagccttgatagagaattcccatctgataaactggtggttgatattcaaagcattctatggacttggggcattgatatttggcaatggttacatagttgggattaatcagatctatgatgttgctattgacaagataaacaagccatatttacccattgctgctggtgatctctcaattcagtcagcatggttgttggtgatattatttgcagctgcaggtttttcaattgttatatcaaactttggacctttcattacctctctatactgccttggcctatttcttggcactatatattctgttcctccattcagactgaagagatatccggttgctgcttttcttatcattgcaacggttcgtggtttccttctcaactttggcgtgtactatgctactagggctgcactaggtcttacattccaatggagctcccctgttgctttcattacatgcttcgtgacactatttgctttggtcattgctataaccaaagatctccctgatgttgaaggagatcgcaagtatcaaatatcaactttggcaacaaagcttggtgtcagaaatattgcattccttggatctggtttattattagcaaactatattgctgctattgctgtagcttttaccatgcctcaggctttcaggtgcactgtaatggttcctgtgcatgctgtccttgctggtggtttaattttccagacatgggttctggagcaagcgaagtacagaaaggatgctatttcgcagtactatcggttcatctggaatctcttctatgctgaatatatcttcttcccgttaatatagagaggtgagtttcctgattagcattcagcatccatgaccctttgcttctgacatttgtctgcacaaaaaaatgtcagatcttgtagttcatcttgatcttgggctacagcctaattcatggtgaaaagagggagaagttggcaaagtgaggtctgtcgtgcatattttcaacggaaacaatggagtagcaatattgctatgctagggttctgaagttgtaggagcttttctaagcttttacgatgttgaaggcgttgttggagctgtggc

SEQ ID NO: 33682 - protein, 410 aa, Zea mays subsp. mays
  peptide (1)..(410): Ceres Seq. ID no. 13492787
  misc_feature (128)..(373): Pfam Name: Pfam Description:  UbiA prenyltransferase family
  misc_feature (29)..(410): NCBI GI NO: 34393498 NR Description: putative tocopherol polyprenyltransferase
  misc_feature (103)..(410): NCBI GI NO: 30681973 NR Description: UbiA prenyltransferase family
  misc_feature (26)..(386): NCBI GI NO: 10998133 NR Description: dbj|BAA17774
  misc_feature (119)..(409): NCBI GI NO: 23125851 NR Description: hypothetical protein [Nostoc punctiforme]
  misc_feature (117)..(270): NCBI GI NO: 23039416 NR Description: hypothetical protein
  misc_feature (290)..(409): NCBI GI NO: 23039416 NR Description: hypothetical protein
  misc_feature (119)..(409): NCBI GI NO: 16330366 NR Description: unknown protein [Synechocystis sp. PCC 6803]
  misc_feature (119)..(409): NCBI GI NO: 17230940 NR Description: hypothetical protein [Nostoc sp. PCC 7120]
  misc_feature (119)..(409): NCBI GI NO: 37519852 NR Description: unknown protein [Gloeobacter violaceus]
  misc_feature (109)..(410): NCBI GI NO: 30680535 NR Description: tocopherol polyprenyltransferase
SCFAVLFRAPQPPSQPQPRPNPHYGLPPMAPLASLPLPPSTAVTARFLAAPAIRVISPSRPALPLLSSASAGGFPHASRAPCSAAREHRRGTVRECSRADAAGAAPLSKTLLDLKDSCWRFLRPHTIRGTALGSIALVARALIENSHLINWWLIFKAFYGLGALIFGNGYIVGINQIYDVAIDKINKPYLPIAAGDLSIQSAWLLVILFAAAGFSIVISNFGPFITSLYCLGLFLGTIYSVPPFRLKRYPVAAFLIIATVRGFLLNFGVYYATRAALGLTFQWSSPVAFITCFVTLFALVIAITKDLPDVEGDRKYQISTLATKLGVRNIAFLGSGLLLANYIAAIAVAFTMPQAFRCTVMVPVHAVLAGGLIFQTWVLEQAKYRKDAISQYYRFIWNLFYAEYIFFPLI

SEQ ID NO: 33683 - protein, 382 aa, Zea mays subsp. mays
  peptide (1)..(382): Ceres Seq. ID no. 13492788
  misc_feature (100)..(345): Pfam Name: Pfam Description:  UbiA prenyltransferase family
  misc_feature (1)..(382): NCBI GI NO: 34393498 NR Description: putative tocopherol polyprenyltransferase
  misc_feature (75)..(382): NCBI GI NO: 30681973 NR Description: UbiA prenyltransferase family
  misc_feature (1)..(358): NCBI GI NO: 10998133 NR Description: dbj|BAA17774
  misc_feature (91)..(381): NCBI GI NO: 23125851 NR Description: hypothetical protein [Nostoc punctiforme]
  misc_feature (89)..(242): NCBI GI NO: 23039416 NR Description: hypothetical protein
  misc_feature (262)..(381): NCBI GI NO: 23039416 NR Description: hypothetical protein
  misc_feature (91)..(381): NCBI GI NO: 16330366 NR Description: unknown protein [Synechocystis sp. PCC 6803]
  misc_feature (91)..(381): NCBI GI NO: 17230940 NR Description: hypothetical protein [Nostoc sp. PCC 7120]
  misc_feature (91)..(381): NCBI GI NO: 37519852 NR Description: unknown protein [Gloeobacter violaceus]
  misc_feature (81)..(382): NCBI GI NO: 30680535 NR Description: tocopherol polyprenyltransferase
MAPLASLPLPPSTAVTARFLAAPAIRVISPSRPALPLLSSASAGGFPHASRAPCSAAREHRRGTVRECSRADAAGAAPLSKTLLDLKDSCWRFLRPHTIRGTALGSIALVARALIENSHLINWWLIFKAFYGLGALIFGNGYIVGINQIYDVAIDKINKPYLPIAAGDLSIQSAWLLVILFAAAGFSIVISNFGPFITSLYCLGLFLGTIYSVPPFRLKRYPVAAFLIIATVRGFLLNFGVYYATRAALGLTFQWSSPVAFITCFVTLFALVIAITKDLPDVEGDRKYQISTLATKLGVRNIAFLGSGLLLANYIAAIAVAFTMPQAFRCTVMVPVHAVLAGGLIFQTWVLEQAKYRKDAISQYYRFIWNLFYAEYIFFPLI

SEQ ID NO: 33684 - DNA, 1481 bp, Zea mays subsp. mays
  misc_feature (1)..(1481): Ceres Seq. ID no. 12341277
ctgttccggctctgtggagcgccgccccttctccgacgtggcgcctcagtatttgttagggttttctccgggattgaaggcactgctgcaggctgaaacgtttctcgcttgattggcggaagaagggattccagcgatctgtttgctgctagctgcgagagttcaatatgtctcggaccttcaaatcgacgacgggtctctctcggcggtttctgaatctgatcgcggccaaccactcccctggcgtcaagtcgctgcaccgcatcggcctgggtcgcatctttaactcaacgccagggccaataccaaacggagatcgattggagtccgcagcaggacaagaagactacatggtgcggccccgcgcgttggatatcattcggctccccacgccggtaatgagcttccgatcttcagcgtcatttgaaagcaaagaatggaagttggattgcttcccgttatcggactgcaaagttttctgcatggaccagtcagggcgcggtttcctcttcgatgccaactcgtgcggggtgtcaaccgtggcccatctccatacacccaaggtgaagcccatctccctctctatcccccaacccaatgttgacgaagacgaccacaacgacgagtggggcagcaaacttttcatcttggagagcatgcccgaagaaccagaggtgaactgccagttcgaggccttcatctaccgcatgcgagatgtgtatcccagggtactgaaacattggaatcgccacctcgtcccaccgccgccgccattcatccgtgagacagttaaccagaatagccgccgccttgaggttacatcttatgctgtgattgaggatggctcccacatctgcatatccattgagggcgctggcacctactgcatgcacacggtcagccacacgtggaaccgggtcggcgagtggacactacccttccgtggcaagattgagtacgtgcccgagctcaaactctggtttggcacctctgccgagtctgggcacctggctgcggctgacctctctgccatggactcccagccacagctagtgggtacttggaaggaacttgatccgccagagggttggaaggaatgcaaggattctcaggttgtcaacctcggctccggtaggttctgtatagcaaggttctttaagaaaaatccagtggacgtacgttctggtgacgaactaccgggccagagttttgctgtccttaccggcgtggaggtggtgaatcgagggtgtgatgcggaagtggaactccggatggtcactcacaaatcgaggcgagtcaacagcactacaatcgagacattgttctgattttatccattatgtgtcatctgaattagtaaaagccatcttttcttggcatctatttcttgtgtttctctctgttctcagtgtattgttcttcgatgctgaaactgattcaacttatgtacgctcttgatttacaaatttctgttgtgcttc
